United States Patent Application Publication US 2007/0161031 A1 - sequence listing, part 23

SEQ ID NO: 28744 - DNA, 2300 bp, Homo sapien
tcagttagcaataatatgtcaacattggctcatcagtggcaacaaatgtacctcaccaatgcaagatgtttgtttgttgtttgtttgttttgtgacggagggggtgcagtggcgcaatctcggctcactgcaagctccgcctcccgggttcacgccaatctcctgcttcagcctccggagtagctgggactacaggcgcccgccaccacgcccggctaattttttgtatttttagtagagacggggtttcaccatgctagccaggatggtcttgatctcctgctgtcgtgatctgcccgcctcggcctcccaaagtgctgggattacaggcatgagccatcacgcccggccaccaatgcaagatgttaataacagggaaactgtggtgggagtgaggtggtatatgagacctctctgtactttccactcaatttttctgtaagcccaaaacttctctaaataagaaagtttattaattaaaagttacttttatagtgtatctatatctaggaataaatctgaaaaagatatataagatctctactcagaaaactgattatgttattaagagagcttaaatatagcccaaataaatagatggatatactatgttcatggaagggacagctcagtattaggaaggtgtcagtcatcttaagaaaagcctcatgtgtcacacaagggatactgacatctgacaccaagcacatgtaggcatcctgactacgtttacttgaatgatgtggactttacagagctgactatagacagttcaaatggcctgaaaactgttcaatgcactccctcccaggctgtcatgggatgcacttcaggaactttactttttaacaagaaaattcagttttcctcttaaacagctggcttctgttccattagcattcttgtcactttaagttgcattcatctttgttttttttttttagaaaaacatttgttctgcaaccagtcttgtcctttaaatacttgtactgtatacaggctctttttcataggtccattacttaaaatgatgtaagtgtgtttttggtggcaggggggtgggagttgtttgttttgttttgttgagacacggtcttactctgtcacccaggctggagtgcagtggtgtgatcttggctcactcctggcctcaagtgatccacccacctcagcctcctaagtagctgggaccacaggtgtgtaccaccacacccagctaattttttttttttttttttttttttttgtagggacggggttttgtcatatcacccaggctggtctcaaactcctggactcaagggatcagcctgtctcagcctcccaaagtgctgggattacaggtgtgagccactgcaccggtcctgatttgagtttttgtaagacagggaacaatgttcagaatttagcaccaatgtcagactcattctgtaaatttttattgaacgtctgcctggtgtaggagaggaagatgacagacaagaattcttcctccaagagttacaggtcagttgagcagaaaaggcatacatcaatacccacaatgagagttgtcgtgattcagaggagggacaaagtccttcccctggagggatcctgagcactttggagaggaaaggcatctgtactgccccccaaatgtgtagaatgggatgcattcctggcagaaagaagtaggataaagtacagaggccagggctgggtgcagtggttcacgcctgtaatcccagcactttgggaggccgagacagcagatcacctgaggtcaggagttcgagaccagcctggtcaacatggcaaaaccctctctctactaaaaatacaaaaattagccaggcacaatggcaggtacctgtaatcccagctacttgggaggctgaggcaggagaattgcttgagcccaggaggcagagatcgcagtgagccaagactgcgccactgcactccagcctgggcaacagagcaagactctgtctcataaaaaaagaaaaaaaaaaagtacagagtccaggaagcctggggtggggctggcagatgccgagtcatctattttggccagagttcaaggcttgctaggggacatgaagagaagattcgtgcattctagttcaaactccaccagatatttgagctccttctctgtaccaggcattgttctaagatacgtaagtgaacaaaacccatgacaccctcgtctatgagagctgatcctctggcagggacagacaggtcatgagtggagtgatggagcagctggcctggtgacttagccgccttcaggtacagtaggaggagcaagc

SEQ ID NO: 28745 - DNA, 2300 bp, Homo sapien
aattatccaggcatcatggttcgtgcctgtagtcctagctactcaggaggctgaggtaggaggattgcttgagcctgggagttcgaggctgcagtgaaccatgatcacactaaagcactctagcctgggcaacagagcaagaccctgtatcaaaaaaacaatcaaacaaaaaatcactcctaattttcctcccttttagtacttttaaaaattaacttaaaacattttttggataattgtagttttttttacttttttttttttgagacagagtctcattctgtcacccaggctggagtgtactggtgcaatctcaggtgactgcaacctctgtctcctggattcaagtgattctcctgcctcagcctcctgagtagctgggttcataggcgtgcaccacacctggctcgtttttatatttttagtagagatggggtttcaccttgttggccaggctggtctcagattcctgacttcaagtgatctgcccgccttggcctcacgtgcagttttaggaaataatacagagatccccagcactctttccagttttccccaagggtaacatcttgcaaagtgagaggacgatatcacagtcaggatactgacattgataccatcaagatacataatgtttccatcaccaatcagtggtcatggtgccttttatagccaaacccacttctctcctaccttcccatcccttttttaattttgccagtcattaatctgttgcccatttctgtcattttatgaatgtcacataggccgggcgcggtggctcacgcctgtaatcccagcactttgggaggccgaggcaggcggatcacgaggtcaggagatcgagaccatcctggctaacatggtgaaaccccatctctactaaaaaatacaaaaaattagccaagcgtggtggcgggcgcctgtagtcccagctactcgggaggctgaggcaggagaatggtgtggacccgggagacggagcttgtagtgagctgaaatcacaccactgcactccagactgggtgacaaagcgagactccatcttaaaaaaaaaaaaaaaagaatgtcacataatgaatcatatggcatataaccgtttgagactcagggtaattctcatgagactcatccagcttgttggtgcatcaacagtttattcctttttattgctgagtaatttccatggtatggaggaaccatggtttaactattcacccattggaggacatctaggttgtttccagcttggagttattatgaataaagctgctgtgaacatttgtgtacaggtttcttggttttctggtttgttttaaacagttctagccaggcacggtggctcacacctgtaatcctaacacttggaaggctgaggtaggaggactgcttgatcctaggaggcagaggttgcaaggagccgaaattgtgccactgtactccagcctgggcaacatagcaagaccctgtcattcataggtaggtggatggatggatggacggacggacagatagataggtagaaatgtaaattacagggctacgctcagtggctcatgcctgtaatctcagcactttgggaggcgaaggcgggcggatcaccagaggtcagcagtttgagaccagcctggccaacatggcaaaaccccatctctactaaaaatacaaaaattagccaagcatgctggcatgtgcctgcaatcccagctactttggaggctgaggcaggagaatcacttgaacccaggaggcggaggttacaatgagccaagatcatgccactgcactccagcctgggccacagagtgagactccgtatcagtactttctttttattgtttttctgttattatagtttaagttcattgttattagattatatactctgtatggcttcaattcttttaaatttgttgaggtttgtttaatggtcaaagacatggtctgtctaggtgaatgttccatgggcttttagggaaaaaagtatattctagtgttgttgaatggtgtcttagtccattcaagctgctataacaaaataccgtaaactgggtgatttataaacaacagaaatttttctctcacagttctggaggctgggaagttcaagatcaaagtgccagcagattcagtgtcatgtgaggacgtgcttcctgcttcatagataagaggtacatacacgtttaggagcatcgtgtcttcctggtggatgaattctgttatcattaggtgatcctttgagcacttttaaaaagaatctgttggccgggcgcagtggctcacgcctgtaatcccaggac

SEQ ID NO: 28746 - DNA, 2300 bp, Homo sapien
acacatgtacccacacctgtgtgtacacacacacatgcatgctcacacacatgcacccaggcacacacaaatccacattcacccatacagtcacacacatgcatacacacacatacaaacacatgcattcacacagatgcatacacacacacacttacaaactacacatgtgcttatacatgctcacatgcatgtatatgcacacacataccctcaccttatgcacacatgtacccacacacgtacccacacatatacaagcatgcacacatatatatatatacacatgctcacacgcatacccacactcacatgtgtgcacatatgctcacacacacgtgcacacacatgctcacacacacacttactgttgctcaggcttagctgctttgggcttaagaagcaaactgcaccttccaaaaaatgagtgtggtgttcagttaaacaaccaaataattctttagcactgaatatgtggactttagaaattcaaactataaggtgataataacgttgtcctgctactttttaatctaacaaacatatcagaactgacactcagttcaaatgaagaaagtaggaattgggcgtgccgtgttattttttcaaagattctcctattgctccaaattgttggggattatcttaaagtctttgaatagcttcagttatggaagattttaccctctgagaatagaactgaattttagacaaaccatgagtccattgtagctagactggcatgcaagttgggattaaacagagtaaaacgtcttgtttaaaaaaataagaaaggccggcttgggcaacatagtgagacctcctctatgaaaagttagctgggcatggtggtgtgcgcctgtggttccagccgctcaggaggccgaggcaggaggatggaggtcaagactgcagtggactgtggttgcgccactgtactccagcctgggtgacacagcaagaccccgtctcaaaaaaagaaaacagaaaaaagaaaaaaaaagttgagcaaggagactaatttgtgacatgcagctgaacatggtttttaagaccagttttgaaagaggaattccaacattattcttaacatttcagaagcctgggcataagggtgacctccagggtgccgtgttataacaggactgctcctttcaacagctatgaccttataccatgtcttggggtgttgcctgccgtgtgacagtccaatattatacctactacttaagttttctttagattaaaaaatgtgcttcatattttatgccatttctacaaatgtatagtaaaacataaccaagagagcttattaaataatttcatccaaagcagttctaccagtgcttcacatttattttttatttatttatttatttttgagactgagtctcactctcttgcccaggctggagtgcagtggcgcaatctcagctcactgcaacctccccctcctgggttcaagcgattctcctgcctcagcctcctaagtagctgggattacaggtgccagccaccacacccgactaatttttgtatttttagtagacacgggcttttgccatgttggccgggctggtctcgaaatcctgacctcaggtcatccacctaccttggcctcccaaagtgctggcattgcgggcatgagctactgcgcctggtccacatttaattttttgcaaaaagatgacagctgctaacagagatgaattctcatgagtgatatcattgagcttcgtaggccacatgagtgtgtgccgggaccagtgtggcagcaagcggggcgttctgctctcggcatggagtgattggggaaaatctaggcagcttcctgcctcacgctgtttaaaacctttataatgtgctttatttcatttatttgaaatgactgcctgtcgtgtcagatatattcatagtcaagcttgagtataaaaggcatattccaaagttaaatataagctgctgcatagatttttttgtaaaatgatctcaccaagaatgtttatccataaagtttagcgaatttgcaagtgtgtttttcaacagcatttctctttagctttaataaacattggtttcttcatggtaccactcattttgaattcagtggtctccagttctccctgctaaatgaggcccactttctaaaaccaaagtgataattttataaaaatgaaatgagatatttgttaccacagaagtcctcatttacgagagtacatccccatagaactagtccacggtgagcctcaggggcatgcaagctgtttaacgatgcccccagcctagaaaggcccagg

SEQ ID NO: 28747 - DNA, 2300 bp, Homo sapien
ctccgcgcctgcgtctgcggctgcaccggggttggccgggccgcggtggggcggggccgctcaggcgccttggacgcggagccgtgggacgagggcggcggtgagttcgaggtggcagagtgactggggcgagcgtgctgtggcccttccctgcgctgcctcagggtgcctcccgctcgccgggactgagttccgcgccggcgtggcctgctgggttccaagcgccaggagtcggcgcagccgctctcagctttggggacgggaccgagaagcggggtgtgggcctcacgggactgtcccccctgacctcgggcagcgctggggcgagagagggcaggcggaggctcgcggggaccaccagcatccccggaccctctcagccgtccctgttcacaggcaccgcccccaggagcctcggcaggggcctaggacgccccggcgtgcagaagagaagcgggatcaggttcacgcacacccgcgatcgatcgtaacttttgttttgagacagagtctcgctctgtcgcccaggctggaatgcagtggcgcgatctcggctcaccgcaacctccgcccccccagcccccgctccccaaccccccgctcaagcgattctcctacctcagtctcctgagtagatgagattagaggcgcccgcccccacgcccggctaatattttattttatttaattttaatttttatttttttgagaaggagtctcgccctgtcgcccaggctggagtacagtggcacaatctcggctcactgcaatctccgcctcctaggttcaagtgattcccctgcctcagcttcctaagtagctgggattacaggcacccgccactatgctcggctaatttttgtacttttagtagagatggggtttcgccatgttggctaggttggtcttgaactcctgacctcaggtaatccgcccgcctctggctaccagagtgctgggattacaggtatgagcaaccacaccgggccagacttaacttttaaagtcactggtaacccatgcttcctggagttgcatctggggacacccagtggggaaagccatcgcatttgatacgcctttatacaccacgctcagttcaggcgaggggaggtcacagccaagagctaggggccagctgataatgtcgtacttgattccatagtcaaagaaggagctgggtaatcagcaaaattgtaacttttgatgaacccatcagatggcagccatttagccagaaatctaaggaaagagaggcctccaagacccaaccatgaacatgagaagggggttccatacaagcagataagaaaacagtttttttgtttgtttgttttttgagatggagtctcgctgtctcccaggctggagtgcagtgacgcgatctcggctcactgcaagctccgtctcctgggttcacgccattctcctgcctcagactcccatgtagctgagactataggcgcccgccaccacgcctggctaattttttgtatttttagtagaggcggggtttcaccatgttagctagatggtctcgatctcctgacctcgtgatccgcctgccttggcctcccaaagtgctgggattacaggcatgagccactgcgcctggccaagaaaacagttctaatgtccacaccacgtgtggactaatgtgagggcatagagcttctaggagcagcagaaacaggagattttgcacccactctgggcccttctccaccagcgttcactgggggcttgtggtaaagaatggggcagagcaggagaccggaacgcttttaccgtggtgcagacctggaagaagagatgggtgctctggcttgatcctgtctggatccttctctctagcagtacaaaaaccttaaaccattggaatatggacagcaaatcctgtcactctgggcaccggtgaaaacctgtttcagctggggatagagaaaagggtacggtagggaggcaagaaactgtgctaggactatatggttagggtcttcatagctgggaaaggggcaggattcctgagaaagcctgtgacccagggacaccccatctcttgatcttgcagatggcgtcccatgtagagtgccgtcctctgggagtgtttgagtgtgaactctgtaccttgacagctccgtacagctatgtgggacagaagccccccaacacccagtcgatggtgtgagtgcatgccttttgggccagtgccggggaggcctgtgcccagtgctggttggtgggtggtgtgcctaggtctgacaactgtctcaggtgtggagctttagaccccaccctgg

SEQ ID NO: 28748 - DNA, 2300 bp, Homo sapien
gacgccatctgcaagatcaagagatggggtgtccctgggtcacaggctttctcaggaatcctgcccctttcccagctatgaagaccctaaccatatagtcctagcacagtttcttgcctccctaccgtacccttttctctatccccagctgaaacaggttttcaccggtgcccagagtgacaggatttgctgtccatattccaatggtttaaggtttttgtactgctagagagaaggatccagacaggatcaagccagagcacccatctcttcttccaggtctgcaccacggtaaaagcgttccggtctcctgctctgccccattctttaccacaagcccccagtgaacgctggtggagaagggcccagagtgggtgcaaaatctcctgtttctgctgctcctagaagctctatgccctcacattagtccacacgtggtgtggacattagaactgttttcttggccaggcgcagtggctcatgcctgtaatcccagcactttgggaggccaaggcaggcggatcacgaggtcaggagatcgagaccatctagctaacatggtgaaaccccgcctctactaaaaatacaaaaaattagccaggcgtggtggcgggcgcctatagtctcagctacatgggagtctgaggcaggagaatggcgtgaacccaggagacggagcttgcagtgagccgagatcgcgtcactgcactccagcctgggagacagcgagactccatctcaaaaaacaaacaaacaaaaaaactgttttcttatctgcttgtatggaacccccttctcatgttcatggttgggtcttggaggcctctctttccttagatttctggctaaatggctgccatctgatgggttcatcaaaagttacaattttgctgattacccagctccttctttgactatggaatcaagtacgacattatcagctggcccctagctcttggctgtgacctcccctcgcctgaactgagcgtggtgtataaaggcgtatcaaatgcgatggctttccccactgggtgtccccagatgcaactccaggaagcatgggttaccagtgactttaaaagttaagtctggcccggtgtggttgctcatacctgtaatcccagcactctggtagccagaggcgggcggattacctgaggtcaggagttcaagaccaacctagccaacatggcgaaaccccatctctactaaaagtacaaaaattagccgagcatagtggcgggtgcctgtaatcccagctacttaggaagctgaggcaggggaatcacttgaacctaggaggcggagattgcagtgagccgagattgtgccactgtactccagcctgggcgacagggcgagactccttctcaaaaaaataaaaattaaaattaaataaaataaaatattagccgggcgtgggggcgggcgcctctaatctcatctactcaggagactgaggtaggagaatcgcttgagcggggggttggggagcgggggctgggggggcggaggttgcggtgagccgagatcgcgccactgcattccagcctgggcgacagagcgagactctgtctcaaaacaaaagttacgatcgatcgcgggtgtgcgtgaacctgatcccgcttctcttctgcacgccggggcgtcctaggcccctgccgaggctcctgggggcggtgcctgtgaacagggacggctgagagggtccggggatgctggtggtccccgcgagcctccgcctgccctctctcgccccagcgctgcccgaggtcaggggggacagtcccgtgaggcccacaccccgcttctcggtcccgtccccaaagctgagagcggctgcgccgactcctggcgcttggaacccagcaggccacgccggcgcggaactcagtcccggcgagcgggaggcaccctgaggcagcgcagggaagggccacagcacgctcgccccagtcactctgccacctcgaactcaccgccgccctcgtcccacggctccgcgtccaaggcgcctgagcggccccgccccaccgcggcccggccaaccccggtgcagccgcagacgcaggcgcggagcgggaggcgggacctcgcggtggttttccgcctctgccttgcttttccggtcgccgcggtcctctgcgcgggatgtggctctgagcttcggggtagtccgcgaggctgggttccgtgctgaggggcgtcgcgtctggccgtgcgctgcgggagcgcgcgggcctggcccgctgtcctggccgctgcgaggcgctcagcttctttctgagtgttccgccggg

SEQ ID NO: 28749 - DNA, 2300 bp, Homo sapien
gccaaattagacaaactttcctgagtcagtatactttcagatagtttttagttatttcaattgggagaaacttgactctgctgagtggtaacgaattatgaataaattcttaaagcgttatatgtagaactgaatcatgactgttgatatcatgtttaaacagtgtagaaagggtgcatatgaaaaattatgattgcagaaaatattacacaatattttcattatataaaataatgttattatttcaccattatcatcgtttcttacatttagatccatacaggatttcttacgtttttcttttacgttgttggggtattaccaagaaaactgaaaactgcggtagattactcactttgtttgaatctctctcttcagtacaatctacaccttgatctaccatcgccggaaaattgtctctatagaagttagtttcagaatcattcatccataaatctttttcttcagactccagcaaatgcttctagttccgattttcttacattgtactttaatgtcattttagtgcttatttcatatgcagttgctttttggaaaccattttctcctaaaactttatgcaatattttaaatccttttggattctttaaaacgttttctaattgtaataactggacagctcaaatacaaaattaactctattttctgccaaagaccacgatttgctctttgaatgctgcctattatttcacttaactcttttaacgcatctcatgtgttaacctgtctacaataagtcaaattgctttaacagcactcatggggttaccatcattgtatctgagggtagccacaggtcaaattcaaaatgcttcaagatgttccatctttagacaccgccagaaacaaacaaacaacccagtatgtcatctttgaaatgatccaacgaatcgaatgccgttgctctaagtacagtggaggtcatcgaaatccagctgcttgctaatcgcttgctaatttctggggcccctcttgcccaggtctaagagtggttctggtttccattagtgctaaaatgccttctatatccttacttctcaattcgccaaaggagcaagtcccagaccccagcctgctgcaactgggcaacattcctacagatgtggcttgacaaaccaagaataaattctggtctctcaggaacagagacgaagcacccctcggcctagggaaaggtcacagagggccccgtaacgcaacagcatgtgaaaggctgccggctggtggcacaggcagaccttctcccgcgtggagcaaaaccctcaaatctttgggggaaggagggtggccatcctgtcgtccccaaagcacaggtgaaggcccgcggcggctggggcgagggactcgagctgggaggatcggggcccacaggcaaagccaggccggcttcagagtccgggcccctgaccccaaggaaaggtgcctctcacacaccggaggctccaggagtggggcgggcatttcgggtccagggcacggcgtgtcagaggccacgggcgggaacagaaggaagcaggtgtggctggtgcctgggggcgaggggcagcggagaggcccgggaggctaaaggagaacgcggcgcagacccgaggggcgccgcaggcgacgtgggctttggaggagcagggacaggtcctgagaccccgttgggccgacacaccccctcctgcatgcgggggcagacgtcccggtggggtagactggcagcctagtccgcggcgcgggagggcaggtgggagactggaggcgccctcgcgcccctcagctatccgggagcctcgcgccggcgacctcgaccctgtcgaacccggcggaacactcagaaagaagctgagcgcctcgcagcggccaggacagcgggccaggcccgcgcgctcccgcagcgcacggccagacgcgacgcccctcagcacggaacccagcctcgcggactaccccgaagctcagagccacatcccgcgcagaggaccgcggcgaccggaaaagcaaggcagaggcggaaaaccaccgcgaggtcccgcctcccgctccgcgcctgcgtctgcggctgcaccggggttggccgggccgcggtggggcggggccgctcaggcgccttggacgcggagccgtgggacgagggcggcggtgagttcgaggtggcagagtgactggggcgagcgtgctgtggcccttccctgcgctgcctcagggtgcctcccgctcgccgggactgagttccgcgccggcgtggcctgctgggttccaagcgccaggagtcggcgcagccgctctcagct

SEQ ID NO: 28750 - DNA, 2300 bp, Homo sapien
tagagcccccacacagagtccctactggggcaccgcctagtggagctgtgagaagagggccaccatcctccagaccctagaatggtagattcaccaacagcttgcaccatgagtctagaaaagctgcagacactcaacaccagcccacgaaggcaaccaggagggaggctgtaccctgcaaagccacaggggcggagctgcccaagaccataggaacccacctcttgcatcagcatgagctggatttgagacatgaagtcaaaggagataattttggagctttaggatttgactgccccactggatttcagacttgcatgggccctataactcctttgtttggccaatttctcccatttggaatggttgtctttacccaatgtctgtaccccactgtatctaggaaataactaacttgcttttgattttttttctgttttttgagacagagtttcgttcctgttgcccaggctggagtgcaatgacacgatcttggctcaccgcaacctctgcttcccgggttcaagcgattctcctgcctcagcctcccgagtagctgggattacaggcatgcaccaccacacccggctaattttgtatttttagtagagatggggtttctccatgttggtcaggctggtctcaaactcccaagctcaggtgatctgcccgcttcagcctcccgaagtgctgggattacagggtgagccactgcgcccagccagttgcttttgattttacaggctcataagcataagcgacttcctttgtctcagacaggactttggactgtggacttttgagttaatgtgaaatgagttaagactttggaggactgttgggaaggcatgattggttttgaaatgtgaggagatgagatttggcaggggtggaatgatatagtttggctctgtgtccccacccaaatctcatcttatagtcccataattcccacatgttgtgggagggaccgggtgggagataactgaatcacaggggcagtttcccccatattgttctgtggtagtgaataagtctcaggagatctgatgcttttatcaggggtttccgcttttgcgtcttcctcattttctcttgccactgccatgcaagaagtgctttttgcctcctgccatgattctgaggcctccccagccatatggaactgtaagtccaattaaacctctttttcttcccagtcttggttatgtctttatcagcagcatgaaaacggactaatacaggggagggccaattaagaccacgagtttgagaccagcctgtgaaacacagcaagacaccatctctacaaaaataaaaaataaatcagtcaggtgtagtggtgtagacctgtagtatgggaggctgaggcaggaggattccttgagcccaggagttcaaggttacagtcagctatgattgcaccattgcactccagcctgggcaacagagcaagaccctgtctctaaaatcattcaatccatcaatcaagtcccaaaatatacagcaaaaatggacagagttaaagaatgaggccaggcacagtggctcatgcctgtaatcccagcactttgggaggccgaggtgggtggatcacttgaggtcaagccattgcactccagcctgggtgacagagactccgtctcaaaaaacaaacaaacaaacaaacaaacaaaaaacaaaacccccaaaccaactagaaagaaaagagcaaagcgaccccaaagtaagaaaccgagagtcagaccttcctgggcgcccagggatctcacggttccctcctgatctcccattttgtgactggctttcccaagggttcctgctgaagccccttctccgtggtcagctctgtggtctgcacggggctgaactgccctcctgagccatcctgaccctgggcctgcacacacttggggacggagagggaagaggtacccaagaagtccccagtgccgactgaccccaagctccgaggtcccagctgctctctgggactctgtccctgggacccctctgccagcgcccttcgacgcccgagacccccactgtccccaagaccctcactatccccgcgaccccggtggcggttgggcgcgcctcgcggcctctcccagcttctcctgggccggcgccatgaggcctgggcccgctctcctccttctgggcgtgggcctgagcctgagcgtcggccgcctcccgctgccgccggttcctcgcggggcacaagccgccgtctccggggcgcccggtggcctcctcaggggcgccccgggcctcggggtgcgcggcggccgcgccct

SEQ ID NO: 28751 - DNA, 2300 bp, Homo sapien
tgcttgttatttatacaaatttctgcagctggtttgaattctcctcagaaaatggaattttctatcacattttcggtctgcaaatttttcaaacttttatgctctgtttcccttttaaaaccgaatgcttttaacagcatccaagtcacttcttgaatgctttgctgcttagaaatttcttctgccagataccctaaatcatctctttcaagttcaaagtcccacaaatctctagggcaggggcaaaatgctgccagtctctttgctaaaacataacaagcatcacctttgctccagttcctcatccccatctgagaccacctcagcctgtaccttattgtccatatcactatcagcattttgggcaaagccattcaacaagtatctgggaagttccaaaatttcccacatactcctgtcttctgagccctccaaactgttccaacctctgcctgttacccagttccaaagttgcttccacattttcaggtatatttttggcaacaccccactctaatggtaccaatttactgtattagtccatattagtactcagctcaagtgcaaaatttaagggtggaggggcaccaaaaactcaataatcaagacaaattctcttttattgaggtaaagttcacataaaagtaaccatttatgggaggctgaggtgggaggattgctggagccaggagttcaaggcttcagtgacttatcatccctatcccctcagtccctggtcaccaccaatcttctttctgtctctatgtttgcgtattctggacatgcatgtaaatgcactaatacaagtgttaccttttgtgtctgcctcttccttcagtatgaatgaaccttgaaaacgctgtaggaaaggtgtgtcttctttggagaactgtcacctcaaattctttgcccactttaaatttgggctgtttgtcatttcgctgttgagttgtaagaattctttttttttgagacagagtctggctctgttgcccaggttggagtgcagtggcacaatcttggcttactccaacctccacttcccgggttcaagcgattctcctgcctcagccacccaagtagttgggattacaggcatgcaccaccacgcctggctatttttgtacttttaatagagataaggtttcaccatgttggccaggctggtcttgaactcctgacctcaggtgatccacctgactcagcctcccaaagggctgggattacagacatgagctgctgtgcccggccaagatttctttatgtattctggattctagactcttacccaatatatgatttacaaatgttttttcccattgtgttaatcttttcagtttcctgagtagtgtcctttgattcagaaaagtttttaattttgacgaagtccaacttatctattttgttgttgttgcttgtccttttggtgttacatctaagaatccattgctaaatccaaggccatgaagatttacttctgttttcttctaagagttttatctttacagctctcacataaaacaaataatacttcagtgcaatatttcaaaaatcaaaactaatgcaaaaagtccatgatgaacaaaatagcattttaaataaaggccagatctgcccgtgcacttggttctacgcccttgattcgtgcaccctggggcgggggcaaattaaactaggggagcccattggactggggctggtgtgtggctgatggcagagttcaggccgggccagaccgggccagtccagagggagaagccgctactgcaggagacagagcgatttttccgctgcaaatccttgagaagggaggatggaggcggcgggacgacccagtgaagccggccccgaacgccaagtgagtgtgtgccgtgcgcgcgcgggtagctgccgaccgcaacgacataaacttgaaagtgaccgctgtcccggagctccctgctcccaagggacccgtcgcgttgcagagttgtccggtcgggcctctggggcgggcccggatcctggaccagggccagtctgtccgaaacccaccagtgagcgagcgggagagcgcggccgccccgccccgcccctttccgcgaccgccccgcccactcccaggaaggcccgggtgcccagagctcgcggtggactccgacccggcgcaacatggccgcagcctcgcctctgcgcgactgccaggtacacggaggctgcccccaaccaggtccccctcgggccccgggtcctgggggtggcccggtgctggcggaataacgggagacatggcccgggcgcggggcgtggggtgagccctg

SEQ ID NO: 28752 - DNA, 2300 bp, Homo sapien
ttgaggatcaaatgaggggctccacccacggcaaagtgtcactaagcgggatggaggaggatgcaggaagaggagtctgggaggacccgctctgaaaaggatggaactcgagagcaccattttcagggacgaagataagctgtttatttggggcaggctgtggggagagctgtgcagcaaacagccacccggggcccagggcagaggccttccaggctggctcgggcacttctgggtcccatgtccctggttttgcatcatccataccaatcactccatgttgctatgttccttcaccagaagactgggggctcaaaaagggcagggcagccctcactcaccagtctccccagcctcacccagctcagcacagggcaccaggcaggggctgagagtgctggggtaggtgggtgtggtcaaacagcttggaaagagtttggcctgctcattgcattcccctcagctcatcctggggatgtctgctcatgggagaatggcagagggatccccaacagtcattcctgatactcctctccctgtatcatgtcagcacatagtaggtgtggcctatgtatggcagattcatttctgcccccaataggatttgctgtagtttggatgtgtgtcccctcaaaatctcatgttgaaatgtgatcccaatgttggaagtggggcctggtgggaagtaattgggtcgtgagggcagatcccttatgaatggttcagcaccatccccttggtgatgagttcttgcttagttcacacaagatctggttatttaagagtctaagacctccccttctctcttactcctgctctcactatgtgatatactggctccccatcaccttatgtcatgatcttaagcttcctgaggttgcaccagaagcagatgccagcaccatacttcctgaaaagcctgcagaactgtgagccaattaaacctctttataaattacctagcgtcaggtatttcttcatagcaatgcaagaaggcctaatacagagtttgacttcatttatttatgccttcattcaccaactttcactgacagctactcagtgcaggccatgtgccaggtgatgctggggacagatgctgtccctgacctggagaggtcatggcaggggtgcaagagcaagggcaagtgccaagggctgaggggcacagaggcagcaccctcaccagcctgcagtgggggttggcgggtagaaggcttcctggaggagggaccagggttcccaattgcacagccaagtcatgtcttcttgcttggaaccaggagaggggaaggaggctccccttaggatgtgtccctagttcttgggtagagaaggcgcctctctggaaatactactataattaccccttttctttctttctttttttttttttttgagacggagtcttgctttgtcgcccaggctggagtgcagtggcgcgatctccgctcactgcaagctctgcctcccgggttcacgccattctcctgcctcagcctcccgagtagctgggactacaggcgcccaccaccatgcccggctaattttttgtatttttaatagagatggggtttcaccgtgttagccaggatggtcttgatctcctgacctcgtgatctacctgcctcagcctcccaaagtgctgggattacagacgtgagccactgcgcccgacctcccattttcttgactagatgccccacctacttttttttttttttcccttgagatgggagtctcgctctgttgcccagactgcagtgcaatggcacgatcttggctcactgcaatcactgcctcccaggttcaagtgattctcctgcctcagcctcccgagtagctgggattacagacgtgtgccaccatgctcagctaatttttgtattttcagtagacacagggtttcaccatgttggccaggctgatctcgaactcctgacatcaggggatccacccacctcagcctcccaaagtggtgggattacaggcgtgagccactgcgcctggcctgccccacctaccttaagttcaaggagaagccatctccccaggacccagccccaggcctgcaccacagatgctcaaagacttggaggaactgatgaattcattttaatcacagaaatttgcctgggcttgagcaaactgtggggactcaatagatttggaggcctcctctcccttctgagaggcctgcctgcttcctgccctgatgaatccctaatttcagtacaaactgaggaacttgaaaaacatctgtgcactgggaccgcccctcacaggagggctgaaagcag

SEQ ID NO: 28753 - DNA, 2300 bp, Homo sapien
atagtagtatttccagagaggcgccttctctacccaagaactagggacacatcctaaggggagcctccttcccctctcctggttccaagcaagaagacatgacttggctgtgcaattgggaaccctggtccctcctccaggaagccttctacccgccaacccccactgcaggctggtgagggtgctgcctctgtgcccctcagcccttggcacttgcccttgctcttgcacccctgccatgacctctccaggtcagggacagcatctgtccccagcatcacctggcacatggcctgcactgagtagctgtcagtgaaagttggtgaatgaaggcataaataaatgaagtcaaactctgtattaggccttcttgcattgctatgaagaaatacctgacgctaggtaatttataaagaggtttaattggctcacagttctgcaggcttttcaggaagtatggtgctggcatctgcttctggtgcaacctcaggaagcttaagatcatgacataaggtgatggggagccagtatatcacatagtgagagcaggagtaagagagaaggggaggtcttagactcttaaataaccagatcttgtgtgaactaagcaagaactcatcaccaaggggatggtgctgaaccattcataagggatctgccctcacgacccaattacttcccaccaggccccacttccaacattgggatcacatttcaacatgagattttgaggggacacacatccaaactacagcaaatcctattgggggcagaaatgaatctgccatacataggccacacctactatgtgctgacatgatacagggagaggagtatcaggaatgactgttggggatccctctgccattctcccatgagcagacatccccaggatgagctgaggggaatgcaatgagcaggccaaactctttccaagctgtttgaccacacccacctaccccagcactctcagcccctgcctggtgccctgtgctgagctgggtgaggctggggagactggtgagtgagggctgccctgccctttttgagcccccagtcttctggtgaaggaacatagcaacatggagtgattggtatggatgatgcaaaaccagggacatgggacccagaagtgcccgagccagcctggaaggcctctgccctgggccccgggtggctgtttgctgcacagctctccccacagcctgccccaaataaacagcttatcttcgtccctgaaaatggtgctctcgagttccatccttttcagagcgggtcctcccagactcctcttcctgcatcctcctccatcccgcttagtgacactttgccgtgggtggagcccctcatttgatcctcaagcccccgaggtgggtattatacctcgttcgcaggcaaaggctcaagcgaggtcagtcttaagttgctgcccactgacccgtctaccagtcctgtccttgcgtctccatggctcaggtcagggttatcctatctgcttcccacctctctccaacacatgcactccccaaggcaggctccatcaccgggccccagcccctggctctctcctccaacgcagctccccagccggcctgtaaaaccgaggacaggctcccgccacgccctcggcggtcctcaggccttggcggttggggaagcccgccaagggcgacggttcccctccagccccacaggctgtgcagctccggcaatgagtctccctcaggtctctgggtcagccggcgccccagtgcgtgcctcgggggcagggatcccggcttttcactactgttagtaacagctcgcgcgcgctgcttcacagcaggtgggtgagcctacttttagtcttcccatcgacacccttagatggcagttttaactttctccctacacacaaggagctgctatacatggttccggcttgacgcggatacctagtgacacttggcggccaggccgggcagacttccgggtgggtgatccctggcgctgtgcggagccattcgctgcgctgaagcagtgcgcatgcgcactggacgcttcttaccagcgtcctgactacaatacccaggacgcacccagcccgccgcctctcggagcccttttcaaaccgaccaatcggcaacccgcgtctcccggcgccgcgtttaaatccgtgccggaggcgcgtcctgcatcgtctgccgctttgggtaaggtggggtcagggtcgggggcgaggcttgcccggtgggcccggtgcggcgcggtgcccgccgttttcgggacggggaggggccgcgccccgccaggagccgggc

SEQ ID NO: 28754 - DNA, 2300 bp, Homo sapien
ttagactcttaaataaccagatcttgtgtgaactaagcaagaactcatcaccaaggggatggtgctgaaccattcataagggatctgccctcacgacccaattacttcccaccaggccccacttccaacattgggatcacatttcaacatgagattttgaggggacacacatccaaactacagcaaatcctattgggggcagaaatgaatctgccatacataggccacacctactatgtgctgacatgatacagggagaggagtatcaggaatgactgttggggatccctctgccattctcccatgagcagacatccccaggatgagctgaggggaatgcaatgagcaggccaaactctttccaagctgtttgaccacacccacctaccccagcactctcagcccctgcctggtgccctgtgctgagctgggtgaggctggggagactggtgagtgagggctgccctgccctttttgagcccccagtcttctggtgaaggaacatagcaacatggagtgattggtatggatgatgcaaaaccagggacatgggacccagaagtgcccgagccagcctggaaggcctctgccctgggccccgggtggctgtttgctgcacagctctccccacagcctgccccaaataaacagcttatcttcgtccctgaaaatggtgctctcgagttccatccttttcagagcgggtcctcccagactcctcttcctgcatcctcctccatcccgcttagtgacactttgccgtgggtggagcccctcatttgatcctcaagcccccgaggtgggtattatacctcgttcgcaggcaaaggctcaagcgaggtcagtcttaagttgctgcccactgacccgtctaccagtcctgtccttgcgtctccatggctcaggtcagggttatcctatctgcttcccacctctctccaacacatgcactccccaaggcaggctccatcaccgggccccagcccctggctctctcctccaacgcagctccccagccggcctgtaaaaccgaggacaggctcccgccacgccctcggcggtcctcaggccttggcggttggggaagcccgccaagggcgacggttcccctccagccccacaggctgtgcagctccggcaatgagtctccctcaggtctctgggtcagccggcgccccagtgcgtgcctcgggggcagggatcccggcttttcactactgttagtaacagctcgcgcgcgctgcttcacagcaggtgggtgagcctacttttagtcttcccatcgacacccttagatggcagttttaactttctccctacacacaaggagctgctatacatggttccggcttgacgcggatacctagtgacacttggcggccaggccgggcagacttccgggtgggtgatccctggcgctgtgcggagccattcgctgcgctgaagcagtgcgcatgcgcactggacgcttcttaccagcgtcctgactacaatacccaggacgcacccagcccgccgcctctcggagcccttttcaaaccgaccaatcggcaacccgcgtctcccggcgccgcgtttaaatccgtgccggaggcgcgtcctgcatcgtctgccgctttgggtaaggtggggtcagggtcgggggcgaggcttgcccggtgggcccggtgcggcgcggtgcccgccgttttcgggacggggaggggccgcgccccgccaggagccgggcctgggctcgagcaggggtcactgaggcccctcgcgccgtggtcggggatgccgggaggtctagggctgccccccaggcaaacagagcccccaacactctggcccagaagccgagaattccgttatctcgtctgatggcgttcgggctgactcccggcctggcggcactcgggccctggggtcccctgggatgcgatcatttcagagcggcccccgcgccgcctctcccagacctggccgcggccttcagctctctctgcctctgtgagccgagggctgaaggaagccggagccctgggccctgacacgtactcactttctggccccgttccaccctgcagtgacttctgacagctctctccatggaaggaggcggcggccgcgatgagccttcagcctgccgggcaggggacgtgaacatggatgaccctaagaaggaaggcaagtccttgctgctgcggcgctgttgttgttcaggatgttcagtagagatggagggtgatttaatgtttccctgagaaattctttctcaagtgctcgacttgtactctgcacctgtgaaacacatgaca

SEQ ID NO: 28755 - DNA, 2300 bp, Homo sapien
agtaaggaaatgaagtcaggtcaacggaagtggggaaggcctcaagaaggagcagggggtgcagtatgcacgtggaaaggacatatttgaaaggaaggacatgacaggaaggaggagaggggtgcagaggcaagcgccttgctagatatgaagatgcaacattgatttgtaaagtctccaggacagttcctgcaaaatggaggcattgaggatgcttggggccaggcgcggtggttcacacctgtaatcccagtactttgggaggcctaggcaggtggatcacctgaggtcaggagtttgagaccagcctggccaacatggtaaaaccccatctctactaaaaatacaaaaatcagccaggtgtggtggcgggtgcctgtaatcccagctactcgggaggctgaggcaggagaatcgcttgaacccgaaaggcagaggttgcagtgagccaagatcatgccactgcactccagcctgggagacagagtgagacttggtctcaaaaagaaaggatccttgggtagtgtgagaaaactacccaagggatgtcaaaatgctttgtgaggctgggtgaggtggctcacacctataatcctagcactttgggaggccgaggcaggcagattgcctgagctcaggagttcgagaccagcctgggcaacatggcaaaaccccgtctctgttaaaaatacaaaaatgagccaggtgtggcagcgggtgcctgtaatcccagttactagggaggctgaggcaggagaatcccttcaactcaggagagagaggttgcagtgagtacagatcacgcctttgcactccagcctgggtgagagagcgagactccgtcaataaataaataaataaataaataaaaacgctttgagagaaaaagagggtgtggcctgtaactcattctgtgaagctgtaccctcaccttgatacccaaaccagtcaaagacacaagaagaaaggggtttggggccaggcttactcattaacatggtctcaaagatcctaaataagtcttagcaaacagaaaccagcgacaaacaaaaaagaaaacatcgaattcaatacaataaatatttgagagcccacaaagtgttaggtgctgttcagggcatgggagcactgcggtaaataaaacggatgagaatcctggctgtgatgaaacttaaaatggggaggaggtgaaagaaaaccagaaaacgaaggcagatgtcatgtgtttcacaggtgcagagtacaagtcgagcacttgagaaagaatttctcagggaaacattaaatcaccctccatctctactgaacatcctgaacaacaacagcgccgcagcagcaaggacttgccttccttcttagggtcatccatgttcacgtcccctgcccggcaggctgaaggctcatcgcggccgccgcctccttccatggagagagctgtcagaagtcactgcagggtggaacggggccagaaagtgagtacgtgtcagggcccagggctccggcttccttcagccctcggctcacagaggcagagagagctgaaggccgcggccaggtctgggagaggcggcgcgggggccgctctgaaatgatcgcatcccaggggaccccagggcccgagtgccgccaggccgggagtcagcccgaacgccatcagacgagataacggaattctcggcttctgggccagagtgttgggggctctgtttgcctggggggcagccctagacctcccggcatccccgaccacggcgcgaggggcctcagtgacccctgctcgagcccaggcccggctcctggcggggcgcggcccctccccgtcccgaaaacggcgggcaccgcgccgcaccgggcccaccgggcaagcctcgcccccgaccctgaccccaccttacccaaagcggcagacgatgcaggacgcgcctccggcacggatttaaacgcggcgccgggagacgcgggttgccgattggtcggtttgaaaagggctccgagaggcggcgggctgggtgcgtcctgggtattgtagtcaggacgctggtaagaagcgtccagtgcgcatgcgcactgcttcagcgcagcgaatggctccgcacagcgccagggatcacccacccggaagtctgcccggcctggccgccaagtgtcactaggtatccgcgtcaagccggaaccatgtatagcagctccttgtgtgtagggagaaagttaaaactgccatctaagggtgtcgatgggaagactaaaagtaggctcacccacctgctgtgaagcagcgcgcgcgagctgttactaacagt

SEQ ID NO: 28756 - DNA, 2300 bp, Homo sapien
gcctcaggcacttaacttttctccagaggaaagcgattctactttctccaaaagtactgccacagaagtagctcgggaggaagccaagccgggtggagatgcagcccctagtgaggtgggcagaacgggcgcagctgggttctgttagctgagattcctggaggctgctcgggaagcccgtggaacccagggctgtggctggcggagttccctgccatgcttcatcctggggccagtgcctccgtgccaagcaacccaaagggaggcagtcaggacttccaggcctccaggggagaaagccctgcatttgactaaggcaagggtcagggatcaaagctgaggaagcgggaagcagggtggcaggagctggtggctgctggtgagcgggtatggacagggaggtgggcaacagtcagagaggcacggcccaccccatacagagcctccttccaccaaggccccgcctgattccttggctttccaaaccgccagcccacctggaacatgagcaaagctcacattctcccaagatggttgccagaaagatgctggactctgctcttaaccttggttttgtacccaggctcttcttgtagatatcaaactggaaccactcgcggtcactccagatgctgcaagccagcccctcattgaccttcctctcatcgacttctgcgataccccagaagcacacgtggctgtaggatctgaaagcaggcctctgatcgacctcatgacaaacactccagacatgaataaaaatgtggccaaaccttcaccggtggtgggacaggtgagaagtggcaggtggttcatgttgactcagccctgggtgtcctcagttctgggattgttcatcctcccagggccatcgtgggacccttgagagtggctgttgagtcttctcagctacacacctcagggcaggatgcacctttggcagcctgagcttctcaaagatcagctgcctctgaggtgccctgccaggaccctgccagctcttgttggacagggaccgcctctctcctgcccatagaccccagggccagatgtgggacagaggaatgtgcatggtgggggcctgggcttctccgtgtgtgtcctgtctccttccagcttcttagacgtggtggcccagagtgcttttcagtgcacccgagccaggatgagcgagtggctgtgatgacccacgcagccagtcctctgtgcagggaggggaagggaggccctagccggatccacgctcacctcctccactctgctctcttccagctcatagacctgagctcccctctgatccagctgagccctgaggctgacaaggagaacgtggattccccactcctcaagttctaagccgaaccaaatcctttgccttgaaagaacagccctaaagtggttttcaaccctcagaaacaagctttaggctggtcgcagtggcttacacttgtaaccctagaacttgggaggctgaggtgggcggattacttgagcccaggagttcgggaccagcctgggaaatatagtgaaactcctgtccctacaaaaaatacaaaaattagccgggtgtggtagtgcatgcctgtagtcccagctacttgggaggctgaagtgggaggatggcctgagctcaaggagatgcaggctgcagtgggctgtgattgtgccactgcactccagcctgggcaccaatgtgagaacctgtcttggaaaaaaaaaaaaagaaacatgttttagtagaagttttatttgaaaaagaaaaataagcataaatatattcccagtgctggagagggtgggctgagggactggggccagcacggaccacccaaggcctctgcttcccgccgccaccctcctcgctgccattctctgggctggaatgtgaagcctcagtcactctaaatgaagaattttcttttgaatgttttgtatgtaaaatagcaagtggctatttttaaagttaagtttgtataaatagttagatattctagatttacattaaattgtaaaataaatggacttattgaagcatatcttgatttttaagcttatcttgattttcaaacatgcatagctatttttatcactctaatcagtaaggctactatctagactcgaatgctttcatacaagtgattttcaaaaattagtcaataaaaattgatgtcagtgcaggcccaggcccgcccccagatacactagtttctaggtctggggccagcctagtaattgttactaggcacacaggtgatgctgactcgatggcctgagacacaccccttgagaagaagctgctc

SEQ ID NO: 28757 - DNA, 2300 bp, Homo sapien
aaagatgctggactctgctcttaaccttggttttgtacccaggctcttcttgtagatatcaaactggaaccactcgcggtcactccagatgctgcaagccagcccctcattgaccttcctctcatcgacttctgcgataccccagaagcacacgtggctgtaggatctgaaagcaggcctctgatcgacctcatgacaaacactccagacatgaataaaaatgtggccaaaccttcaccggtggtgggacaggtgagaagtggcaggtggttcatgttgactcagccctgggtgtcctcagttctgggattgttcatcctcccagggccatcgtgggacccttgagagtggctgttgagtcttctcagctacacacctcagggcaggatgcacctttggcagcctgagcttctcaaagatcagctgcctctgaggtgccctgccaggaccctgccagctcttgttggacagggaccgcctctctcctgcccatagaccccagggccagatgtgggacagaggaatgtgcatggtgggggcctgggcttctccgtgtgtgtcctgtctccttccagcttcttagacgtggtggcccagagtgcttttcagtgcacccgagccaggatgagcgagtggctgtgatgacccacgcagccagtcctctgtgcagggaggggaagggaggccctagccggatccacgctcacctcctccactctgctctcttccagctcatagacctgagctcccctctgatccagctgagccctgaggctgacaaggagaacgtggattccccactcctcaagttctaagccgaaccaaatcctttgccttgaaagaacagccctaaagtggttttcaaccctcagaaacaagctttaggctggtcgcagtggcttacacttgtaaccctagaacttgggaggctgaggtgggcggattacttgagcccaggagttcgggaccagcctgggaaatatagtgaaactcctgtccctacaaaaaatacaaaaattagccgggtgtggtagtgcatgcctgtagtcccagctacttgggaggctgaagtgggaggatggcctgagctcaaggagatgcaggctgcagtgggctgtgattgtgccactgcactccagcctgggcaccaatgtgagaacctgtcttggaaaaaaaaaaaaagaaacatgttttagtagaagttttatttgaaaaagaaaaataagcataaatatattcccagtgctggagagggtgggctgagggactggggccagcacggaccacccaaggcctctgcttcccgccgccaccctcctcgctgccattctctgggctggaatgtgaagcctcagtcactctaaatgaagaattttcttttgaatgttttgtatgtaaaatagcaagtggctatttttaaagttaagtttgtataaatagttagatattctagatttacattaaattgtaaaataaatggacttattgaagcatatcttgatttttaagcttatcttgattttcaaacatgcatagctatttttatcactctaatcagtaaggctactatctagactcgaatgctttcatacaagtgattttcaaaaattagtcaataaaaattgatgtcagtgcaggcccaggcccgcccccagatacactagtttctaggtctggggccagcctagtaattgttactaggcacacaggtgatgctgactcgatggcctgagacacaccccttgagaagaagctgctctggggagacgagggtatgagtggaaagaggatgggcgaggaggccgggcttacctggacactaaggtgatggacggcgtctgctgggcaggcctcggggaggacccctcagctttgctctcagcaggggcccgacaagctcagtgggcagtggcaggaactgagtgccactggaaagcccattccctttatttagaaaacgagctccaggaagccgctactttgtgtccatttctcttgaggaaacttaccaccttggttgagcggcttcatggcagacagcagcgagccagcggccggactctgtatttcggaccccactccagtgctccctgggtcataccaggatctgcctctgtccacaaagatgagggaaaatgatgactgtgctgtgctctctacttcctgcggttactgcgtgattctaaagctgccactcggaacagcgagtcctctgccgtcgagagcagggaggggtagggtggacaggcgatgccgtggaaagacgtctcggtggaaactgccatggtggaaaggtggcg

SEQ ID NO: 28758 - DNA, 2300 bp, Homo sapien
gagacaaatgcatgtctgattgcttcctctgccctattgtttatgtgaaaatgcagattcactgagccagactaaggcatcagtgactgttcctctacctgcctctcacatggagattgtgtattcagtgaaaggctgatcaaagacccaaaggaatgcaacagtttatctcttatctacctatgacctgcgagctgcccaccacccccagttgttgcgcctttccagacagaaccagtgtacatcttacacgtattaattgatgtcctgtgtctccctaatatgtatcaaagcaagctgtgcctcgaccaccttgggcacatatcctcaggacatcatcctgaggctgtgtcactggcatgtccttaaccttggcaaaataaactttctaaattgaaacctgtctcaggtactttgggttcataccacaagggagggttctcatgcacatgtgcctaataataacaactatcacaaaagactgcaaaaaccacaactttacacaaaggctatcgtaaccttcctcaaaaaaaaaaaaaaaacaaaaaacttctgttgcaaggacatctgcccagcaactgcttgtccaaccctggagtgctgtcacccttgttattgatctttgtagccaaagaattatctcaaaacaatgatgtgatcctcattttccctttaaaaacctttgtcttcctaggccgggcactgtggctcacgcgtgtaatcccagcactttgggaggccgaggcgggcggatcacaaggtcaggagatcaagaccatcctggccaacatggtgaaatgccgtctctactaaaaatacaaaaattagctgggtgtggtggcatgtgcctgtaatcccagctactccggaggctgaggcaggagaatcgcttaaacccgggaggcggaggttgcagtgagctaagatcacgccactgcactccagcctagtgaccaagtgagactgtctcaaaaaaataaataaataaaataaaaacctttgtcttcctttacttccctgaatacccacatagcttattgtggcatgcatattcccattgcaatgccctattcacaaatgaacatctttttcgttcagagtctccctgtgctttaggtagaccttgtctagatgctaactcgtagagaagaactcagcttgaatatcacccctgggggatgacctccattctctcctccttcctttattcagcgaggttatgaagcacctgccctgggccaggggcttttctgggcatggagtaggagtggacagaacacaaaacccctgtccaacacacctcacagacattaaggattgagtgctgagtatgcttggagtcaaactgtaaaagatttgaagatatttattcatgtcatagtcccaggagatcctgagaacacgtgctcaaactggtggtgctacagcttttggtttcgtacgttttagggagacataagccataaatcaatacatgtaagatgtaacattggttccggaaaggtgggacaactcgaaggtggggtggggcttccaggtcataggtggattcaaagattttctgggccgggggcagtgactcacacctgtaatcccgccactttgggaggctgaggtgggcggatcccttgaggtcaggagtgagagaccagcctggcaaatacggtgaaaccccgtctctactaaaaatacaaaaattagctgggcttggtggcgggcgcctgtaatcgcagctactagggaggctgaggcaggagaatcgcttgaatcttggaggtgaaggttgcagtgagccgaggtcgcgcccactacactccagcctgcgacagagcaaaactccatctcaaaaaaatttaattaattaaaaattaaattaaattaaaatactgtaaaatacttcgatatctttcagggcctgccatctgtcatgtcggtatcctattgctacggagagtccgcctagacagtcttaagtctgttttgacgttaatgctggtccgaattccaaagggaggaggagggtctagtgaggcgggtcccacccggcctttcccatcagagcccgaactcgcggttcaggttccctctaggacgcccttggccgagaggaggcctccaatggctggctggggggcttagaattttatttttggtttacagcgcagaagaagagcagtgaggccggggcgcgggtggggagggcaaggcggcggctcaaaaaaaaagccagcccctcgcggcccgacagagtctcggcgccccgcgggtcggtggagcctcaggggtgagcgcaggccgga

SEQ ID NO: 28759 - DNA, 2300 bp, Homo sapien
agctggtggggtgctcttgggatggcctgcctgccaggtgagtgccaggcagtgtgatgcagccccgagacccctggaggggcaggtgctgtgccgccgtctgcacactcatgtgccctgtcacccgcttgcccggcacagactcgttcggtgccatctgttcgggcgctgtgctgctgggccgcgaggaattggtgacgcgcacacagttccatcttcgcctccatggagcccgcccgcgagtgggggacacaggcaggaggccaatcagtgtaaacctagaaaatgtctacggagggaggtgtaggaccctgggtgggaagcaccagtggggtctgagagtagggaatggagatgccaaaaacggcctcaaaagaagtcacatggaacctgagacctgaaggaggagaggatccggtgtcccagagagggctgggaaagtccagatgagggaacggcagtgcaaaggccttgaggcgaggagaagccagggagccgctgtgggggtgcctgcctgtggccccagctcctcaggaggatcgagcgcacccaggagtttgaggacagcctgggcaacacagcgaaactcgtctcaaaaagagagaacccggagtgttggcggaactaggatgaagcccgtgggagggccttggggatggagggcgagggcgctgtgggatgagcctcacctcttcaggggccagtgcggtgggagctgttgctccttcgtgtctcttcctggtaatggaaacggccatacctttcatcagagccatcttccctgaagagcacgcccaccgcccgtcctcctctcctcttgttttccgtttccggtgtcgctctgtggtgggagccgcagggatggaagggcagtcttgagagacacaaaccagagtaaacgatgcagcccctgatggggccacggtggagagcgcacgccacccaggctccccagctagggcagatgtgcttgaggaaggcgcctctctcctctgactcccctggagccctcccctaaggccttagcttcaggcctggctttcctgctacctgccccttctctggtccctgtctctcccccactcctcgcaggacagtggcctgaaggacctgaccgggttctgctttcttccccggggcagctggtgtgagggtctcccgcgcagggtcagaccccgcgggccgagacaatgaggcgttctctaaggctctggcatcgtgtgcgccggctgtgactggcggccgagggtgccggtgggcagccgggcccctaccctggaagcaaagtgtggggtgaggccgggaggccccagggcccgctcaggacgtctgggtacagcttgggccaccgccacttctgctcctctcacggctgccgtcttctcatttcagagcatgggcatgtgtttcatcgggaagaggaattttgaacatttccttcttcaggtgcgtgctgctctttgacacaaagagatggggctgcgtgtctgccctgggcctagatctccgtcggtaatgacatgtttgttttccagtatctgcagcctcgacctggtcactttatttccatagaagacaataaggttctgggaacacataaaggtgaggtgcagactctgccacttgtcatctgaaatgcctagagctgtggcgtttcagctctgggagactagaccagagttcctgtcgtcccttccacttggctggagaattgtagaaggctctgtggggcggccgggggcgggcacggcctagggtggaacagttgccttgatggtggctgggtgcacttccagatgtggcctcagctgagatgctggagttcatgaaaagcgcgcctctgacttggaaggactatactctgtgagttacgtatcaagtccctgtaaaaagaatgatttccttcctgtgtaaggaaaatgttaaactacacaaaactccactctgattcagggagtaaggtggacgtcccggcatggtgtgaatgattaaggaccacatgcagcgatgggatcaggcgtccgcgctggccagagtgctgctcgctcatgtgcagacccttactgcggtgaggcctgcgtgagcctgtgctgtgcctggtgtcaggggacaggctccgagtcagtcacagtgtgcagtcctgctgtggggacagagtgcagccattgttgggttagtacagtggcggggatgtgcctgccggcgtgatgatcaggcaggtcttgacacagcacagacctgagctgtgggactggccaggagagccaggctgcagctcaggtgtagggcgtcttgcagtg

SEQ ID NO: 28760 - DNA, 2300 bp, Homo sapien
cctcttcaggggccagtgcggtgggagctgttgctccttcgtgtctcttcctggtaatggaaacggccatacctttcatcagagccatcttccctgaagagcacgcccaccgcccgtcctcctctcctcttgttttccgtttccggtgtcgctctgtggtgggagccgcagggatggaagggcagtcttgagagacacaaaccagagtaaacgatgcagcccctgatggggccacggtggagagcgcacgccacccaggctccccagctagggcagatgtgcttgaggaaggcgcctctctcctctgactcccctggagccctcccctaaggccttagcttcaggcctggctttcctgctacctgccccttctctggtccctgtctctcccccactcctcgcaggacagtggcctgaaggacctgaccgggttctgctttcttccccggggcagctggtgtgagggtctcccgcgcagggtcagaccccgcgggccgagacaatgaggcgttctctaaggctctggcatcgtgtgcgccggctgtgactggcggccgagggtgccggtgggcagccgggcccctaccctggaagcaaagtgtggggtgaggccgggaggccccagggcccgctcaggacgtctgggtacagcttgggccaccgccacttctgctcctctcacggctgccgtcttctcatttcagagcatgggcatgtgtttcatcgggaagaggaattttgaacatttccttcttcaggtgcgtgctgctctttgacacaaagagatggggctgcgtgtctgccctgggcctagatctccgtcggtaatgacatgtttgttttccagtatctgcagcctcgacctggtcactttatttccatagaagacaataaggttctgggaacacataaaggtgaggtgcagactctgccacttgtcatctgaaatgcctagagctgtggcgtttcagctctgggagactagaccagagttcctgtcgtcccttccacttggctggagaattgtagaaggctctgtggggcggccgggggcgggcacggcctagggtggaacagttgccttgatggtggctgggtgcacttccagatgtggcctcagctgagatgctggagttcatgaaaagcgcgcctctgacttggaaggactatactctgtgagttacgtatcaagtccctgtaaaaagaatgatttccttcctgtgtaaggaaaatgttaaactacacaaaactccactctgattcagggagtaaggtggacgtcccggcatggtgtgaatgattaaggaccacatgcagcgatgggatcaggcgtccgcgctggccagagtgctgctcgctcatgtgcagacccttactgcggtgaggcctgcgtgagcctgtgctgtgcctggtgtcaggggacaggctccgagtcagtcacagtgtgcagtcctgctgtggggacagagtgcagccattgttgggttagtacagtggcggggatgtgcctgccggcgtgatgatcaggcaggtcttgacacagcacagacctgagctgtgggactggccaggagagccaggctgcagctcaggtgtagggcgtcttgcagtgaattgcacttggagatcttccacctcttgtggaggggagacggcaggcggagccggggctaggcattcctgagacaggtggaggtgacagctttgcttgggacagaactgccagacaggattgcccatgtatctgccagccctggccccagcaggagccagttggatgactcatggcttccacctgcagttcacttcactgaagaaggctgccggcccaggccacgtggtaaatcccatgaggttctctctgcctgtgtgccccactgcaggggagggaggcagtgagtttgccatctgctgtgtgacattgtgagggtgcgcagagcagctgggggtagccctgatgcagttactgcattagatggacactgtgaagacgtgcagctatgtcatgggctcagcaagaagggcccctggcgtcacacagggcacccagccgcatcctgggcctagggtcaggggctcctacagctggaacctgcaccttctggggcacaaggtgccttctttgtggccaccacaccccatgtccagcccaggcctggacaatgatgagatgtgctcaggtgcttggtcagggctggctttggtggttggagaatcgtatcttcctagtgagttacaccattgctgggcctgctctgggctgccctcccagcatctgccttcatgatgaggcgtgacat

SEQ ID NO: 28761 - DNA, 2300 bp, Homo sapien
ccctgtaaaaagaatgatttccttcctgtgtaaggaaaatgttaaactacacaaaactccactctgattcagggagtaaggtggacgtcccggcatggtgtgaatgattaaggaccacatgcagcgatgggatcaggcgtccgcgctggccagagtgctgctcgctcatgtgcagacccttactgcggtgaggcctgcgtgagcctgtgctgtgcctggtgtcaggggacaggctccgagtcagtcacagtgtgcagtcctgctgtggggacagagtgcagccattgttgggttagtacagtggcggggatgtgcctgccggcgtgatgatcaggcaggtcttgacacagcacagacctgagctgtgggactggccaggagagccaggctgcagctcaggtgtagggcgtcttgcagtgaattgcacttggagatcttccacctcttgtggaggggagacggcaggcggagccggggctaggcattcctgagacaggtggaggtgacagctttgcttgggacagaactgccagacaggattgcccatgtatctgccagccctggccccagcaggagccagttggatgactcatggcttccacctgcagttcacttcactgaagaaggctgccggcccaggccacgtggtaaatcccatgaggttctctctgcctgtgtgccccactgcaggggagggaggcagtgagtttgccatctgctgtgtgacattgtgagggtgcgcagagcagctgggggtagccctgatgcagttactgcattagatggacactgtgaagacgtgcagctatgtcatgggctcagcaagaagggcccctggcgtcacacagggcacccagccgcatcctgggcctagggtcaggggctcctacagctggaacctgcaccttctggggcacaaggtgccttctttgtggccaccacaccccatgtccagcccaggcctggacaatgatgagatgtgctcaggtgcttggtcagggctggctttggtggttggagaatcgtatcttcctagtgagttacaccattgctgggcctgctctgggctgccctcccagcatctgccttcatgatgaggcgtgacatgtgggctgtaacttgttgcccagcctcatggagaaactgtctttctgtaggttggttcctgtataccttgggccagagagcaaacataggtggcctgagagagccctggtacgtggtggagaaggacagcgtcaagggtgacgtgtttgtggtgagtgggccggcctctgagacagcactggggctggttctggcagggccagcagtgcttccagaccagggcttgagaaggcctccagcagccgtggcttcctggaggctgtgactaactctgttcctgtccttggtcccctgcctttcctgggactggccatggtggcaggagagttttaaggtattcattaggctgagttgtatgctggtctcttaatcatccctgaaccccgatacacagatacagtttctccaattttatgaaagaggacagcgacgcccagagcttgggtggctcatccggtggagagggcatggcctcagtgccaaggatggtgcccaccatggtaggatccagtgagttgttgtcaggcaggtgcagatggccaagccaggatcaaaccaagccttccaccacagtggggaccttaccactgtgaccctggcctcaaagcagggccgctcagtggcggcaagctcaccccaccttcaggggaccttgccagtgtctagaggcatttttggttgtcacagcttgggtggaaaagcaaggacgcgggtgctgctgcatctgtgggtcaggccggggatgctgcttgccgtgttcagcacagcctcttccctgagtgacccggcctccaccttggcgcgtggagctgagaaggcccactctcagcaccctggctgccggctcatgttctggcacgaatgctggggcgccttctcttagacggaggcgggggccagcaggccccacccaccgattccaggacatctccttactaggaagacctgtggggagaaaagcctggctgcgaatgaattaaatgatctagatttcagtttgctgtgagaagaccagaagggttaaccaacggcctcctgtccctggacgggtcttggtgcctgcttagaacccaaagcccttaacttcatgctcctcgtcctgcttcaggggcggggcttggcacaatcccaggaggtgccaggtctcaatggcccgaggccatgggtgggtgacagggagcaggggcctcaga

SEQ ID NO: 28762 - DNA, 2300 bp, Homo sapien
caacttcgcaaactttcgcaaagtgctctcgaagtggaagctgcgggggaggccgggcgcgtggtccccacagtccccgccagggcccccggggaggcgggacgcggaccgccccgagggccgggcgcccgggagccgctccccggcctcgccgggtggatgcggaggcgcgccgggtgcatggattgtgttcgggcgcccggctcgggctcgggctccgggccatggcgccgccgccgccgcccgtgctgcccgtgctgctgctcctggccgccgccgccgccctgccggcgatggggctgcgagcggccgcctgggagccgcgcgtacccggcgggacccgcgccttcgccctccggcccggctgtacctacgcggtgggcgccgcttgcacgccccgggcgccgcgggagctgctggacgtgggccgcgatgggcggctggcaggacgtcggcgcgtctcgggcgcggggcgcccgctgccgctgcaagtccgcttggtggcccgcagtgccccgacggcgctgagccgccgcctgcgggcgcgcacgcaccttcccggctgcggagcccgtgcccggctctgcggaaccggtgcccggctctgcggggcgctctgcttccccgtccccggcggctgcgcggccgcgcagcattcggcgctcgcagctccgaccaccttacccgcctgccgctgcccgccgcgccccaggccccgctgtcccggccgtcccatctgcctgccgccgggcggctcggtccgcctgcgtctgctgtgcgccctgcggcgcgcggctggcgccgtccgggtgggactggcgctggaggccgccaccgcggggacgccctccgcgtcgccatccccatcgccgcccctgccgccgaacttgcccgaagcccgggcggggccggcgcgacgggcccggcggggcacgagcggcagagggagcctgaagtttccgatgcccaactaccaggtggcgttgtttgagaacgaaccggcgggcaccctcatcctccagctgcacgcgcactacaccatcgagggcgaggaggagcgcgtgagctattacatggaggggctgttcgacgagcgctcccggggctacttccgaatcgactctgccacgggcgccgtgagcacggacagcgtactggaccgcgagaccaaggagacgcacgtcctcagggtgaaagccgtggactacagtacgccgccgcgctcggccaccacctacatcactgtcttggtcaaagacaccaacgaccacagcccggtcttcgagcagtcggagtaccgcgagcgcgtgcgggagaacctggaggtgggctacgaggtgctgaccatccgcgccagcgaccgcgactcgcccatcaacgccaacttgcgttaccgcgtgttggggggcgcgtgggacgtcttccagctcaacgagagctctggcgtggtgagcacacgggcggtgctggaccgggaggaggcggccgagtaccagctcctggtggaggccaacgaccaggggcgcaatccgggcccgctcagtgccacggccaccgtgtacatcgaggtggaggacgagaacgacaactacccccagttcagcgagcagaactacgtggtccaggtgcccgaggacgtggggctcaacacggctgtgctgcgagtgcaggccacggaccgggaccagggccagaacgcggccattcactacagcatcctcagcgggaacgtggccggccagttctacctgcactcgctgagcgggatcctggatgtgatcaaccccttggatttcgaggatgtccagaaatactcgctgagcattaaggcccaggatgggggccggcccccgctcatcaattcttcaggggtggtgtctgtgcaggtgctggatgtcaacgacaacgagcctatctttgtgagcagccccttccaggccacggtgctggagaatgtgcccctgggctaccccgtggtgcacattcaggcggtggacgcggactctggagagaacgcccggctgcactatcgcctggtggacacggcctccacctttctggggggcggcagcgctgggcctaagaatcctgcccccacccctgacttccccttccagatccacaacagctccggttggatcacagtgtgtgccgagctggaccgcgaggaggtggagcactacagcttcggggtggaggcggtggaccacggctcgccccccatgagctcctccaccagcgtgtccatcacggtgctggacgtgaatgacaacgacccggtgttcacgcagcccacctac

SEQ ID NO: 28763 - DNA, 2300 bp, Homo sapien
cttcccggaaaaatcccagtggaagggtatatggcgggtggggaggtcctggaccgctcacattaaggagacggacttttctccttcctcccctccctccacacacacatttcccaacaggactctccagtggaaacctcgaattaaaaggttccaaagcaactccaccttttagatcaatataacgtgttcaaatccttgctactgggaagaaaatgctcacattgggcttcagcacaaagacactgtttcagcagctttgagcgaagttggctgagtatgcgtgtgacacacacacagacacatcgctccgggggagaaacccttccggttctccacagccgcccacggtcctcgttgagactggactcatctcagctcagctcagagatttggctgcaggatccgaccctcccttgccaaaaagacccgttctaggggtgactgcgcattactcccacccccaccgctccgaccggccccaggagaagcccttctaggagagaagaggcgacccccacctaccgtccccgaccactgggaggcctaagggctgcactggactccggcgccccgagcgccaccaagggagtgcgcgcccttcccagccgctggtggcacagtcccaaagccccgcccatgcggggggtcgccaagtcctaagcctccaccccctttatccctgtgccccatccggaggcaggtgtacccgtcacgcaaacctaaagctgcccccggccccccgtggttccccgcaggaggcgggggtgtgtgtcacttttctgaaagctctaaggtctctgccccccgccccccgctgtcctccgtaggaggctgggcaggggctgtggcacagctctaaatccctgcgggtgcttgcttgccccaggcagcttccaggacccgcagccccccgccttccccgcaacccgcttcgggaggagccggacgctcggggattccgcgatgcgtccgcgaacgctcgggtcgggccgcacgcgggagatgagcgcgcctccgccgtcctctccaaatcccttatgtcaaccggggttttcttctttcatttaaaagttgcgctttaaaccaagtgggacgcagatccggtagctgcctattgggcttcaaagtccagggagttttagtcggggtgaagcattttagcctccgtgcgtcttgctgtaaaatgggtaaccctcctcgacagcctccgcagtccttaatgggtgggggggggctccccggcctctcggccccagtcctccgcccccgggtcctacccgcgcggcactcctggcggcggtctccgtggatctgttctgccggggtggggagccaggctctgagccgcggccccgagcccgaggtgcggagccaccgccccacgggtagcggccaccgggggccccagccccacctttcccggccctgttgcctcggccccgccccaccgggaggctgggtggggaggcctccggggagtagggccccagtccccgtcccggccgcgccctcgcgtctccatagcgatcctctcggcgcgcacctccgagccggctccccccggggccgaacaatacgccgctgggccgggggcggggcggggccgggccgggggcggggagagcgcgggcggagtgggcgcgggccaagcgcaccgcccaggcagcagccggccgccggggtctgcgcggcgcggagctgcccagcccgctccgggaactcagcccccgccccgcgccgggcccgccccgcttcccacgcccgtccggccgagcccgcgccggagccacctggagccgcctggagccgccgccgccgccgcaggttgatgcgcggcgccctcccgggacgcgcggaggagccatcttgaaaccaacttcgcaaactttcgcaaagtgctctcgaagtggaagctgcgggggaggccgggcgcgtggtccccacagtccccgccagggcccccggggaggcgggacgcggaccgccccgagggccgggcgcccgggagccgctccccggcctcgccgggtggatgcggaggcgcgccgggtgcatggattgtgttcgggcgcccggctcgggctcgggctccgggccatggcgccgccgccgccgcccgtgctgcccgtgctgctgctcctggccgccgccgccgccctgccggcgatggggctgcgagcggccgcctgggagccgcgcgtacccggcgggacccgcgccttcgccctccggcccggctgtacctacgcggtgggcgccgcttgcacgccccgggcgccgcgggagctgctggacgt

SEQ ID NO: 28764 - DNA, 2300 bp, Homo sapien
aggagtgcctgttttgcaataaggctttaagcagagtgggttgggtttaaataaacaaaactcagctgcagccagtgggttcaggtgtgggcctgcttttctggaataaggcacctgcaggctgcgaggtaaccacagggactgcccaacacctagggacaggggaggatggatgaatctcactaacaggatgtccagcaaagacaaaagatcattccattcacgcttagaccgacagcaagcccgactccaccataacgtttagaggtgtgcacaaataggggaaagatgaagaaaaacaaggaggtgattatgggcacattcaggagggctctgggggaggaggggcatccccttctggacctgagggttaccagagtgtcggcttcatgatcacactttgaactccaaacacatgatttgcgtacttttccctatgcctgcatctagagtcggcagtttttgtttttttttgttttgttttgttttgttttgttttgtttttttgagacagagtttcactgttgttgcccaggctggagtgcaatggcacgatctcagcttaccacaacctccgccttccaggttcaagcaattctgcctcagcctccctagtagctgggattacaggcgtgcgcctcacgcccggctaattttgtattttcagtagagacggggtttctccatgttggtcaggctggtctcgaactcccaacctcgtgatccgcccacctcggcctcccaaagtgctgggattacaggcatgagccaccgtgcctggcctatttttatttattgctaaatagagatggggtcttgctatgttgcctaggttgatctcaaacttctgggctcaagagatcctcccacttcagcctctcaaagtgctaggattacaggtatgagccaccacaccctatttagagtccacagttttattttattttactttatttatttttgagacggagttttgctctctcacctaggctggaggacagtggcgcgatctcagctcaatgcaacctccacctcctgggttcaagcaattctcctgcctcagcctccagagtagctgggattataggcacacaccaccagtcctgactaatgtgtgtatgtttagtagagacggtttcgccatgttgaccaggctggtctggaactcctgacctcaggtgatccacccacctcagcctcccaaagtgctgggattacaggcatgagccaccgcgccgggcctagaatccacaattttaagtaagtggggaggggagagggactaacaagacggaggccgcagcttgtgctgagacggccaggtggtccggccgcatcagaaatcacgagtttggaatgactggcaccttcgaggggttgagctttaattctgccactaactagttgtgtgaccttcgccaaggcctaactccttgttctaactggacacaatagtcctagactcctagcgttgttgaaggattaacaagacaatctgtgtgaagcggtcggcacagggtctggctcaggcatggatctgccagtaatagcatttactattttcacagttgctgtttcctagcatgagttcaaggctgcctcctctctgtcttcattatgtgaattgaatgtggtcacacatctgtgttggagcagaggcaggggctgcagctttcagctgatttcccaaggggtctgtacttggacactgatccagtccacccaatgtgtttccagaaagtggagctgattcctggagagcagaagggatatatgtggggctttttgtaaagggcagtgacctatgtggtgggcttgtccactgcccgagtctgcggctcccacaggtcactgcccggctcatatccttcccctttggaattggcttggagcagggtctctcctccccggcccctatgtgcccaccatctctggggtcagtggcccactcatgactctcagggcggggagggggcttggagttcagtaacagcaccctgggtcattcttgcacctgtcaccctgagagccactgaccagttttctgtgcctagaatcgctgcttgcggcctttctcaggggctcaatggattgtaattgatgtttgtattttgcacttgcccggaggtgtttcacgggaagtgagcattttttaaaacaaaaatagaatttagaaaaaaaaaaggcagacacgatggatttctagtgttgtacgtgctgtagaaagcacttgaaaatgcgttttgccaggggccgcaaccagaagctacatgacttctggaatctgttccttacacagt

SEQ ID NO: 28765 - DNA, 2300 bp, Homo sapien
acctccccttttgtcaacttcttttgtttaaatgtggcccagctgaggtcaaagggctccgccaggcctaccaagactctcccacatggaccaagccctgggatacatacaagcccaacacagggctaccccgcacagcaggctgcggaacaccttccgtgtttaaggaagcacacagccaggagaaggtggacccaggctcctgcgcggagggcaacaggatcgcctgaggccaagccggcccagacagcaaccagcgccactcagcggtctgcgatgtatgtctctggggcaaaacccaagagccaagaaaaaacaaaaaaaaatgttttgggcttttcgggttgttgttgtttttttttttagagacaaggtcttactctttcacccaggatggagtgcaatggcacaatcataggtcactgtggcctcccaattcagcctctggggtaggtggtactgcaggcacgtgccactgcccagtgatcctcgcaactcagcctctggggcggctggtactacaggcacgtgccactgcccagtgatcctcgcaactcagcctctggggaggctggtactacaggcacgtgccactgcccagctaatttttaaaaaatttttagtagagatgggatttcactatgttgctcaggctggtctcaaactcctgatttcaagccatccttccatctcagcctcccaaagtgctgggattacaggcatgaaccacagcagctggccaagaaaaaaatatatatattggccagctacgcacacacacacattttgatacggaatttcgctcttgtcgcccaggctgtagtacagtaatgcaatcttggctcactgcaacctctgcctcctgggttcaagcaattcttctgcctctgcctcccaaggagctgtcactgcaggcacccgccaccacacacagataatttttgtatttttagtagagatggggtttcgccatgttgcccaggctggtctccaactcccgacctcgggtgatccgcctgcctcggcctcccaaagtgctggaattacaggtgtgagccaccatgcccggcccaaaatactatttcagaaggaagatcaaaaacccgcaaggtccacttcacacctgttgcccaggtaaccacctgccagctggggtgctctgatagtccagtctcacagaagagtgtcctgacaggcctgagagcacgggcggccctgatggaagatgagagaagcacatgtttcggctgcaggctgcaggctggacaggcttgctaaggggctgctcgccatctactagggactagggaacaagaacaaggagcaggcagtgcatcttagagctggaatactgcatgtccacgaaccacaatgaccgagccacgcactaagtgtttaatgagcacctactacgtgcccgacaggaccctcagcgcaaggatacagaggaggcgaggccaacaaacccatggagctggaagtgctgccctaactgtggagaagacaccccacggcccctgggggggcagccggcaccagcccaggaaggtgctcagaggagcagtcgcggcaccgcaggctgagggcatgaaggacaggtcgcaggctgcagaggaagggcactccgggacgagggagcagcacatgcagggcacttttgccaaaacaaaccagaaaggagctggtgggagcagagaggctgtggtagggcactcggtcccattccgagcacagcgtggagcaccctggccaatggttggaagaggcctgaagtggaaataccagttaggaaaccgtggccaggcagaggagagagggcggtggctgggactggtgcgggcagcggagatggagccaagcaggcatgtcaggatgcatccagggaggagcaaaggcagggagcatcgggcgaatcccctggcacccccacgttaatggtggccatagccacacttcgtaagggacagtaacctgcccggtgcctcctggccgcacctgactcaatccctacacaccagcctgtggagggctggttcctggctcccctacacctgtcacccagcctggcaggtactaagaacccataactattggcgactattattatgacccctcctttttttataacactttgagttctagggtacatgtgcacaacatgcaggtttgttacataggtatgcacgtgccatgttggtttgctgcacccatcaactcgtcatttacattaggtatttctcctaatgctgtatgacccccccctttttaaagacacgagggaactgtggctcaggaaagga

SEQ ID NO: 28766 - DNA, 2300 bp, Homo sapien
ttgactgaacctttagtccctctgcaatttgtagctcctatatgggaagcttttccaaatggctggctcatgctccctcagcctatgagcagcagttgctacctccccatcacccacatccccctcctggggtcctcccagcttccaggggatgctgggcatcaggacagctccccgtagagcctgtgtcctgtgggattttttttttttttttttttgagacagagtctcgctctgtcacccaggctggagtgcagtggcgggatctcagctcacttcaagctccgcctcctgggttcatgccattctcctgcctcagcctcctgagtagctgggactacaggcgcccaccaccacgcccggctaattttttgtatttttagtagagatggggtttcaccgtgtcagccaagatggtctcaatctcctgaccttgtgatccgcccgcctcggcctcccaaagtgctggaattacaggcgtgagccaccgcgcccagcgtcctgtgggttttgcagcagggccggcatcaggaatactcaagtgcccatcccaggagagcctcccctcccctcaccatgctgggaacctccgcgcctctgtggctcagagtgggttctagtgcgttctgtgtcttcggtcctcactgttaatgagtcttcttgccacgaactgtgatgctgaggagagcggaggaggctttgggggcggggcaggcatgtaggagctggagctgaccttgctctcagtgcttccttgccatgctgcccgccccaagcaggaagtttgggaaatacccccgccagggatcactccccgccccatctccttgctcctggcccagttgccctgtcttcttgaattcctggatacctttgccttactggcatctttccattttcagaggcaaaaatgtcagctcagaaagctggtcagtggcaggacaggctttcagcccaggtgtgtacagagcagtcctcccacggggacccagttgtcttggacaagttggggacggggttttgggagaggcatccaggccatggagctgcgtgatggggctggggctgggtggcctctccctgcctggctggcccctcctgtgggccactgatcctggcctccaggcttttgggggtgccttggtgttgctggccaggtcgggcagcgatgtggggagcagtaccccacggcacatccgccctttggcacgtggtgtgtgtgaattacgcgtgtcctgatgcagcacacagtgactcgcacctcagtgtgaccaggtttctgtgttgattggaggaggaggcaggcatgggggctgggacaggaggcccagctggccatgggtgcctgaccccgctgtctctgggagggcttctgggaggtggtgcgatctgaatgtgtctcagagtatgagcctggtcgcatggcgagtaggaacacgctttaggcagagggagcagtgtgggcggagtcctgggagccggggccaggtggagcaggtgggacacaaggccaggtcccctaggtccaggagagaatcaaccgaggcatccctagcacacgcatctgctggtttccaggcgtggctgccgtcctggtggtgtatgtggccgtcgtgttgaccacgttcttgacggtttgttaggcaaccttttggcatggctggccctccttcccaatgccagagcagcattcttcccttgcgcctgcgcgccgcctcgccgagccaggctgagaaccctggcttccttctgcctgctgggagccgggggcctcgcttggtgggaggcaaggacgcagctcagcactgaccaggctggcctgggtggggtggccaagggccccacctgatgggtgcagggcgggggtctctgggtcggggttttctttggaaagctggaccggccgtgccctgcgtgtgggagctggctcgtggggcttggaggtgtgtgtgggagggacggtggcagggcggggtctctgggtcggggttttctttggaaagctggaccggctgtgccctgtgtgtgggagctggctcgtggggcttggaggtggcgagcgggagagtgaccacgcccctctcttgcagggaacccgagcgtcatgttagggtgaagcagaggacctcagtgctgaacatgctaaggaggttggacaaaatcaggttcagaggtcacaagagagatgacttcctcgatctagcggagtctccaaatgcctcggacaccgaatgcagcgacgaaatccccctgaaggtaccgcggacctcgccccgggacagcgaggagctgagggaccc

SEQ ID NO: 28767 - DNA, 2300 bp, Homo sapien
tcaagaacagccctgagccaggcggagttggagagagaagtgaggggcattggatgggggggtcctagcagagctgaggggtcttagtgggagtgggtggggcgctggcagtggggccctcgcctggggttgagactgtgcagcacgaatgggccccaggggagcgaggctgggggtatccagggtgaggactgagcgagcagctggactctcacatccaggctcagggtggagggtgccaatctgggaggtgggaggtgccggaaccatcaccctgagtagactggcatagctgcagagctctagatggagcaggctgtgtcccctgccctcaggactctatgctggtatcaagttcttcctcattgatttcatctttaaacgctgcccgaggctgcgcgccaagtacgacacgccctatatcatctggaggagtctccccaccgacccgcagctcaaggagcgctccagcgccgcagtctcacgcagggtgagcccggcccccagctgcggggatggggggatggggggccacgaagccgggcatccccaggcccacagtgctctgttcacctccggctcatttagaggctgtttcttcaattttatagactccttaaacttgagggttttttttttccctgttaccactgcggtttctgaggctcatccagcccctcccaagcccagggcaacacctggggactggccatgatgactgagagccagcaggcctgggagtgaccactccatgggggtgcccggcccctgccatccctgacagtgaggctctggcgctgagaccaggcagtttgagaagggcccccttggagccacagcctggcactgggccatatttcattcacagtcacaggccctccagatgtgcagcacagcatcccagccaggaccacggggaatgagcaggcctcggtgctcccttcggggtggctcagatgagtcaggagggttgctgggctctccccactgaggtgaggtggccctgcctggaagaaggagccgctctgggccggaagggacctcgggaacgtcttcccaaatttggatcccagcttttggggaggtgtgtgtgcggccagcacatctgggtgctgcaggcgtgggcagcgggcctgacctcgacgctgtttgccgttggcagctgcagacgacctcgtcacggagctacgtacccagcgcaccggccggcctgggtaaagaggaggacgccggtcgcttccacagcaccaagaagggcaatttccacgagatcttcaatctgacagaaaacgagcgtccgctggcgggtatgtgtgccgtgagtctgaggccaggccgagcgccgacacagactgaaggcccgtgaggggggcgctgtggatgcaggacggggtcgccctgtgacaggccagaggagccctcaggatggcattcacatcccactgccccaggaggagtgcaggagccaggggtcatgaggactctgcgggctacaggggaggagggcgtgcccgtggggagagccgcccacgctgcagcactcccctgacagcaggcgtgcaggcaacacactggggagagagtccagggcgaggcctcagggcctgcagggcgctggcagggggtctgcccctggttccatcgtgtctggagaaacaagagccaccaggggacaggtgactcaggatcctggggacaggtcagctttcccaaagggagggcctgttaaactaaaccgggcagctcgaggtgtgtgatgagcggctgcagaggcagctgcggagaacggagcttcgtcctctgctgagccctggccctgccggtcttggtggaggtggtgtcccagcgccctgaccctgccggtcttggaggtggtgtcccggccacactgtgacttctgttgctccctgctctgcctgggtgcttttactttaaaaaccctgccagtgcctgttgaagaggaaacatctgttttccaccctctggggccacctcactcttgccggcgcgccttcctctcactgtgggtgtgacgtgagcgcggtgggcggatgtcaggatctgagagtcaggctcctgggtcccagcgtcaggtcagaggctgggtacttccagtggaaagtgtgacaggcgggccttctcccattagtgtgcgagaatggctggcgctgctgcctcatcaacagggaccggaagatgcccacggactacatcaggaacggggtgctctacgtcacggagaagtgagtgcagccgtggggccctgtgtggctgcaggggagggggcgcaggaggctgcc

SEQ ID NO: 28768 - DNA, 2300 bp, Homo sapien
gcagctgggattacaggcatgcaccgccacgcctggctaatttttgtatttttagtagagatggttttcaccatgttggccaggctggtctcgaactcctgacctcaggtgatctgcccgcctcggcctcccaaagtgctgggattacaggcgtgagccaccgcgccagacctttttcaaggatttaaaaacgtgaaaagcattcttagctctcaggccacacacagacgggcggcgggccggatctgacacacagccttggtttgctgacccttgttctaaattgtccaaaagtcaccaagtgaggagagggacaacagtcctgccttctgggaggtgatcctttgggtaccacttcctgcggggagcggacagttccgtggtggatgtttttggtgttgagctgaagagtcgattgcatgaagtgtctgctaaatgcatgagcaggtgagagcccgaatggcctcccaccgtcctggtgcagggcgctgcccggcgccattgtaactgtgacatctccgtggttctttgtgcttcagaggacgtggaggagtggcaagtcgtctgtgggaagtttctggccatcaatgccacaaacatgtcctgtgcttgtcgccggagccccaggggcctctccccggctgcccacttgggagacgggtcttctgacctcatcctcatccggaaatgctccaggttcaattttctgagatttctcatcaggcacaccaaccagcaggaccaggtaagtggggtgctcttgcatggagcctccactggcgagtaatttatgttccagcagtccctggtttatgtgttgtaggaattcattatttaattcaagggaaggaagggcaaacttttttttttttaatttcacaaactttaaactcctggttacaactactccttgtaaaatatcatttaaaacgataaatttttgaggccagatgcggtggctcatgcctgtaatcccagcactttgggaggctgaggcaggcggatcacccgaggtcaggagtttgagaccagcctgggcaacatggtgaaacctcatctctactaaaaatacaaaaaagccaggcgtggtggcgtgcgcctgtaatcccagctactcgggaggctgaagcatgagaatcgcttgaacccaggaggtggaggctacagtgagctgagatcacgcaactgcactccagcctgggtgacagagtgagactccatctcaaatatatgtgtgtgtgtgtgtgtgtgtgtgtgtgtatgtatgtatacatgtgtgtgtatgtgtatatatacatatatgtgtatatacatacacatacatacatatacacacatacatacatatacacacacatacatacatacatatacacacacatgtatttgagcacagaaactaagaggtatgaatctttataatacaacttcttacccgttgtttctcttcctatttaaaaacagaacaaagcgacacagtaaagatgtaagtggcccttgcaggccactgaaaatagactctttaggctcccagaaatgggttctgttcggacccttctaccacatctttctgtagcctatgcagaggaagacccgagtctagtcatgttgggggaagcggaacttttggtcacagtctccaaatttagtcacatttctttttttacttaagttctatttaagatctagtctaatgctatttttatgtggctttttaagtagtgcttgttaaaaagagaatacaaaattctaataatcactgctaattatttatcagaattctgtaaaaagcgttcgtcattgtagataagctgtggtttctaaaagcattagaagtcattttgacaagtgccgcggaaggtgggcaccggggaaggtaggcgccggggaaggtgggcgccgggaaaggtgggtgccaggtttcccttcatctctgagctgtcagttcagctggaaagggaactccaggggcctgcacaagcagtcgcatcctccgagaagggccgtgtgtgcacccaggcctgacagcgctcgctgtcaggcctggggtgttctgctgccccacccagacgatgacgtttagagctgaatggtccctctcactgtttcttggtagtttgacttcacttttgttgaagtttatcgcgtcaagaaattccagtttacgtcgaagcacatggaggatgaggacagcgacctcaaggagggggggaagaagcgctttgggcacatttgcagcagccacccctcctgctgctgcaccgtctccaacagctcctggaactgcgacggggaggtcc

SEQ ID NO: 28769 - DNA, 2300 bp, Homo sapien
tgtcattgtaaaagtaggtctcattctgaaacctctaattaatatgccaaaaaatattttgttaagcctttgaaatggaattttttcgtatgtgaaaagaatgtaaatacatctatatgtgccaagcatacgcactgcacctgcagctccatatttaaaaggtgatgatattcttgtctttcagatgctttgtttgcaggcaaagcaagcagcagctggaggaggagcagaagaaagcactgtatggtttggaagctgcgggtaattcctaaaacacaggctcagtgttgtcactgtgtgtgctggagtgcgggtttctgtcctctctcagggcactgcctcttctccctgcccacctgtgcttttcctttttcctgtctggcaccaggcatccatttcttcttagccccaggcagcgtcaggtcactgttacttgccgtgtgtggctgtgtggagcagtgggttttgtgaaaggccccgttaccctttctgaaacgctgttgtggtgctgagtctggactcctgtcccaggtgctctagaatgtgggggcagcagatgtcccattgagggcttgcttggtgaccacctcaggccctggcaaccacacagtctctgtccagcagaggcagcctaggcagtgtacagtgagtgggtatggccatctgccgatgaaactttatttatggacactgaaatttaagtttcatagaatttccacatgtcacaaaatattattattttgatttttttctctttctcttcttttttttttttttttttttggatggagtttcactcttgtcgcccaggctagagtgcaggggcacaatatcagctcactgcaacctccgcctcccgagttcaagcgattctcctccctcagcctccctagtagctgggactacaggcatgtgccaccatgcccagctaatctttgtatttttagtaaagatggggtttcaccatgttggccaggctggtctcaaactcctgacctcaggtgatctgactgcctcagcctcctaaagtgctgggaccacaggtctgagccaccatgcccagtcaataatatttatttatttattgggacagagtcttgttccatcacccaggctggattgcagtggcgcgatctcggctcactgcaacctccaccttctgggttcaagcgattctccttccttagcctcctgagtagctgggattacaggcgcctgccgccatacctggctaattttttttttttttttttttttttttaagacagagttttactcttgttgcccagtctggagtgcaatggcgcaatctcagctcactgcaacctctgccttccgggttcaagcagttctcctgcctcagcttccccagcagctgggattacaggcatgcaccgccacgcctggctaatttttgtatttttagtagagatggttttcaccatgttggccaggctggtctcgaactcctgacctcaggtgatctgcccgcctcggcctcccaaagtgctgggattacaggcgtgagccaccgcgccagacctttttcaaggatttaaaaacgtgaaaagcattcttagctctcaggccacacacagacgggcggcgggccggatctgacacacagccttggtttgctgacccttgttctaaattgtccaaaagtcaccaagtgaggagagggacaacagtcctgccttctgggaggtgatcctttgggtaccacttcctgcggggagcggacagttccgtggtggatgtttttggtgttgagctgaagagtcgattgcatgaagtgtctgctaaatgcatgagcaggtgagagcccgaatggcctcccaccgtcctggtgcagggcgctgcccggcgccattgtaactgtgacatctccgtggttctttgtgcttcagaggacgtggaggagtggcaagtcgtctgtgggaagtttctggccatcaatgccacaaacatgtcctgtgcttgtcgccggagccccaggggcctctccccggctgcccacttgggagacgggtcttctgacctcatcctcatccggaaatgctccaggttcaattttctgagatttctcatcaggcacaccaaccagcaggaccaggtaagtggggtgctcttgcatggagcctccactggcgagtaatttatgttccagcagtccctggtttatgtgttgtaggaattcattatttaattcaagggaaggaagggcaaacttttttttttttaatttcacaaactttaaactcctggttacaactactccttgtaaaatatcatttaaa

SEQ ID NO: 28770 - DNA, 2300 bp, Homo sapien
ctgaggtcaaggttcaagcccacagggttggcctcctggaggtcactctcttttgttgccccttcccatggccacccctgtgtacacacgcctcgggggtctgtgtgtgttcacgtttcctcttcttttttttttgagatggagtttcgctctcgtcacccaggctggagtgcaatggcgcaatctcagctcacctgggttcaagcaattctcctgcctcagcttccggagtagctgggattcaggagcgcaccactgcacccagctaatttttgtatttttagtagagacagggtttcaccatgttgaccaggatggtctccaatgcctgacttcaggtgatccacccgcttcagcctcccaaagtgctgggattacaggtgtgagccacagagcccggtcaacatttcctcttcttgtaaggacgcgctggatgagggcccaccctaacagcctcattgaatctcctgtgtgttttgtaactgatgttgctgtctcccccaacggagctccttcggggcctaagcacttctgagtcgtctctgggcccccacctctggctgcaggattttaagccaaggcgtgcagccgggggacagcaacgtgaatacgccgggaggggcacggggagcctaagcacagggaggcccagggaaggggtccccagtagggacgctggtgctctcgggcccctgcccatgccacccttgcctgccaaccctcttcgcatgcagcggcaccctcctgccactggcatgagcttttctttccaagtaagtttcagatccacatttcccaggcctcagagcggcagctgagggagggaggaggctgggcaggcctcgctgctgcacaccccactgtgtgccacgatcaggtactgcctgctaggactctgactgggcccacggtggctgcaggactgtcctggggccttcactgcatggcctgaacaggggctgggctcccagggaggaatgattcatggctggttcccgccctatagacaagacagtcacaaggagctggcagggtaagacctgtatatgctgccacctggtgccaggcacagcagcaaggccacgtggacctagcccacctcacctctgcctgcagcagcagggctgggtaggggagccgaggggaggggcaggcctcagacctcagtgtcacatccaggcagtgtcagtgtgagcctaggctctgccacactggagccctgtgctcttgggcaagtgacttaacctctgtgagcacagtcttcactgataaatcagggagggatgtgccctccgaaccaggttgtggctgcttcctatggggctgtgttaagcactgcggacgcagagactggagcttgcatgaaggcgcacggcgtgctctgaaggcagggctggagtccctgcaggctggtgattccttcagctgtggggtcaaggaggccttcctggggaggcggtgaattggggccacaggggccgtgtctctccaagtctggggcccaggctccggttcctagggccagctcgggggcggctgctcagctgtctgctctgtggcttcaggccccagagcagttcaaagggccagcgcccccgccccctaaaaagacctccgcctcctgaaagccttacctgcctgtcggggcccagctgcaggccccctcccaggccgacaggacgccaggatcgtagagggcacccgccgcccaaggtcacgtcgcccgtggcgcccccatccaggcccgccccccgccgcgcccgatcgccaggactgcgtttccacgccgcccggaccccgcctgaaccgaggcccgcgcggaaggcgccactgagtcccggccggccgcgggagcgccagattcagcacccggcacccgccggagaagagaggagagaaaggcagccgcctcccggccccagcgccctggcctcggccagccccatcccggccccttcctcctccctcttctccccttctcgggtccccccgtctctccctggctcccggcccctcctctacccacgcctcctcctcgcccccgccccgcccgtcccctccgcggtccccgccgcccgcgtacggggtgacgcagcgccgcctcccgccgcccgccgcccgccgcccgggccactgcaggggccgctaacggtccggcgcccctcggcgtccgcgcgcccccagcctggcggacgagcccggcggcggagatgggggcgacgggggcggcggagccgctgcaatccgtgctgtgggtgaagcagcagcgctgcgccgtgagcctggagcccgcgcgggct

SEQ ID NO: 28771 - DNA, 2300 bp, Homo sapien
actctagagcacataccaagagtggaattgctaagttatagagtatctttgctagaaattgctaagtggccatccaaagttagtgaatgaacgtacactcctactggcagtgcaagagagttctgctctgctcacaaatccacatccttattaagtttggtaaagacaggtttttaagtttttgccaatctgttaagtgtaacatggtatgtccttagttttaatttgcattgctgctcaatacttgttgcaaaaatgaataaaaaatgttccattccatacctctgggatttgagaatctgtcccaattcctaggtcccatatgtagactccaacatctgtattactttggctttcaaaactggccttctactcagactttctttttccatcttcacgtttctgttgtgatcctagtaatcctttgcttagctggttttgaagccttcaagtcaatctcagcctcactccttcgcctgaaaacagtagctagcaaagtatacggtaagctataaaaagcacccggatctaaggtgtaaccagtcactaagtgctgccagtttttcctctgtcaattgtttcagttcttccttcctttccccttccatcaggttaatcctgctgtcacctcgctcactggttcttgcaataagccagactgagctggaaagaaccgccatggtcctcagtgttgtctgtaggggacctcactgtctgaggctgtcagggctctgtcaggaggagacccctggggccttctgagccctactaggagaggattctaggagagtaggacgccttgcacatagtaagtactaagtcaatgttacttaccagtaaatgaagaggcatgggaaattgttattatttttgagacggagtttcgctctgtcgcccagcctggagtgcagtggcacgatctgggctcactgcaagctctgcctcacgggttcacgctattctcctgcctcagcctccagggaaattcttaatcagaaaatatgtcttagatttttgttttaaaagagaactggcaggagctccaaatacactaaagctccagtctgaaatgacagtccctgagcattcaatctttggtctaagaagcacagaaatgtaatgcaaaccagacacggtttttttagtgattttctgcacacacacacacacacacacacacacacagtaaaaagatctagtcataacgtgtgcacctgcagttccaactactggggagggtgaggcaggaggatcactagagggcaggagttcgagactagcctgggcaacatagcaagacacccacccccagtcccccccggaaaaaaagaataaaaaaggtaaaaataattttaaaaagagtaaaaggaatgtaaaaataattttaatgcattttatttaatccaatacattaaaaatgttacctaacatgcaaacaatatacaaattattttatacgacgtctttggaatcctgtattttacacgtaaagcgcatctcactccggactagccaggtttcaagcacgtgatagccgcacaaggctggaacccaggcctggggaattaattcttgtcctcggtgctcaaaccattcttcccttcaagcctggcctaatccccagtctctctcatctcttcgaatacgctccgcggttatgcccctcacctcactgcactgcaaatatttcgtccactgagtatttgctgatcgtcactcagtgccgggtgacccagcttgaccagcacccgcagccgccctgccactgttgggccgggtatggtgtgtctggcttccctctgttctgggccggctccgaaacgcgctcaagagaaatcggaatcagacacggggcagttcagctttggaaatgaggagctcgaggctcctgggagtccgttgcgggcaggtgggcgccgctgttgtgtcgggagagccaggagcgacagactcaaactcagaaacccaaccacctccgctccctccgcgatgcgtgtaacgtgcgttgcgcggcgtcgccctttaataacgacgggcgctcggagtgctgcgtcactcgccaccagggacttaggcgggacttccgggcgcgcgtaggcacaacttccggaaggaggcggaagagcttctcggctctaggctctggagtcccgggagcagtgaggggccacccggggcacaggaaagggccgctaggggagggccgggtgcactcggggtgtctgggccgcgggtctgagggatgaggaggggccatggccagcgacggggccaggaagcaattctggaagcgcagcaac

SEQ ID NO: 28772 - DNA, 2300 bp, Homo sapien
agaaatgtaatgcaaaccagacacggtttttttagtgattttctgcacacacacacacacacacacacacacacagtaaaaagatctagtcataacgtgtgcacctgcagttccaactactggggagggtgaggcaggaggatcactagagggcaggagttcgagactagcctgggcaacatagcaagacacccacccccagtcccccccggaaaaaaagaataaaaaaggtaaaaataattttaaaaagagtaaaaggaatgtaaaaataattttaatgcattttatttaatccaatacattaaaaatgttacctaacatgcaaacaatatacaaattattttatacgacgtctttggaatcctgtattttacacgtaaagcgcatctcactccggactagccaggtttcaagcacgtgatagccgcacaaggctggaacccaggcctggggaattaattcttgtcctcggtgctcaaaccattcttcccttcaagcctggcctaatccccagtctctctcatctcttcgaatacgctccgcggttatgcccctcacctcactgcactgcaaatatttcgtccactgagtatttgctgatcgtcactcagtgccgggtgacccagcttgaccagcacccgcagccgccctgccactgttgggccgggtatggtgtgtctggcttccctctgttctgggccggctccgaaacgcgctcaagagaaatcggaatcagacacggggcagttcagctttggaaatgaggagctcgaggctcctgggagtccgttgcgggcaggtgggcgccgctgttgtgtcgggagagccaggagcgacagactcaaactcagaaacccaaccacctccgctccctccgcgatgcgtgtaacgtgcgttgcgcggcgtcgccctttaataacgacgggcgctcggagtgctgcgtcactcgccaccagggacttaggcgggacttccgggcgcgcgtaggcacaacttccggaaggaggcggaagagcttctcggctctaggctctggagtcccgggagcagtgaggggccacccggggcacaggaaagggccgctaggggagggccgggtgcactcggggtgtctgggccgcgggtctgagggatgaggaggggccatggccagcgacggggccaggaagcaattctggaagcgcagcaacagcaagctcccgggcaggtgggtgtgccgcggagggccaggtcggggtcaggggtcagaggtcaggtggccgcgttggcctcctgggctgcgggtggagtcgggggtctggagagggcaacttggactctgaggagactgctggatggtgtgacgggcgttggggggctcggaggtcggagcgtggggtctgggggtgacagtggctgcacgtaggatcgaggcttgcaaggacgaggaggagctattggcgtttttcctgacactggcaggcttctttccgagaaactcctgggctccttggggaggctggaaggaactgattcgggtcatgctgtgaagtttggtggagtccggaagctggccgggctgaggccccccgtctgctgggtggatcagtttctgcagggggtgtggtgtttttgacccacttgatttgcctgtggtctcttgagggctgcggctcttgccttgagcatagaagaggactagagtttccctgtgagtttccatgtttctgcttgctggtgtcaaaaccacctcctatgttgtgttagcaggaagttttttttttttttttttttttttttttttttttcttcggctggaatgacctgggtacaccctagatgctatacagctccagagctccagagtccttgtctgattgctgtggcgctgagctatgccagggccctagggaatgagacattacgtggagggtacctaggataaaatcagccactggtgaaaacagatcagagataagcaaacgtcaagatttcagaacatagttctgttccaaagctgaagtctggaatgctgaaaattatgaattgtgttacgaagataagtctgagtagaatcattcataaacacagtaaaatggtttgtactcctgtttcataataaatattattgtttgagtgtttgaatgataaactttggaatttactgcatccagttagaaaagtttacttttggccaggtgtggcggctcacgcctgtaatcccagcactttgggaggtcgaggtggacagatcacctgaggtcaggagtttgagaccagcctcaccaacatggagaaacctagtctctactaaaaataca

SEQ ID NO: 28773 - DNA, 2300 bp, Homo sapien
tcaagtgatccacccgcctcggcctcccagagtgctgagattacaggcgtgaaccaccatgcctagccgttagctcccacttatgagtgagaacaggtgatgtttggttttccattcctgagttactttacccagaattgttgtctccaatctcatcgaggtctctgcgaatgccagtaattcattcctttttatggctaagtagtattccatcgtatatatacatatacatatatatgtatacacacatatacatatatatgtatacacacatatacatatatatgtatacacacatatacatatatatgtatacacacatatacatatatatgtatacacacatatacatatatatgtatacacacatatacatatatatgtatacacacatatacatatatatgtatacacacatatacatatatatgtatacacacatatacatatatatgtatacacacatatacatatatatgtatacacacatatacatatatatgtatacacacatatacatatatatgtatacacacatatacatatatatgtatacacacatatacatatatatgtatacacacatatacatatatatgtatacacacatatacatatatatgtatacacacatatacatatatagtatacacacatatacatatatatgtatacacacatatacatatatatgtatacacacatatacatatatatgtatacacacatatacatatatatgtatacacacatatacatatatatgtatacacacatatacatatatacatatatacacaaacacacatgcaccgcacttttttttttttttttttttgagatgggagtctcactctatcaccaggctggagtgcagtggtgtgatcttggctcactgcaacctctgtctcctgggttcaagctattctcctgcttcagcctcctgagtagctgggattacaggtgctcaccaccatgcccagctaatttttgtatttttaccatgttggccaggatgatctccatctcctgacctcctgatcctcctgccttggcctcccaaagtgcagggattgcaggcatgagccactgcatgtggccacaccacacttcctttatccacttgttgatggatgggcatttgtgttgaaaagaagtcatctctgtttttctttccctgaacggccacagtgtagcacggcctgcctgtggctaggacaagggcagtgctcacttgcaggggcctgtcctggctctgtggcctgagagtgacacctgcccctcctttccttctctggcaggctcagcatctctgcccctcctcagctcagcccttcaccccctgaacacaggccgtggagatctgcatcgtgcagtgcttctaggtgcagtggggagcccaggaacaggagcccgtgtcctgtcacagggtggggaatgtcaccgtgcttggccctgggagcacaagatgacccacctgcgtagttctttttcctgaggagtcggggagcgtgtctgtgtgcggagcaggctcagagcaggtgttccctgcagcgctcagaactgaggtggctggggccttggtgtcacacctcacgctagggattgtctgtggagtgcttcccttgggctaggcacttatttttattttttttggagatggagtcttgccctgttacccaggctggaatacaatggtgccatctcagctcactgtaacctctgcctcccgggttcaagcagttctcctgcctcagcctccccagtagctggggctacaggctcatgccgccacacccagctcatttttttgtgtgtgtgttttagtagagatggggtttcaccgtgttggccaggctggtcccgaactcctgacctcaggtgatccgcccaccttggcctcccaaagtgctgggattacaggtgtgagccactgcacccggcgggctagacactgtacatgcaaccacacgtgtagtcctcatagcagctgggggtggtaccgtgtggtccctattttacaaatgaggaaactcagaagctgagctacgtgctcaaagccacacagctcataagtggcaaagctggggtttgaaccttagaagtctgtgcccttacccatcacagcctcatccttatctcctccattccctaggggacttaacaggtgttgaaattattacagagaaagctgactcactcaccaggaatctgatcctgctgtgggctggcttgggtggaggtgttcctcccgcccccgcacccatcctcctgtttgaactcaggctgctgcctgctgg

SEQ ID NO: 28774 - DNA, 2300 bp, Homo sapien
ttactgcgttccatacctggttctaagctgtttttgcctcgctcagtgttcacaccaaccaagggactggtgccattacgatctccatttcgtgtccactgcagagatcactgaggcaccaaggccgcctgcagctcttcaggggcagcgtctggatctggaccccagcggtcaggccccagagctgcattgcatccttcacagatcccaaaggcggccctcagcagcaggagccacctggactctcaacgcccagactccggcatgggagagcgccataaacctccctgtgggacagccccattgccagctcctcgagtcacagacagtcacagctcggagacccctgacacatcagagagccactggatcctgtgacccgctgcactccactctccccagacacacacatccacagccgcgactgtcagcagccatttccaggccgacaatttccagactaacctccactgcagatctcctgccaaggcccggatcccaacagactcttctactcaatcactgccgacagagcacactcagcacatcctaaatcagaaccccatcccgcctcctcaacccgctctttctactccacgtctcatcctggtaaacggcaccacacccctcacagggccaggaatctaggaggtgactggatttttccttctcgttcacgctcccctctactcacaccaagccaccttggtgccctcacagcagcctatttgacatccaggaccaggccctcctctcaggcccagtcctccgtcagcgagtctcctgcctccaccggcctctggtctgggcctgctcctgtacccctcagtgtctctagaccaggtgtcactcctctgctgttacaaactctaagatgccctggaccctatgttattctcatcctagacctgccttcttccatggcctgaactaagtccaaagtagcacgtgccttgctgtttcctctcaattctaaaagattagactaaaaagtgtgtcttccgcctgttcctagctgagtgtcgtctccaatggctgtgctaactggagtctcctccacactctgcccgccccatgggtcaaggacgcaatctgcaagaacaagcacgcacgcttggctctgatctggaatgggcacattcaagcttcagcaaatgtatcactatgtgcctctagtttcttccccactccctaaggcttcaacctctgaaatttatgagctgcgaaaccttcctggcatagagaacttctccatgatcgatctctcccatcacattataccctctcacttcgttttcacttgtagagttttctccccaagcttcggtgatgtcgaactggctgtatttactggacttcactgtcttcacatgctttgcacacggctgcccctgcctctgaggtcacgcaagatcgcttgacctctttctccaatgacaggcacctccagggcctgagcgaaactggtgggtgccactcaaacaaaggttgattacagatttgttccccatttgcttggagaggttgaggctagcactagtgaggagtgtgcaagtgggtttgtgtctctgtatggttatgtatgtccgcgtgcacgtgcctgcacgcctgtgtgcacagcatgtgtgtgtgcaagagcatgccctaaacatgcatttacagactctgcatccatcaacagcaggaccaaactgcccttctcaaatagtggtgagctccacgaggactgctgggatgcataccatgtattcctgactcaggccggcagtgtcctggcacccatggagacccatcgaaccctaacccacctctgagcacacctccacacagcttgagcattgctcccccactacaaactgtttctctgactctgacatcctggccagcctcctgctgaagatgaacattctcctctgtgctgggaagcagttcacctagtcgactggtctgccttcagaccaggtcctgtgtgtcaacctcaaccacagcagctctcattagttgcttagcaatgagacaacctcctatgaaatcataactggaaacaaagtgtcagaggggttgcaatacaattcactacatgcatatgtcctcatcctcgggggatgatctgtcctcgggtaaagctcatctctccagattacagcaaggatgggaatctgaagcccaccacatccttctttccaagtcaaagaacgtaacactgagagggctctgagtgccagcatgtgcagagttggaacctcccactgacagccagaacgatgagccactcccgaagagctgctcctactcaggac

SEQ ID NO: 28775 - DNA, 2300 bp, Homo sapien
cacatttgactttccagacttgggaatgctgctggcccgaaggcagtcgctcagctccacgtttgtcttacctggggtcacctcctgggttctggagctgggggttctgtgagtgctgtttccacgtcactggggcctcccgagggctgacacccttgctgtgtgccctgtcacccttcctccacctgcggattctgtgaactctgtggccgcgtcccctcacagcacagggaggcctgcctggttgaccacctcgaggaacctctctgtactggaggctgccacaccactctctggtttacttctcacccttaattctgtgcttgaaccgttttccagtcctgagcctatggaaaaggagtatcagtatcaagcccagatcagtctttcgacttccctcctgggctctgaatgccgggtgccacgtggacagctgcccgtgtagacctgccccgctgccacgcaaagcagcacctccctcctgccaggtggtgcctgcagacccctgccccctcaggcgcacaggcagcagatcatcccccactgtcggaaaggctgccctgatgctgcctgctacgagccagcacctgcctggtggcccgagcccacttggtgagctgcagttgcctgtgcccagcacctcctgtttggaccaagactgcattacctgtgcccttactgaggccagtggcctgcctggcttcccctagctgagactcatggggccatccccagtgtcactccctgagggcagagctgccacaggcagtcatctcccagtgctggccgggccagaggccctgtgtgctcactaaagagttggaagcgtaggccagaacccacaggagccccaggcacagtgcccgttgtttcgctgcctcccgattctcctttctccacgggtggttcatggattagcaaccttagttccacctgcaaccctggttccccttgccatgtaaggccacacatccacaggttacagggagtggaaccttggcatctttggggctggttattattctgccttccacattcactgctgttgggtatagatttaagtctgttaaccacgagtctggttgaaaccctccttctgaaaatgcccccgaccaccggctgaggcccaaagggcagcctccatagggaatgcccttcccttgttgatgggagctgcctcttcatgttcctgctgtgggatgaggcagcaccccctagtgtcatgtgtgtgctcccttaggtggtgacagcaggagtaatggacctgtcactgccccggtacctgctgtgtcttgaaatctcttccacattccacttgtttgtttccctgagtcctagaaggcagtgttattactctcatgttattggtaatgaaacggaagcccagagaggttatgttacttgccaaggtcacacagctcctgagtcctagagctggggccccattcctgggctgtttgacttgaaactgcccaggcccccttccctttgatgctatgcagaccttcctatgttagtgtctgaacttcacctgagttcacccaactatatctctgagagtaaagtcacatgtccactgttttcacccatgcagtgactgtgtcattagcatttggactgtggccacgatgatggtgctgtcagcaccgggcacctttgccgttggttcccggcagggctgagtgcttagggtccaggtggccagcgaggtggtcagttcccacagacggttctggtcaatgagctatgcccatggatgcctgtttttcaatttagatgtaagtgtcttacatttacaaatagaaatgtaccattcagtgttccctgagatgcacgtgcttatcacctgacatcgggaaatactggcctttcccttctcaaaatagcagtcagcggcgctgtgctgtgcagggtgcatccacttgtgtgtttctcgagataaaatctctgtttgtgaattcgtcctattataaagctgttcactttatcccagctgcctttttcccttttggaaagtttgttttattttatatgcatatgattcacattattcttttttccttaggacaactacacctttgcccaacctgggattcaaatgaaagtgaaaatgttagaagaactcgtgagccggattgatggtaagccagcttcccgcgcagcccctctctgtgggcggggggaggtggccctcagccctcggtgggacagggagctgtcctcatccgccggcagcatcctggcctgctcaggatccctcatgggcatccttctgagacagctgctggtgcgtgagctgc

SEQ ID NO: 28776 - DNA, 2300 bp, Homo sapien
cctgttctactcaacctatgccctatccaattcctttcctaccggatccctgccctacccgatcccttccttacccagtcccggtcctacccaatctctgccctactcaaaatctatgccctacccaatccctgctctattcaatccctgccttaccaagtccctgccctacccgctccctgccctacccaatccctaccctacccaacccagtccctgccctacccgctccctgccaatccctgccctactcagtccctgcatgcaggaagagttgcttgaggccaagccaggctgcccaggaaagaatgaaggcaggaggaccgggccccaggggctctgctctcagcaggacccgccctccgaagggcatttggagaggggaggggaggatgccacatggggggctacaggtgcacttgacgattagtgcatgggccagagatagaagtgacgttcgagcaagttttctttcctaaaccctaagtgggctctgcattgagaaaccccatgaggaaaggtgataggggcccagggagcattgggaagagggtcaaggatgacctcgagacccctgacttggaatggctttcactgatggggagcatgggcaaaagaggtgagcatatcacttcactggagggcatggggaaagcagggggaggcactgcgggcacctgggtctgcagggaaagggaggctgttgcctgggcccaagaggtagatcgtgtgtgtgtgaggctgggagaggggcctggagtctccccagcagacacgtgctgagcagataccctctgtcctagatgccagggtcacagctgctcctgagtggctcacattccactttgattctcccatgtatttattctgttgtcatttagaatttttttactctgtacttaaaaagacagattggccaccatccctgtcctcacagacatttgcagccccttcagtgataagccctcagaatctgtgaatgtctagggacgcatgtgtaactgaagaccacaggatgccagaatcttcacccaggcttcggccatcatctcggacctctgggattttacagagggagaacctgagtcacacagaaagaagaggtcgtgcccagagccatgtggggagacagcagcggtgtggctgggggagccctgtccacaactgcaggctctgccttgcttctactgtcccagcttgtgcccagggatgctccctctgggatgaggacctctgaggctgtgtgctgatgagtgggcatggctgcaggggtacgtggccaagggacacagagaggctttgctaaagggaagcagtggtgcttacctagctctaaaccaatcactaaatcctcctggaaaacttctccctggaaactggagccttttcagaagggaccctccatcaccagtgctggggggagctccatgcagaggtggggggcccaaggccaagttggctgcatctggcccttagcacagcactggtgacaggaagtggagggggagctcaatggggtccatgggcaggagacagaggcagattctggagggaagtagggggtgtgggcccagtggggtccacgaggaagaggcagattccagagggatgtgggagtgtgaacccagcagggtcttcggggaggaggcagattccagaggtggcccagcggggtccatggggagaagacaggcagattccagagggaagtgggtgtgctagggagggactcaatgcagaggcacggggcccagggccaggttggccacatctgggatgtggggccagcggggtctgtggggaggagacaggcagattctggagcactctggagacaactgtcacgtctcagccatccacgtgagagccagatgctaaacagctggggagacccccaccttggaggcatgcaggagaggtgggcacagcctgtgggggagggtgtcctgcatgaggagggagctggggccgcagggcttcaggggctgggtgagtggacttttgcttctctaacaaatgaccacacaatggcggcttagaacaacacacattgattctgtcacagttcagagacaagaagtccaaaagcagggtgtcggcagggctgctccctcagaagcaccagggaggatccttcctgcctcttccagctcccaggggctccaggggttccttggctggtgacggcaccatgccatcctctgccttctgtgcacacagccttctcctcgactctctcttccattgataaaaggtcagtcattggatttagggcccacccctgacccacaagggtttca

SEQ ID NO: 28777 - DNA, 2300 bp, Homo sapien
gggctgcagaatcgtccacctctggggcaggtctccagcttgactcctacctcacctcatttgccaattaaggaggtaagtgctgtatggggtgaagacagaaaccacggcaggactggggggaaatggaaatcgatgtttttctgacctcgtgacaggaggccgttcccatgcaaaacatccaaggaaagcaccataaagggggcgattgatggactttactatataccacataaaaataaaaatgttattcttgcaaaaacactagaaacaacatgtaaatgcaaatgatgaattttacaggagggaaaggaagagctgacctgagtccaggtggttaggagaggtgacagcgtgctggcagtcctcacagccctcgctcgctctgggcacctcctctgcctgggctcccactttggtgacacttgaggagcccttcagcccaccgctgcactgtgggagcccctttctgggctggtcgaggccggagccggctccctcagcttgcagggaggtgtggagggagaggcgcgagcgggaacccgggctgcgcgcggcccttgcgggccagctggagttccgggtgggcgtgggcttggcgggccgcgcactcggagcagacggccagccctgccggccccgcgcagtgaggcgcttagcacccgggccagtggctgcggagggtgtactgggtcccccagcagtgccggcccactggcgctgcgctccatttctcgccgggccttagctgccttcccgcggggcagggctcgggacctgcagcccgccatgcctgagcctcccaccccctccatgggctcctgtgcggcccaagcctccccgacgagcgccgccccctgctccacggcgcccagtcccatccaccgcccaagggctgaggagtgccggcgcacggcgcgggactagcaggcagctccacctgcagccccggtgcggaatccactggatgaagccagctgggctcctgagtctggtggggacttgcagaacctttatgtctagctaagggattgtaaatgcaccaatcagcaccctgtgtctagctcagggtttgtgaatgcaccagtccacactctgtatctagctattctggtggggccttggagaacctttgggtctagctcagggattgtaaacgcaccaatcagcgccctgtcaaaacagaccactcgggtctaccaatcagcaggatgtgggtggggccagataagtgaataaaagcaggctgcccaagctagcagcggcaacctgctgggatcccttttcacgctgtagaagctttgttcttttgctctttgcaataaatgttgctattgctaactctttgggtccacactgcttttatgagctgtaacacttaccgctaaggtttgcagcttcactcctgaagccagcgagaccacgagcccaccgggagggatgaacaactccagatgcgccgtcttaagagctgtaacactcaccgcgaaggtctgtagcttcactcctgagccagctagaccacgaacccacacagaaggaagaaactccgaacacgtccgaacatcagaaggaacaaactccagacgcaccaccttaagagctgtaacactcactgcaagggtccgtggcttcgttcttgaagtcagtgagaccaagaacccacgaatgcaggacacagttaggtagaggggcctctggacacaaaggtggggcccctggggtggaaaaggggagctcctggggtcacatatagttggcccttgcccgggcccaaagcagtgccttcctcctcgcgtcctgccccagtgccctgctgcagaccagtaactacccttcttccaaacattggctgatcaggaacatctggcagattaacgaaaggacacaggagtggtgaaatctcagagcaagttcctaggtgtcagagttcctaagctttctctccttaaatgccctttctgttgtgctaggggcctttacattcagaagtaagtctaaacactaagatgtgtttgtgaactctaaacttcctcttcctggaacacgtaggtgtgcattacaacttcactccagcagccacgccttcctttggttattcatgtagccaccttatcctgcacaggtctgtggcaggccgtgagacggtgaccagagaagcagtcagcactcacggcccctgccctttcagagtttacgcttgcttggaagcctccagaatggggataagcacaagacatttatgctgggcttcatccaggaagctctggtggaaggaagagaaagcagcccacacagca

SEQ ID NO: 28778 - DNA, 2300 bp, Homo sapien
cagccagcacctggcacggaacagtgtgcactgcagcgtccatgctgaggacggacctcgctctcacaccctccagatggcggcgtgttttgaggacttggatctcagccatccctgaggcaaggggggctttgtcactctgaacgggggaggtttctccctcctcccgcccagctctccaagtgaccctgggcaggtccttccttggggtcgcctctgtaggattgagctggatcctccctgagttccgtctcagagaagctgggttatgcctcaaatttcccctggagctttccagagcccctggatcctgccagtgtcacccccaacagtggccagaaggcggaatgagagtcctgctgtagttcctgggcccgatatttcaggagattctgggcaaaccccacagccctcacctcattcctctcagccccaatggggcatgaatcctcccagctggaccacagagccatcggcagctcagattgctgagccagcccccacggagccagggaggaatccggcagccagttccagccctgaggaggatgaggggcaggctcatggaaggatggaaggatggaagagaaaggagggaaggggagctgggctctggggcttttggcttctgcagccatttggacagaggtgagaaaactcagaggagaacagcgtggtgtggggtcagtggtccactttggggcattgcatggagactgacaggtgtgtaccccaatcctcaacccccttcttcttcagccacagaggtggccaggtgccatgtctaagaactactctgccagctcccttttcagagggtggcagctatagagaaatcagcagagccatgggtggggaaggggtgtctgggcaaagccccctgggggctgaccaggcaggaccagccccctctgccttctggtctcaccttcttcctgctgcccggagcaagaatgcgactgctgcagctggtgaccagcggtgacatggacaatggcccatgtgaaaaaggtcagaacagaaaagatggacacagcctggtcctggtgaccatggagtggccaaatcagtctctgacagctggtcccagacttttctacaaaaagaaaaatgaacctctctgcaattcaagcccttgcattgcacctcaatctaattgcacctgatacagacctgttcctttggagggccttgggacacatggagggggtccatcgcagacaggaccaccgggaggtggagaggctaagatgctagcaaagggcagacctgtaagagagagccctggagggtgggtgacagcaaagctgacagagggggtcttttaggaaaagccgtgggatgctgcatgtcacaggagagcagacggcctgctggatttggagacactcaggtcagggcccgacttaggacaactttgggctgtgaggtaagaacctggggcatagtacttggttatcaaggggagggaaggagcctacagtccctgtgaaaacgcttttgagagaggggaaggagctgggaggctctgacgtaaagatactgaagagcagccttggaagcccacagaaaacgcgagcttttagaaaacaagaaggaaggctggtgcagagggtgggtccggggcaccgcagcgggattggcctctggtcggagggaacttgcggtagggaaggcaggggaggggaagatgtgagtgggtttgtacatgcactgctgtgagatgagagggtttgcattagtcagggttctgcagagaaacagagccaataggatacacgtacataggaagagattcgtaaggagacacttcgtgcaattctggaggctgagaagtcccacgatctgctgtccgcaagccggacacccaggaatgctggcagtgcaagttccaagacctgagggccgggatccaatggagtggacgccagtcagagtctgaatccctgagaaccaggagtaccaacggccagagggaacggatgtctgccttgggtcaggcagagagaatccaaacgccctccacctttttgtcctgttccggcttccacagattggacgaggcccacccaccttggggaggggccagctgctgtgttcagtccgccattgcaaacacgaagctcttccagaaacgccctcacagacaccccggaagtcacgtacccactctgtaggtgccccggggcacaggcaagcggacgagccagttatccctcagagctcctgctgcctcgcccgctttctctcggaaacgtgaagtgtggcctcagctgaaagtgaggtgagcgtgagtgtgg

SEQ ID NO: 28779 - DNA, 2300 bp, Homo sapien
gaatgaaatggaacttcagtgaatgaaaaatctaaccagggatctcttattagtcctaccgatttgtctggagaagttgtggattcttgtatcatcacatcatctacacctcatgaagtaacacgagaaactcaggtgtcagccagggtctttctgcctctctgaatttgggagacattgttcaaacccccatctttctggctgcctctctgcattcatgctcatgggcatggtcagacattcatgcccccagctatacccgaaggccggagctcccaccggtttctctgcagacccactcacggccaagcaggctggaaattcagcagcctcacagacatcgggcatgatagaaggggtgactctggggcttgtgtcaccttctgccacctctggctccccccctgcccccatgtctcctcctccctccagaaagatgggtgagttcctttctcatcatctcacacaacaatccatgaagaattgtgctcacgcttgcacccttcagatccccacattctgccccaagcaggctgtcaagaaatttctgagcaacaacaacgtcaccccttcgtcacttcccctggaaagaactcaggagactgtgcagaaggaaacttctctacctcatttcaacagatgccccagcaaatctaagtgcttttcctgccgtgccgtggtaaaatagtgcctgctatgatgagagggcgtctcatcatctgttttcctgtctgtctccctgcaggctgtgggctccgggggccggctctttgctgtactggctgccccaatccacaggataacagaggcgggtgcaggaagcctgaggcctcctacaagcagctgcaggtttttgcctcctgtgaaccccagttctgatgtcctcacgttccctcagctacctgccggcgtaactctgctgccatggagctgtggttaatggcaaagctctgccttggtgccataaggctccaggagcagtcgataatgtacacgtaaagcagttgcttttaaaatcttttatgtgcctatcatattaaaagcaatcctttggaaattaccaagacatgatgcacacctgcctgcaatttttatagctcctttttccccccaagtgaagaatgcaaaatactcaaaactgagcttgtttcttttctttcacaaaaggtcctgtaggttcttcgccctcacaatctctccagctgggcctgatgcctccacctccaggatgactttgtcagctcggatccttaaggttgctttcctgggctcagacctcctggaaggttttctttctctgattttgccacttaccccaaacttattcagtctctccctgtccttgccaccagaagcatttttttttttttcctgaatttaagcccactgtgtcatcccctggcttaaaaccctgaaatatccttagtcctcccaaagctggccccgggctgctgctgctgctgctgcacactctctgtaagcaaacaagcaacactcgcggtgtcctccttccggcaccggagaccgggaggaagaagaacctgcaggatccattcttaaagaaacacatcacaaccacccaccagcctccgtttcactcccgcggatgctggaaacgtctgacgctgggccagccgcctccttccgcaccttcggcgtggccatcctaggaggctctgacactccacggacggtggctcactgggctccatcatcgtcatcaagcgcacacacactcctcccatgcacacgcacactgacacatgtccacactcacgctcacctcactttcagctgaggccacacttcacgtttccgagagaaagcgggcgaggcagcaggagctctgagggataactggctcgtccgcttgcctgtgccccggggcacctacagagtgggtacgtgacttccggggtgtctgtgagggcgtttctggaagagcttcgtgtttgcaatggcggactgaacacagcagctggcccctccccaaggtgggtgggcctcgtccaatctgtggaagccggaacaggacaaaaaggtggagggcgtttggattctctctgcctgacccaaggcagacatccgttccctctggccgttggtactcctggttctcagggattcagactctgactggcgtccactccattggatcccggccctcaggtcttggaacttgcactgccagcattcctgggtgtccggcttgcggacagcagatcgtgggacttctcagcctccagaattgcacgaagtgtctccttacgaatctcttcctatgtacgtgtatcctattg

SEQ ID NO: 28780 - DNA, 2300 bp, Homo sapien
aagttgaaaaactataagatcaccaaaattgataacaatgaaataacttaataaaatcagtatcttttcatgataacaaagaagctgttggcaaactaaggataggagagggctgccttacccagctaagtagaatctattggatgaaaaaaaaccccagcatacattagccatcctatgaaatgatgaaatagtgaaagcattacctttgaagtcgggaagaagataagtgtgcttctgtcatcactagcattctttgtggggctggaggtcctaaccagtgcagtaagtcaggagaaaggaataatatgtatagatgaaagaatgattcccaagtaactgttcacagggaatagggttatttacacagacatcaccagaaaagtgtattaatgagactttagcaagctggcagaatatataatcaccatacaaaaatcacttgtatttctatatcacaaaaaatccacttaggaaaatgcaattaaaagcatgccaatttataccacaaggtacacagcttctctttgttcacttctatgtgcaagaagcttgctgaggaaactgcttagttggaaccactggtcagcagctccggctaaccccgacctgcagacagaaccaactctgtagacatgaagtgcactatcctggaaccaggtcctccagccccaaggcatgcctactgatgctacatggatgaagacacactgtttcctgaaagctttcaaaattgtaaagtcttatacaaaatatgtttttcttttaagacactaagatttgatgcatttattcctctgtagttggaattacaaattgaatgaaatgtaggccccagaaatataataatgtaaatgtggatgcttgaactatgacactgatgacgttgtatgtccatgggaaagaagaatgaacaggccaacaattgttggggtaattggttatccgtatgaaaaaaaaatggcatctccttatatcataccctacacaaagatctgtccccaccatggaaaacagtgtcatataaatgcagaattcacttcacaacttctgaaacaaatagagtccaatggagttaggatgtcagggtagagaaggattgcttaaataagaagtgacatcaacacaaaatgagaagttggtgatttcaagaacattaaaatttagaactttacaatatcaacagacaatatgaaaaaagtgaaaatataatcacaattaaaagatggtatttagaatggatataactgacaaagttcgttatatattatatagtctacactggttggttagtgattaaactatataaagaattcccccaaatctacaagaaaacaacccaacagaaaatgctaaaaaaaataaatccaaagaaatgaaatgaattaaaaaatgaaccaaccaaccaacaaacaaaacaggaatgcgcaataaaattatggcaagatgtatatcttaattagctatcaggaaactgaaaattatgaccacaatgagatgtcatttcaaagcatccaagttgacagaaacagaagaatctgacaatgccaaatagcagcaaggctgccaagaatgggaacttgacatacggttggctggagtctaaattgatgcaaggactttgaaaaacatttgtcattctctagcaaatttgaaaacctgcatatcctatgacccagtaattccccctctcatttcatatactgttcatgtatggttgaagagatggatgcaatgataaaaataatggagctgcctatatgtacatcaatggggctgggtctcaggaaatgcaatgttggctggcaaacacgtggagtggaggatggtgatgacagaaagtcgttgcatggtgctcaccgtgcatcgggctcttttctacccacttgatgcgtcaattcacttgatcctcagagcaccccgtgaggtctacactactgtcgtcactgttttacaaggagaaagctgaggtgcatgaccttagtaaatgtcttgctcacctgccacggaactgcaagtggaagtgttggattcaagcccaggtccctgaggaccagagtgcaggctctttacccactaccaggggtgtccaatcttttgttggccacattggaggaagaaaaattgttttgggccacacataaaaaatacagtaacactaacaatagctggtaagctaaaaagatattgcaaaaagacctcatgatgttttaagaaagtttatgagtttgtgttcggctgcattcaaagacatcctgggctgtgtgtggcctgtggtctgctggttgaatgagcttgca

SEQ ID NO: 28781 - DNA, 2300 bp, Homo sapien
aagaaggaaaaaatcctcaataaattctaaccgcaagagtgaggtgcacaccaacgtgtacatgatgaggccagcgtctgagttacaaggggaagcctgcgtgtgactgtgtggtttttgagttacaaggggaagcctgcgtgggacagtctggtttttgagttacaaggggaaggctgcgtgtgacggtgtggtttttgagttacaaggggaagcctgtgtgtgatggcgtgtttgtgcatgctcacacatgccagaagacccggagaactggcagtgtgcggtctccacagagaagaatttggaggctggggctgaggcaggagggaggtttgaactggctacagtgatctcctctgcgtgtgagtgctggtttaaacggactgtgttctttctccttctggataacaggtgtcctctcctctgcctggggtctcaggggaccctccctcacagctctcagtctgcatgggtcccccaacccctctcttctctatggctctcgaggtcaacgagggctggagtcctgctgcccagttctcatctgacggggacgataactcacattcgatgaccatttatcgtggccaggctctttaatgtgttttactactgttatcatcaccatctccattaaacacaacatcaccaatctcattgcacagataagggaaataaagcctaaagaaattaaccaagtgatccaaagtcaccaagagtaaacgtgtggagcaggatgccatctggtcttcctggaggtcagtctgcgaggccacctagatggtccttcaaaccgcaggacagcagctcacgctgtggggtggagggggctactcttaaacttccagcctcccaggaacaggtttccgcccttcttgtattttgacagtaatcccccttttcatggctctagccagctgggcctccaagagctgaccagcaaaggatatgctccttcctggagcaggcatgaaagccaacagctcagagaataacagggaccagaccatggaggccagggtccgtcactcatgcagagcgggagaggcagctgatggccgggccccaggaccaggcagagccgcctctcagaggtgcaggttggcagtgaatacagagtaacagctgagggtgcggaggtgtgtgcaggtcactatcctcgccccagctacctctggccctagaggcctggactagaagaagccggaaggaagtggggcagtagttgaggcccctgaaacctccccaggatccacattcatcctctgggcatctttgcggtgagttaaggcccaggagccatggttcctggtgaccagggcacaaagacatcaggctgaacaggtccttcatctggggggcctgtggtccccgaaatgcatcttagacactttgcacaggtgtgcgtctctatcctggctgctgtgtgagctgaggacaaaatcctggctgctgtgggagctgagcctgtgggcaggctgagccaggggtgggagtgagagggaggggtgagaggggcctgagcacctactcagcgcatgcttcacagaactagcctgctccaggaagttccggtgcccagtgccacaatgcacactccagccctgtgcctgcacaccagaccccgggcccgctccacatgggtgccttgagctgattccctctgctggagttgctgaagggttctgcaggcctcaatctacagtcagcccccaaccctgtcatcagcaggggccccagcttacagcaacgcagctgttttcactgcaggctaactctgccacagcgttgccaacctgaaacatccagcccagagtgagtttttggggaggcgggaggctgtccaagcatcttacctgctgtgtgggcaagaagcggcctgcatctcatcagagtttggggatccaggacccagatctgctgctccgcagttgtgtgaccttgggaaggtcaggtcccaccctgggtgtgctcttctttcctgaagattcaatccggcctgtgtgctaggagtggagggcctgctggagtctgaggaagatggcagctgggtcggtagcagggtgagcagggtctgagtggggccaggcttcccacactggacaatgatgtccactgtaaagcccatgtcctggatttttgacaaacatcttagcaatcgacctgacactccactatgtccaagttgatttgtttccatgctggacatgtgtctaccaggacgtgctcttggctgccactggcagggcctggaatgaggacacttgttgtgcaccttgctttggagccccagacaggca

SEQ ID NO: 28782 - DNA, 2300 bp, Homo sapien
caaattagggccactttctggaatgcatgcagaatcatttgctgcaccaaagttcagaagagcacggatccagtactagccacccatctccctgctcagtgctgaccaccagctgcctggtggcgaatggattccatgtccctgaagctcatattgttccgggcatttattgatggtccaggtaattcaaacacgctgatgagcaggtatcaacatcaggcctgggctggaagccctctgtgtctacacactgcagactacttggcaattaattttttggtgactgtctaaagagaatcaaggcagagaaatgggatcatgaatcctgcctttggctggaagcgaggctcattccctttgagaaaggtgtggtatgtgtttactcttcctatttctactcaggagacaatgtatgatgaaactgtgtcatttcatgccaatgaattcacattttatgtgggaaaactcttctttaggtcaatctgatcgctataaagaacttctctttggccaaaaggctcttccagcatgggtgtgaaggcttcttgtgatataattcccaaaaagacaatgagttcagtgaaaccaaatgactttagtccagcagtgggccaagcatttaataagcacctgctgtatgccaggtagtatagggaactggattaaaggggccaggagataagagacttcggttgttaggcgactgttgggaaaactctcatgcacgctctcacctgcgctgatgctgcgcttggccatgtggcctgctttagccagtgggattttcatgacctggaggggctggcagtgatgtggttctgaggctgggcctgcccctgtgaaatgcagccctgaacccaacccaccacctggagcccagcctgccgagagcagcaaagctcccccagtccactcccctgccccagagcctggagcctggggtccagtctgaccccactgtagctgacccacagacccacggtcaaagccaccactgctgacccagggtcccgaacagcactgtgaggcccgagtttctggtttgttccagagacaggcacccaatctcaaaaaatatatactggttggaaacacaagctcatgctaaaaggcatggcaggacgagtcatctccacagtcggcggggcgagggagcaggagggcagggagatgatgacccagagaggcgggcagcttcgggactgcagctgcacatggcatttccagccatcctcctcgctacactcacttaagagaaagagcaatcctaatgggtgtcaacacccacatgtgtgcagctggccacagagaaactggacaaagccccacggggccagatccccatcaggcacccccgggcctcctgcgcctgaagctgggcctgtgcacctgcagcaccagctgccatgttcactcgggggaggtcccagggtcaccttcctcactcctgggacctccgaagacgcaggcaggaagaacacatcacacaacagggcaggactggggctggaggacagggccagggctcgagggtaggttctcagtgaagaccgccctatttccactctggcgctatcaccggttagccatgggatgctgggctcaatagttaacggtgacatttccaaccttctccacgtgtgaaatgcagcggcagtcgtcaaactcagagtcctctggagagagacggagacactgagacccaccccagagtctcggactccgcaggtctgagtggggccagagatggacattcctaacacgctcccaaggctgtgccaatgccactgggaccccactctgagtcactggcttacgaggttgccatgaaatcagataatgtccctaaagtggagaaccaagggccggtacataaggcagcacccctgaacacgagcggctctccccattactgtcactattgcacagtgaagagtctcccagctgcttcagctctggcccagcaaccatggctggtgcccgtctcccccatctctcacccagtatgggggctccaggcttggggctgatgtgacatcacaaacaaaggtatcctcacttccccttctacaaaggaatgcaaacacctggggaaaggctggatcccaagaggcccctgaagccccaagagctcccctgattgttccaaagcaacattcccctccatgaacaactcagggaccccctcgatccacggcgtgaggcccaccagcagaggaagaggagcttccagtcctgactcccactaggcgcaggggagccgaggtgagctcccaggcccgccgcatcttcccgtaagt

SEQ ID NO: 28783 - DNA, 2300 bp, Homo sapien
catccagtgcctcctggtcacaatcagacacgggcactccccagggttgaggacagtctgagccgtgttgggtgttgggatgagagagctgggcggcctctccaagttcctccaagccgcaccctgccagcacatgtgatgtctgccctggccagggtgctgggctgggggacccagaggtgacaggtgacaaggcaggtgccagaggaggggccgtctaaggttatcataggagaaaaagtgggatggataaggaagggcacccaggctgtagaaacggctgctggagagcacccgggcattgcctgcaggttcctctctgcaagggtgggatggccacccttcgtccctcacgcacccaccacggctttcctcggagtcacctccctgccatcctgttgtcctgagccccccaggcagcccgcagactctctgctgatccccacaggctgggagccctgagtccgtgcatctctgatgctgcggccatctcccccagctggaaggggcccctggggaggacaccaaattcttttctaaccgccgtggccccagggccctgcacagaggagggcttgcagcaggcactcattacctactcagatgaaggagtgaggcagcgagtaagtagacatccaggtggttccagggagcaggtgcccatgtggagctggatggcaggggacctggcactcaccgttcagggcagatttgggcagcactggctgagggacaagctccatcctgccctggggatgctgggttttcatcttcacctggagcacgggcactgtctttatttgtcagtgttaatatttggctgtgattggtggtggccatgctgcgttttaccagcagagtggtatcttaaattccatgggtttatttgcagggtagaacttcctggctgttcatcttcccgcacctgagatgcctgggctgtcgggcccttgcagagacagccttctccttggaatttaggggatgcggagggggcagtgaggaaagccagggaaattatttatgttggcacctttggaagaaatgtgtcccttctctgtaccacaggtaatcccagagcctgactctgcccccggggtccttcctgcttccctcgtgccctgtggggtatctgtaatgtggggagcagaggtggtgtgacaagggagatggggatgcagggtgctcctgtgggagcctgtccacgacacccatgggtggtgggtgtctgcagagcacatccatgaagcttgtgtgtacctgtgtctgcatgggcacgtgcacccctggggagcatgtcctcatgtgctgctggtgagcctgagacccctggccttagtgtgctcacacctgggtgccacccgtgtaaacctgcgtgcctgtggctcactccaggggtgtgttgcgtgcacatctgtgccttgtgtgcggtcatgtgtgcctgtttgcacacacgtacatgcacatatgtgtgtgtgggcgtgcaccgcgctgtgggagggcggaggaaatcctgaaccctttggcatcgatgcacacagtggtgcccgcctgctcgttcctctgtacccaggcaggcatggcagttcctccctggcagcgtggctggttccacacaacttttgacaagcctgagcgggggtctgacctattttccggctccaaagtgccacaccctggggccagtgtgctggcacttggggatggagaccaagcactgtgcctcgtacagcccggcttctctccagcaggtgcctgattgtgtgcaggggagccagctccctccttgtgatccgaacctttcatttccgggcgtgataaagatggggctgtgtttaatttcctgtctgccaaggcagcaccaccgcctgaacaccaggctgcacacagggtggagttcgccgacttgacccagctctggcttccatcgagcgctccttgctggcagccttcgaggtgctttcggacgctccctctgagtgaagcggtctccctgccctgtggcctggctgctgggggcccctctgtgggtgggctctgggtgggctctggctgtggggtgtctgtaacgtgtggccgctcagtcgcttctgctcctctctgcaggtcagctggccgccggcacctgtgagattgtgaccttggaccgggacagcagccagcctcggaggacgatcgcccggcagaccgcccgctgtgcgtgtagaaaggggcagatcgccggcaccacgagagcccggcccgcctgtgtggacggtaagcacccgtggccccaggacccctccgggtgctgagcgcgg

SEQ ID NO: 28784 - DNA, 2300 bp, Homo sapien
ctgggacaggttccatgatgtgggagtggcgggcgagcaccagtgcccagggtcacccctcaagggtgacacggggcctgggaaggaagtgcaaggcttcgatcaggaccacgagcacctttgcctcgagtgctggtcaccctccacctcctgactcctcgtgagcttggcgaggttctctttattctatcaatggggaaactgaggctcggagaggaagcatggccggcctcaggccgttgtgtggaacgccgcgcagtgtggcttccagccaggccttcgtgacactgctctactgcctgggacagagaggatggagacacttggccctgccccttaggtagcagtggccaggactgcccctaaccaaggtcgtgcccttggggtgtggcctctgcctgctcttgttgtcctgctggggctgcacagggtggccagtgggggccctgggcagagggtcctgggaggctgaggactatctctgagtgtctcatttgcagactccactggtggctcagctggcccagggccctgggaaggcggctctcaggcgcacaggaggctgtgaccacccctagaacactaatggatggggcccatctgtggacatccacacctgcaaagggctctccccggacccttcaccttggggacggaaccggttctctccttggacggggcaggtactgctcccagcagcctgagttaggcgaggcagcgacctccttccctcagtgcatggggagcagagggagcttgggcagccagcgctgaggttcccggtgcctcctgacccaggcagcagggagcttcctgggaggaacacccccaggagcccgcatggggctcatagcaggaggacaggccagggttcaggcccttctgctcagcctctgggtatggggctgctcctcaggtatcaatggtgggggctgctttcctcccagcacactgacgcctctcctcccagctctcactgtgatacaggaacgggctggaggcccctctcctggccaggctgccccatcctgtctcactgtgctgaccacaaagccacagaatacatacttcatgccgtgcctctcctctgtgggagggaacggaggaccctccagcccaggcaccagggcacccgatggggaagaggccagcccaggtgctcctgcagccactgtagctccgcctcctgccctccctcccaggagaaacccagccccttatgggaaaagctgaggccttgtctgtccaccttgatggctccaaagaccagtgacgtctccttggaaggaagcacagacggccaggcagcccgtggcgcagccccccagcccagctgcccagtccgagatgccctatggaagagcagctggggggtacctggtggtcccacccaggtggcctcaggtgtgggcagcaaggaggctctgggctccaacctgctctaagtggatgtctctgcaaagggggtgcttcagacctgggcctccttggggagctctgtgtatggcacctgtgtggggccagctcacgagaacctggggccagcctccctactgacagcctgggcttccccaccggccaggggaggaatgaaggagagccgatgcctgccacactcaggcggccgcacgtcagatccgtggagggactcagggcgcagtgtctgtgtggggcagcgatattcaggcagggatgacagccccccagagggctgcagccaggcactgcccactcgtctggggctgggcttcagaggccatccttgtgggtgcagaagaacccaggggctcacaggcggcaccggctatgccgtgagggctgcaggcactgtctgctctgaccctgggggtccctgtgctggccccaacctgtcatccccaccagcctcaccagccacagcccctctcccaggacaccacgcccagggaacaaaagccatgcttatcaaaggagtttttctttatttttcataatttagctgaatcaacacaaaattgaatactgtaaaacaagaaaaaaaaatatgctgtaacatcttaaatctcccgatctctgccctcgaaggtgtctacacttgctttcaaaagaaacaggcgagggggaggccgtgaggacgctggctggcagaggctgccggcccgggccgccggagccggggcagcttgggaaggaccctttccaggcccaccccctctgtgatgacaaacccaacctcagccccttcttttagtccaggatacaaatgcctataaatttgtggtgactgaaaggtaaattatgtcctcatggataccggaaca

SEQ ID NO: 28785 - DNA, 2300 bp, Homo sapien
acccttgtacgtgtgcatgcgtgtgtgtgcctgtgtgtttagtgcttggggggtgtgtgtttgtggcttattgaaactatgaattttactgaatcagtagagccgatcattctttctgcacaaacctggtcccacctcggtcatgcctctgtctgacatctatcagtcaatttatccatcaatggtagaataaagtcaattatcaaagctggcagtgcggccggctgctttcttgaaagtaacaatcagtcggggagcatgtcttgctaattccatcctgaatctgccttcttccctcttgggacaggtgcctgcgtccgcacccctttcctctgccaatggggagaccacaggcttccctccctgcttgcgtgggctggacccctccccacctcggcatggcttgtatcaggggcaggaaggtagccaggagcatcacggatgtgaagcagtaactattttagtacatccaagggagggagctgcttcctgctttacacacaggtccaacaacatgaagacgggaatctcaagaaaaacaaagttataaatcacaaatcaagatcataaaataaaatcagtattgaaataatggcagtaaatgggtgcttttgatgtggtctgcgttgtaagacacagggagaaaatgcctctgtaaaactctaataaatcgctttgtttaatcactagaatataaatggaatttaaagggtcatctgagagtcatcctttaaaataacacattagcttttcttctatgacagtttgggggaaagatgccattatttagagcttgtgtacttcatttatttttaaattaatagttttttagttttctatcttcaaaaatttccttaaagcattcatctactttctctatttccttttccctaatttcagagaagagtttgtgtctttattttcctgtcgtggatgcagagagctcctgcgggtgtttacaaaaggtcccttggtgtcattctgcttcttggccctccatcactcatggaatcacagctgatgcctgggctcacagttctccgagaaatcactggtgccagggaaaagtgttctctgattgatatagcacacttgctatgtttcacagttcagcccaagctctagctgctatttcttaagcaaatgtgtgctgtcttcgtggaggtggcagtggagaaaggaaaatatcagctctcagtgatatcactaacaacacccagggcaacaattacgctggcacgtcctttactctgggacctgcctggccctgaggccgtgtgggctttgctggtcgggtcctcccagccctaagaggggcaggtctcaggatcccattttgcagaccgggaagtggggtcaccagacaaggactgcacactgtcccacaacaaggagttgttggatcccagtcccaaacccaacgtgtgtgacttcagaactggtgctctgaggagcttctcagtcaccatcactgtgcactcccttagcagggatggatgtggaaactcactcctgaattggacaactattgctgttttccgtggagctgccagagggatcattgtagagcaacggtcaccagagcaccactcagctgtaaacactcactgcaacgaagctaaacccagacgacagatctggcatggcctggcctccgctgctccccagcctggaggactctggccatgcctcggggacatttctaggctggagcatagacgagccagtgcacggacctccagttctgagtcctgccctaacacctgggaggaacgtgtgagttgttgatgagccgcgatctgtagccatgctggaggagttggcatgaatgggaaatccacctttcttgcaaactccgacatgccactgagaattcagagtgataagcttagcctaaagctgcctcctcacataagttcagcctaaatggcatgaacccaggaggcggagcttgcagtgagccaagatcacgccactgcactccagcctgggtgacagagcgagactctttctgaaaaaaaaaaaaaaagtctttctgtacacagtgaactgtaccaaactggacgtgtaaatagtctgtaacctactcttgtgccagtcatcgagttttccctgatcaagtaagacagaccctaagctggagccaagtggctgcttctggactgcgctctgtcttccgtaagtcaccctactttttctgttcataaatcttctttggtcccacggcagtgccggaatctccctgaatctcttctggttcgggaggctgactgattcccgaaccattctttgctcagtta

SEQ ID NO: 28786 - DNA, 2300 bp, Homo sapien
ggccagtcacattcacattcaagttctttaccagggcagaaccagatggaggaacaaggggctgctgaccgtgtgggggtctcaatgagcattttacatgtgtgtccaacatttacccactgggtactaggaacaaccactaacctaataacaaacgtagactttttcactttttgttcaaagttggggattttaaaaaatgtccacagccaagcgtgccaccctgcccaccgctccgctcctctgtgatgtcaccctatttccacggcccccagcgtgggtatcatcagcccctctctgatggagatgtctatgagcctctgtggaaacttgcttgtatctaaatgctgtgtcttcttgcctagttttcctatcagcaaatcgtctctcactttggtgtaaattaactgtcctccttcagttttcttttctggttttctagaccaagcagcatcttaggagacacattaatggttttatattgaagtagagtaggtcactttctcccagtagaatcatgaggccctacaaagctccccaaatatccatgttttccccaccatccccagtttccagggaggggcacatggctgattttcctgagtgaaaggtgagcgaagcagtgtggggcccaagatcactgtgacccggtgcctcactccctccttcttccattcccgagctgggctggaagttaagggctgagatgggggagctgcaaacggaagagggtgggttcccccatcaccacccagaggaacctgtgccagagaggcatgtggctgcccttggggctggagtgttggtggtgccagtcccatttcttgggatctctgaggaagaagagcagtgggacaagtggttttgcatttccacctctgggtgctgtccacatcatacttattgtaaaaggtcagagtggaagcctggggcagttcccagcttgtctctgatcagtcactgctcttatgatgtagggcaccatttaacacagggtaacaaagcctccgtttatcagtccaaaggcagggagtgcttggctggcagggtgactctgctacctcattaaatggcttcaaactctgagctcaggatagctgctctagctcctgccatcacatctgcatcccagctagctggaaggaagaatgggccaaagagagtgcatgcccgttactttgaagaacatttcccagaaatggggcccattccttgtgcctaggtcccatgggacagacctaatcacacagccacaccacgctgcaagaaagtccagaaaagcttgcctctatctgggcagagccatgtgctcagttgcactcgagggtatctcagagtttaagaggaagtgagtgactggaggttggcagagagctggcagccaagcctgggcttctcctcctggtgggtctgaggccagctggcatgaggtctggtcgagaactgccatcctgacccagaaggcaggaggtgaggctgaagacttggtggaatttactggaaagaggtgtttccagagttcactggtctgtgtttttctcaacatgggcactgcttccttcagcacagcaggtaacctgctgggaggaactggagccaggagcagcttggtcactttctggtcgtccatgtcacacttgtcacggataaagtctgcaggtttcaaagtgtgtggttcccctcactgtatcccaggagagctacatgctgggggtggaggtctgcagcaaacctccaaccacacagacgctggttgcgagtgttctgaccacagcacgggcaagcaggggtcactcggaactcattttgctagatggtgttggataattcctgttcccttttttcccaactgttcaatggcatgctttgttttggatagaatcggactccctccccagcagagagcgggaggcaggcattgtgatccctgtgcactacagtagctggtgttctaaagatgccctgcgtggcatggcctcatattctggagccaaacagacttctggggggatggtgtctccgtttccccaaccccaggggcccagctgggaggagacagcaggcaagggtgtcccctgctgatctttccacaagacctgcactcagtccccacatcaatgggcactgcccacccagacagcacctactcctgtgggcagcacccagaaccggtgctcacgatggggaagtcaggactttggagaagcgggaaactggagcccgagggcagggtgctcaggagagacccatccagacagcaatgctcaaggccaagtgagaccaacgacctggaatccagg

SEQ ID NO: 28787 - DNA, 2300 bp, Homo sapien
cacacctgtaatcccagctattcaggaggctgaggcaggaaaatcacttgagcctgggaggcggaggttgcagtgagtcaagattgcgcgactacactccagcttgggcaacaagaccgaaaactccatctccaaaaaaaaaaaagaaagaaagaaagaatagaaagaaagtcatcacgttggagaactcggtactctaagaaacagggtggcctgtgagacccaagggcagcctggggctggcagccagcgagaaactgcagccctcagtcctacaaccctaaggaaccaaaatttgccagtgacttgagtcagcagagaatcagattcctcccagccctgtctctgatgaggccacagctcaggctgacatcttgacagcagccttgtcagaccctgagcggggcccagcttaggcacccggactcctgatcacagagaatgtgagacggccgggtgtgttgcttgaagccactaacttcggggaaacttgtcacgcagcaatagctaacttatcaaactctcattcaggtttgttccaatctcacctttttagtgaagcccgatctcatcgcccatgtgcctctgccatgatccctccttctgatctttacctaccaagcctgggttgccctctcttcactgtgttcaagcacacgtccccttctcagtgaccagggaatgtgggtattgggtctgttcattcctcctcgcagtgctagtctgtgagctccaggagggcgagcaccttctcatttgacgctaacgtaccccaggtgcctggcagtgctccaggagagcgagaaccttctcatttgatgctcatgtaccccaggtgcctgccagtgctccaggagggctaggaccttctcatttgatgctcatgtaccccaggtgcctggcagtgctccaggagggcaagaaccttctcatttgatgctcatgtaccccaggtgcctgccagtgctccaggagggcgagaaccttctcatttgatgctcatgtaccccaggtgcctgccagtgctccaggagggctaggaccttctcatttgatgctcatgtaccccaggtgcctgccagtgctccaggagggctaggaccttctcatttgatgctcatataccccaggtgcctgccagtgctccaggagggcgagaaccttctcatttgatgctcatgtaccccaggtgcctggcagtgctccaggagggctaggaccttctcatttgatgctcatgtaccccaggtgcctgccagtgctggcccatcatagatgctcagtcatcagtcgttaagtgacgcttgagtcaaccagccaggccatcgtttgccagaggaaatccagtccctgagatgaaggtgagtcgtggcagagtggaaggcctcatccacattcctagtttctcctgtgttcacatccggccccctgttctggcgggggccctgccctgtgctcagagcaacgcggccgcctccctccagggtcccacacctgccgcatcacctcccctggggtggcacgggcacacctggctctgctcccaccctgctctggcccccattcccagacaagtcccgccgctgtcagcgcacctctgcattgggcactcccttctgtcggcagagtcgtgctctgtggtgcatctgaaggtgtcccgtttaattttttattttaactgcacctgtcttgaatgcgtatctttcaaaaaaggggaaaaggagctagaattgtagctatcatttctgagcacgccctgggctcccagagccctgcacgtttttcttttgttgaaacccccattgccgttctctggagtgggcttgtaatctccatttcttaggtgggaaatggagggtgagagggaaagtgacacggtttcagagctgcagcatagcagggtggggtcgaatcctgtttaacttcattccaaataccaagctttcaaccactgccttcaatatgtgctttgtaggcagcagcttctatttacttacggccccacagctgctctgcaccctgacccaggatatccctgcaacctatgcaaactgagttccagccctgctgccaaaccctccgtggccctgggaatgaaccctcatcctggctgctctcaccgtggcctgtccagatgcaggagctcctctctgaatctggggctactggcaggtgagtttctgcagggacctgccccctgggctctactgcaggggcacagaggcacagcgcccccttcaaggcaccaaggtggccatttctcccacccactacagggtccgctccccggaggtctgggt

SEQ ID NO: 28788 - DNA, 2300 bp, Homo sapien
tttgctggggcctggggcgttacccaggctgtggggagagagggactgtgggccaaggcctttgctggggcctggggcgttatccaggcaggttcctgccaggagttctatctggtgcctttggagcaggcaggcacaggctccgtgggggcacgctgggactgaggggtcactgtgatgtctgtgcaggctccgtgggggcacgctgggactgaggggtcactgtgacgtctgtgcaggctccgtgggtgtaggggtgaggagtgagtcaagtgggctgtgaccagctgtcccatagggagttggacaccagggccagggtcacagtctgcaaaacatttaggatcctaaacataagagaaaaagacaagcagaccagcagaaaaaccggcagaaaaggagcgacggggagtttgacagaacaggaaccatgcctgggctcctgggggtgcgtgtgagcaggaaccagggtcctggggggacgtgcgagcagaccctcagctcctgagttgaccagggcagtgcggggtcagcctgcgaggaaacatcgtcccactgtaggcccggcggacactcagcaaggaggacagctctgcgctgcccatgggacaggagtggctgcagccacagggggaaacacgttgtcatcagctggtgaaatgaggggtccgaagaccccccgagtcctggagatgtgcgtttggcgacttggaggtctgagcgggaaggtgtgtgcggggctggtcttggcagcaccattcgtgacagcagatgctggacacagccttggtgtcctgtgaccagaaaataagcatgagatcattgtgtggccacaccacgcaatggcactgagtaaactcggctgtgtagacagacgtggccggggctcagggacttgtggctgggtggagagaggagtgtgcagtgtgcacatggtttagacggcattcacagactcagacacctgaagtcaacggcttggggtacgcacacgtgtgctgggtgatgccctgcagctctggtttggggttaacgtgggtgggagtgagggtgcctgtcagaggacggggagaggggcttcggagacgtggaggcaggctgtgggggagccgcctgtgcgagtctccactcgtcacagttgtatcaagatcattctttgaagggcctctgtcctgctcccccctggggctcccacaggtggcccctcaacctggggctgtgccgtgagtgtgatcctgtgccctcctcatgcaggggaaagacatgctttctggagcctttggatagaaaagatgagacccaggtagggtctgatgaagtggagcagagatctttgatggcacatgtgaacagctgcgtttctgccatgcgcagcggggtgacaccaatagcacgcggcaatgaaaccgactccaaatgttccttttgtttcaagctctaaggaaattacagacctaaaagtacagttacattttaccaaaacaaccccaatgcgaccctagctgtgctcccggggcacgtggcgctgcgtggggcgggatggagggaggctgtggccggaggcttcagggtcctcactgtgctgcctgtcctcgggatgtcccgggggcgagtccccaacaggcctggtcctggggaaagagcgcagccctcagcacagtccttgctgcctggacaggagcggggccggggatgcttccccgtgacaggagggagaagggatgagcaacaaacctgaaggctgcgtctcaccccagacgtggattgtttgaacccggagatgagcgagttagcccggaaacgactaagccaacatttcaggagtttccttttccttgggccaccaagtgtgcagcctgagaaccggatctgttgcctgccctgggcacaaggggaggcgcctcctggctcttcccaggatgaccttccgggcacaaggggaggcgcctcccggctcttcccaggatgaccttccgggaacaaggggaggcgcctccaggctcttcccaggacgaccttccgggaataaggggaggcgcctcccggctcttcccaggatgaccttccgggaacaaggggaggcgcctcccggctcttcccagaacgaccttccaggcctctgggatgagcgtgtccccagaatctgctctgttcaccttcatccaggcctttgcctctgaaggtgagtccgagtccccctttacaccacagcctggctgagcggagtcttggtgcccctggcagctgttcatccccatcactggccaactccctcccagggcactcccttctgccctgat

SEQ ID NO: 28789 - DNA, 2300 bp, Homo sapien
aagtgtaggcatcagatgaaaatttaccttcttgttacctatgtaaatgggccgggctccacgaagtccttggctgagaacggtgccactgaccgactgagctcccgatcgttctgagagaggcttatgtgcacagtggacgtggaaggctttgatgatgttggtgaaactctctctggtgagctgggaggcagcctcgccatgcccacctctccgaccttgctgtggatgggtcacaggtgatcccactctgctcaggaggagctggccccccagcctgacatgaccacaccctggtctccccaccctgcgcctcagtgggtgggtcaggcacatccaagcccctcccctccttagaggctggacctggagccgcactgcactgtggggtcagctcccaccatgctgcacaggcaggagcagacccctccagatggtgctttcaggcccacggctctgtggcagggaagcccagtgtctccctgggatgggcctgggccaccactgcaaccatgtttaacaaccgcaatgtcccctgtgcagccaaggggggtgccgggggtgggtccagaggtcttgggacaggggcaggagacaacaggggctggggagaccccccagggtggggtggggttgggggccctgctgtcaggcaacacccattcaggattgctagtctccctccaggggactgacccctgatcaccacgcagtgccccttttatccctgatactggtcctggctgggattaatcacaactcctgtgttttccgttagtgttagcgtggtgtatcattctccaaccctttcttttcatctatgtgtgtctttatatttggagggagcttcttgtggatgacatagagtcaggtttttttttctttttttttttttttcgaggagtctctttctgtcacccaggctggagtgcagtggtgccatctcagctcactgcaacctccacctccctggttcaagcgattctcctgcctcagcctcccaagtagctgggactacaggcacccgccaccccacctggctaattttttttttttgtacttttagtagagatggggtttcaccatcttggccaggccggtctcaagctcctgacctcgtgatcctccaacctcagcctcccaaaatgctgggattacagtcgtgagccaccgcacctggcccagtctctctcttttgatggatgcacgtcaacccctgacttctgaagcgaccatccacatagctggattcctgttggccacattggttactgtttgctgttgctcggtctctgtttctttttttgtcttccattctttttctgccttctctggttttgattgagaattttgtatgatttcattttctctcctctcttagcaaatcagttacacttcttgttttctttctactttttttgttggttgtcatagagtttgcaatatacatttacagtgaacagagaggttcactttaaatagtgtggtgccacgtcacaggcagtgcagttgcctcatggcagagtgttccaatcccttacaactttggtgtcattcattttacttatccataagcgataatcgccaaatatgtggttactattatccacttctccatttctccatttatttctccatttatccgttatttctccttgactttaagaagataatttaattgggtacagaattataggttgttggttttatcctttcaacactttaaatggatacaaacggtttatggcttgggttagtactaaatgtgtagcatcggtggctcagaaatgtcgccccagaaggcacttcctctggtgggaacaggatgggaagtgggccaacagggagagggtcctaaatgtgggagcagggatgggaagtgggctaacagggagaaggtcccaaaggtggaagcagggatgggaagtgggctaacagggagagggtgcccaaagacctcacagcagaaggttcctggagtgaggcctggtgcccaggcagagattgtcccaggatggcgccgtcagcccggcgtcagggtggccgtttgggggctggtggcagctttgtgctcctgtctgcagacgctgtcagagatggattggggacaatcctgcggggaggtgctgaggagggcagctacgacaactggccccacaccaggtgggtgtcatcagaggcagctgtgataaatggaggggcgaaaaatatatttacaactgggcagtgtccaaggccatgagatttatgttcctctggtcttggtggcctcctgcgtccctgagggctctggagggagc

SEQ ID NO: 28790 - DNA, 2300 bp, Homo sapien
agtgtgtgtcttatgggatgtgctgtggatctccttgggcagccccgtctctgcctggtggccgaccatctggttgaattgactcttggggtgtgagaagggccccctcgtctctgcagccactgatgccggccttcaccaggggtcacccaggggtcatcttctggatcaaggctggccgggtgggcttccagctgcttgtccacggccctgcccctcgggactagggagatgtctgcttggagcacatgtgctgagatccctgaagaccttctgctctgaagaagatccctacatcccttctctggggtgctggccttgggaactgcgaggtgtctggttggagctgtcggctgcagcccggtgccccgggactgagggaggtgtggagcctctttgtcattaggtctaattacacaggctttcttactcctaggtaaagcccgcatctgaatgcagagatattcaactccagcattctcctgggaccagcagcactggtttccatgccttcctccaccaggattttaaattaagcttgatggaatcgcagctgctgcttattcatctccctcgggccttcccgggaaatcggtggctgttaatgaatgctgaagctgactcagcaatttcttcttacctgtggcttaaaaaaacagcctcaacactctgctttcttccttgataagcgcctgcccatatgcccgactctctggcagctggaattctgctagcgctggtgttgtgggttgaatgtgtccccgctaaaaagatgtgttgacatcctagccccccgaggacctgtaaaggtgaacttacttgccaatagggtttttgcagttataatcaaattaaagatctggggatgagatagtcccatcccggagagggtacgccttaaatcctgtaattaaccggtgttcctcataaaaaagagagaggtttgaggctcaggcaggaggccatgcagacacagaagctccaatcaggccatgcggctgtgaaccagggaattccagggattgtggggcccctggaaaatgcagagacaggaagatccctcccttggagcctccagagggaacgtggccccggggacaccttgattttggacttccggcctccgaactgtgagagaatttctgttgctttaagcccccagtttgtggtcctttgtcacggaggctccaggaaatcacatggtgggcccagctttcctggtgagggtgcactcaaccgacagtgtggatctgtggcgggaacacagctccccgatgtttgccctctgcctccctgtggcttccctgtacctggaggaggagcagagggggttaacagcatccagtgaggtggaggaggtgcaggctgggccctcaggggcaggggtctcatcgtggcccaccccagaggccatcagtctgggccctacccttggagcaggtaggggactgaggggaactgggcacccatggttcacgttgtgtgccagggaggagatggcagaaggttcccctggggtgaggctgtgctggccaaggatgcctggaagggggcattcagggtggcgggaacagcatggtggcaggtagaggccagggtgaggctggactccagagaaagccaggagaggccttatgaggacaggtgccagagggcgtgtttctcaggctcacactggtgctccgtggagaagagcaggggataggtggaaccgtgtgagcctttgcggaggtgacgtcgtcaccgggtcactggccaggagatggcaggggctggaggaagggcgggcctgagctccatctggaggtgggagggatataacctgtggatgggctgagagaggggctctcagggaggggaatcgcagggccccggggctccggctggagctcctgcaggagactgggcaggtgcccagatcaggagcctgatctggggggtgtgctgtggtctggctgtgtgtccacacccaaatctcaggaggaattgtaattcccagtgttggaggaggggcctggtaggaggtgactggatcatgggggcggagttcccgttgctgttctcgtgatagtgagttcccacgagatctgatggtttaaacgtgtgcggtccctccccctcacgttctctcttcctctgctccgccatgatgagaagcgcctgcttccccttccccttccgccatgattgtgtttcctgagacctcccagccacgcttcctgtacagcctgcagaactgtgagtcaaccaaacttccttttaaaataaattacccagtctcagttaggtctttctagcag

SEQ ID NO: 28791 - DNA, 2300 bp, Homo sapien
cttacttagatctttgcctgaagtcttctttttttcatgagggcagctgcactgcacccacaccatcatcagaggaccccctcgtctcctggccccaggggccaccacttcgtctatggctggccagggaaggtgcctcatcttcctgcccacagcagggccaactggggagtctgcatgaagctggctgcggggaacagcgtcttcctcatggctgtgggtaggagggttcaggggcctgacctgactcaaagagaagcaggttcatgggggctggggggcatggtagtgatagtggtgggcagagggggagacagagcgagaggagagacagaaagagagagagatctgataacgtcacataagctcctggatccagccattcctgaagcctccgagccacctagcattgggtccatccaccctgggcttccccttcagcttaaccttggtttcagacactagcaacttaggcccattcctaattctccattttcagcttcctcatgacatttataccacagacaaaagcaaataaacagatggaacgccaaacccagccaataaaccttttgtttaagctcattctgaaccaggaacccatgctcctcataccctgctgtgtccttggttttctccaggatggtgctctggggataaaaccagacgacccacctgacacgcggagttgcagggggtcaggtgacacggcggctgagctccgagcccagatgacaccctcacagccgagctctgccgtgcccgtccttcgtgcacccagcccatcccttcggctgcgtgtgaccccaggacccgggttccggttttcaggtgttatttctggtcagtggtttggatccctcccaggagggcctgggtggccaaggcagcgggaggtgccctgcggtggcacagcggcactgtctccactcgctgttcaggtctgggacacacagtgctgttgctcagctggagacggggcatcccagtgacggtcaccttgcaaggacaggagagacccctgcccaatgttcgattcagatgtcaagactgaagatgccacacacacaccaggagggtgagaacgtcccatcccttacaccactgaggtttccaggggagcaggagccccccgccgcgccccatccgagctggtccaaaggccagggtttatcgtgattggggtggggccggggcgggggttccccgggatgccaggggcttctgtgcttcgaatcttctacaggcactaaagtgaggcctggccggtgtggggcccagggaggagggagaggggaggcatcaaagccatcagcagccagtcctcagacagtggagtgaaatcctcccgaccctccctcagccaggcggtttccagtcccacaaaatcccccgataaatcaggacctttgactgggacagaccagggaggcgcggggaccacccggccgggctcccgggcgattctcaggggctggccggcccgcgtgtctctgcacaccggctcattctgcagacagcgccgagtgccgctgtgcagggagacgctcggctgcgcgcggtccgggcacagttctcggggagtccagaggagggagcacgagctccagggatgagcatcggggccggactcagccgtccgtggctatggctggagcggctggtgtgaggctgtgggaccggccaggggtggggtggccggggctgtatggagcagggccacccatgcccgggtcccgcgtgcgacttgggaggccaccctccctccccgctgcgaggtggggaacaccgggcgggctcctggctcccgtggagagggagagaccgcggtttcgccctggaacggggccggcggtcggcaggtgcagggcacggactcccgtcatttctgacggtctcaactcccgcttctccttctccaaaatgccctgcatgtttttctgttctggagttcctctggaaaatgctggttctgtttatgtccaagtctcctttttcctggtcaccggggtcccgaggttgcggcgcctgacgacatgcgtgttgcagaagctgctctgtggggacagtgaccaacggcgttgccacagtgacccggccatgatgcttcaggacaggacgcacggggcaaacgcctgggcaccggggacggggcagcgccctcaggcagggtgtccacggggtgccccagggctgccggaacaaagaccccagtactgcggggcttaaaacaacagaaacgtgttgtcctccattctggaggccgggagtctgacttcagggtgtgggcagggccgcct

SEQ ID NO: 28792 - DNA, 2300 bp, Homo sapien
cacgattgaggcgcagttcacgggaaacgcggctcttgtgagcggacgcgggagttctgagaatccgtagcagcgggaccccctgccccgcggggtgcggccccgtctccccagaaagcgcggccgcccgtgtctgtttttgagggtctgtcgccaggtggttgtgtagttagtggaatcggcggatgtttttgtttggccggcccagcgccgtcccgagtgctgtgtgctgcacacaacttcgcacagctcagcggccgcggcccctgtggccttgaccgagaggcccggcgcgtggccggcttctccctgggcgggcggtgggaagatggaagcggccgtcttgtgggcagccttccccgcctgtggcccgcagggctcttcgatgtacttaagggaattattccttgagaagctacgtgtgtgcccccgcggatccctcccagtggaaatgcttgtcccagtggaagggccagggacagaaccggcccaggggggaagcggtgaagcagaggaggtcgtgggtcgccctgccctgctgagggcctactttccccgggtcccagttgcatgttgagggtatggagctgctgtggccgtgaagccttcggttcagttctccccttgtagaaagtgttgcgatgaagagcttcacggctccctgggagagagtgggtttccaggggctgcttgtcgttagggcgactcaggactttgctgtcgaggggaaaatgacaggttcgtttctgatctggtgagtaaccaactgttgcttctgccccacctcagtaatgacgcgtgtcggcgtcccgggtgcactagggtcgctctctgcaggctgtggtgtcacctctgcagggctcacggggccggctggggggtggctgtgctgacagctccccaggaatccagggttgagtgggtacctggaggccctggagatgcagggggtctgaggtttggccgaccacattttctctcctattcctttctgtaggtaattgcaatctagtttcaacatacaatgaggatttctgtctgatacagagaaagatacccagtgtctggagggtctgtcttaagaagtgctcttgaagtctgctgggatttcctttcgggactcacagagggaagcctgctccctgagggctttttctcaggcccaatagatcagggtaaggctgctgtgggtgcccctgatccccctgggccccgaggccaggcgtccctgacgtggcagggctagatgcagagtatgccttgggcttcagctgagaatatttgttttgcgagtcagtcactgaaaaatcattttgcttcctgtcagtgaagtgtggcgctttggagggaggcactgcccagcaggcggtggtcttcacaggaggtgtccacacaccaggcaccctggggacagctaggaatagacgcagtccgtggtgttgggacagcagaggcctctgccacgaggagctggaggtatgggaggcagctcactggttttgcctacctctggaaaagcagattctcctaagcctctgtggccaagtcttcaggcacctgagccagcgctggcgaccctcctggtgagggtctctgcaagcagcgaggggttcctgggggtcacccctcgctgtggagcctgagtggagcgtctgccttcacgtgtgccggggagaacagagattccctttggcgtcatgcatgtgtctggattctctcagaaaggaggaggacgtggaaggaggaggacgtggccagcaccatggtctcagtggggcttgaggagtgcccctgaggggaaggggcaggttggctcagcctgtggtggtttccatggtggtcactgccaaggctctgcagaagcggggttggggcctcccaggggccaagactgtcccctcagaccagtacagggctcccctgttggtcccctgtgccgtgttgtgcgtgtggagggcctgtctatagaggatggacaggctgtgatctgtctcctacccctggccccagcaggaatgctgcaaggactgtggtgactctgggctcatgggagtgctctcctgggagtagtggggaggggaagagtggtttagggggagcatccgataggaccaggtagccactgagcatgcctgtctggtgggcatagcctctgtgcctggtggggtccagccctgtatgtggacttcctgggggaccgcctgcatgctgggaaagtcctgcaactgtgggctctgggccggacccctcctccttggggagcgttgctgtggtctccgcagcctgttggtgtggtctga

SEQ ID NO: 28793 - DNA, 2300 bp, Homo sapien
cggagcgctcgccgcattgtttgcttcgctggggagcgagcgagcgacccggccctggagtccgagccagccccgcgtcccgcgcccgccgcccgccgcccgctcccgcgcccgcgcccgcgcccgccggccgggccccccgagccgggcctccagctgggccccgagcccgagcccgcgccgcgcgagccgctgcccgagagtccgcggccgccgctgccgggcccggagccgccgcggccgagaggggcccgcgcccaggagcggcggcggggcccggcctgcgcggccgttggcggaggagccgcgggcgccattagcaccgcctcggccgcgccggcccccgcgcccgcccgcttgccgggctcccgcggccgcggcgccccgaaggtgagtgggcgggggcctggccggggaggcctccccgccgcctcgcgggccgcccggccgccgccgccgcctcggcccggcctctcggggttgtggtgccgacgccatgtttggcggcggcggcggcggcggcggctccgcattgtctgcgggccgggagcccgggatgccggggaggccgggcggggagaccggggaggtcgggccgggcggccggggagacgggcgggaagacggggaggccgggcggggagaccgggtaggtcaggccggggagtcgagggaggccgagtcgggctgtgggtctcggcggcctgggccgcgggcgcctgcccggagtccgcgctcgagtcgggtcgggcctcgggcagccgccgagccggccgggccgccccttatgtaacagacaggcccgccgagctctgccaagacgggaactccctgtgagcagggacgcgccccgagatcgcccaggagccgcgcggcctgcggcggccgggcttgggaaccggcaccgcggcctccccgggcgtttgcagggagacgcctcgcgacgaacgcgaggcttccccgggccttttaaaacgagtgacacgattgaggcgcagttcacgggaaacgcggctcttgtgagcggacgcgggagttctgagaatccgtagcagcgggaccccctgccccgcggggtgcggccccgtctccccagaaagcgcggccgcccgtgtctgtttttgagggtctgtcgccaggtggttgtgtagttagtggaatcggcggatgtttttgtttggccggcccagcgccgtcccgagtgctgtgtgctgcacacaacttcgcacagctcagcggccgcggcccctgtggccttgaccgagaggcccggcgcgtggccggcttctccctgggcgggcggtgggaagatggaagcggccgtcttgtgggcagccttccccgcctgtggcccgcagggctcttcgatgtacttaagggaattattccttgagaagctacgtgtgtgcccccgcggatccctcccagtggaaatgcttgtcccagtggaagggccagggacagaaccggcccaggggggaagcggtgaagcagaggaggtcgtgggtcgccctgccctgctgagggcctactttccccgggtcccagttgcatgttgagggtatggagctgctgtggccgtgaagccttcggttcagttctccccttgtagaaagtgttgcgatgaagagcttcacggctccctgggagagagtgggtttccaggggctgcttgtcgttagggcgactcaggactttgctgtcgaggggaaaatgacaggttcgtttctgatctggtgagtaaccaactgttgcttctgccccacctcagtaatgacgcgtgtcggcgtcccgggtgcactagggtcgctctctgcaggctgtggtgtcacctctgcagggctcacggggccggctggggggtggctgtgctgacagctccccaggaatccagggttgagtgggtacctggaggccctggagatgcagggggtctgaggtttggccgaccacattttctctcctattcctttctgtaggtaattgcaatctagtttcaacatacaatgaggatttctgtctgatacagagaaagatacccagtgtctggagggtctgtcttaagaagtgctcttgaagtctgctgggatttcctttcgggactcacagagggaagcctgctccctgagggctttttctcaggcccaatagatcagggtaaggctgctgtgggtgcccctgatccccctgggccccgaggccaggcgtccctgacgtggcagggctagatgcagagtatgccttgggcttcagctgagaatatttgttttgcgagtcagtcactgaaaaatcattttgct

SEQ ID NO: 28794 - DNA, 2300 bp, Homo sapien
aggccttcctgagtatccctgtgacatgcctacgttcgaggctttgttcttcactcctctgagcatcacctgcattgtctgagaggccactgtccccgtctcctcttctgtgaagggtttcgtgtcttttcatcttctctttcatgagactgtgtcttacttttgctctgtgttgtggagaacctccagcttggtttccatctggcttccctgaggtggaggagagaagcgttcgggctcagcttgcttgtttggccacaggtaaacagacatctgtagaatggaggtgacacgaagctcctgggtctggtgcagaagaggtcagggccccagtggcctgtaccccctaagctcaagggtgtgtctgcagggagtcctagatcaggactgaccactggggccttggctggggtcctacctgcccttgagtcgtcacgtcacaacccacacactgggtgccatgggcatgaggactggccaggaaaaggcctgtggggcctggcccctatcagggacacttgggcgaacaaggccaccccactcccaataaggtgtttggtgcagtgccccgagcagtggggccgctcggctgcccccgtggggacggtctgtcccagggtggacagctgctcttcctgaggggcctgcctggatgccacaggctgtgctgctggaacccagggattccacagcaccatcgtcctgatcacaaattctcaaggaaaccaaggagctcctgcctcaccttaaaacatttgggatttaatcttggagtgaaaattgttatgaccccactgaattttagagtttacacaaaaggccaaagtgaaggcagagactcaggcctctcaactcccacccgcaggggccttttcttgcaaccttaaagggcatctgcttcacgccggcctcggcagggccctcacactggcaggactacttgcacaccgggcctgacactcactaggggaggctccccagcccggctgcaccacccacctctacctagtcgcgtgtcccggccagtgccctttccactcccacccagtgcccccgcagggccccctctgtcctcttagggacctccactcccggaccaatagcctcctgcctcagggccccccactcatgggccaatcgccccctgcctcaggcctccccccactcgtgggccaatcgccccctgcctcaggcccccaccaactcgtgggccaatcgccccctgcctcagggccccccattcctgggccaatggccttctgcctcagggactcccactctcagctggtcccccccgcctcagggacccccactcctggccgttcccccgtcagggcccccgactggcggctgctcccccatcctgcctcggggccccccactcccgggccaatgtccttctgcctcaggtacccccactcccggcccgtccccccgcctgtgggccccccactccaggccggtggtagcccctgcctcagagccgcccactcctgggccatctcctgcctcagcgaccccactcctgggccaatgcccttctgcctcagggacccccactcccagccggtacccccctgcttcaaagcccccgactcccggctgctccccacctgcctcggggccccccactcctaggcctacgtccccctgcctcagggcccctcattctccatcctcctgaccccctcagggaccttctggcccggtcctccctaactcaagggcccccactctccatcctcccgaccccccactcccagcccggtccccgccgcctcagggccccctttggcccccgctcctcgcggcgccccctcccccgcgcgcggccgaggcagcggagtccgcgcgtcatggcggcggcgggcggggcgcgtctcgcacgcagcgcgccgggcggagcgctcgccgcattgtttgcttcgctggggagcgagcgagcgacccggccctggagtccgagccagccccgcgtcccgcgcccgccgcccgccgcccgctcccgcgcccgcgcccgcgcccgccggccgggccccccgagccgggcctccagctgggccccgagcccgagcccgcgccgcgcgagccgctgcccgagagtccgcggccgccgctgccgggcccggagccgccgcggccgagaggggcccgcgcccaggagcggcggcggggcccggcctgcgcggccgttggcggaggagccgcgggcgccattagcaccgcctcggccgcgccggcccccgcgcccgcccgcttgccgggctcccgcggccgcggcgccccgaaggtgagtgggc

SEQ ID NO: 28795 - DNA, 2300 bp, Homo sapien
caaagtgctgggattataggtgtgagccaccacgcctggcctagatttttaaaaatagtcccacaggtccctgaggctatgttccatcagtttttttcagtctattttccatctttttttcagattgggttacttctattgttctgtcttccagctcatggattctttcctctgtcatattcatgctgctattgagcccattcagtgagttttttagtttggtttattgtacttttcgacactacaatttccatctggttcttttttcttttcttttctttctttatttctgagacagagtctctctctgttacccaggctggggtacagcggtgcgatcatgactcactgcagcctcagcctcccaggctcaagcgattctgttgcctcagccgcctaccctcattccccacaccccgatttcattaaaaaaaaaaaaccaaaaactttttttctctatttttcagttgtttcaagatagtttgtaaatgcttgttgaagcatttttgtgagggctgctttacaatcattttcggataatccgatacctgatttatctcggtgttggcatcgttatttgtcttttcttagtcaagttatgagtctcccggctcctggtgtgatgcatgattgtggaatcgtcatctggacagtttgtatatcagcagcagactctgaatcctacttaaacctgctatttcagcaggcagtcaccctgttgaggtgcagcacatcctggcctacttttgtgggttgtggttcctacaagaattgagtttatctactagatctgctatttaggcgtctacgtaattaggctgctgctgccggtggggatagaggcgcctctccaggcttctccgagctgttaggtggggagtgggcggacctggtgccagcaagttccggctccgcctctgcagattcccctatgggagggctgtggggcttcccccagctactggggaggcgtggggagaggcgaggggaggagaggaggccctaggcctggacccccttgcaccactttgggtcaggagatactgggcctggactgccttccactgccgggcggggatgggaggctccaggcggccgcgctttttccagtccgcggtccccaccggccggttcccctcttccccccacttcgaggcctgcaattgtctgctgtactggctcccagtgctgaaaggtgtgtgtagctggaggagcacggagagatgagtccgttccatctcctcttgagctagaagtctctggttttacttttaatttttatttctgtacttttttttttttttttgagatggcgtctcgctctgtcgcccaggctggagggcagtggcgcgatctcggctcactgcaagctccgcctcccgcgttcacgccattctcctgcctcagcttcccgagtagctgggactacaggcgcccgccaccacgcccggctaatttttttctattttttttttagtagagacggggtttcaccgtgttagccaggatggtctcgatctcctgacctcgtgatccgcccgcctcggcctcccaaagtgctgggattacaggcgtgagccaccgcgcccggcctatttatgtaattatttattctatggattttaaaatagcctcattgataaagaattcacagacataccatgcagtttactgtatacttaaaatggacaggccaggtgcagtggcccctgcctataatctcagcactttgggaggctgaggagagcgaagtgcttgagtccaggagtttgagaccagcctgggcaacaaagcgagaccctgtctctacaaaaaaattaaaaaaaaaaaaaaaaaaacaacttagccgggtgtggtggtgcgcatccttagtcccagctactcaggaggctgatatgggaggatcccttgagcccaggagttcaaggttgcagtgagctgtgattacagcagctgtgatttactccagcctgggtaccagagcaagtccccgtctcaaaaacaagttcaatgaaatgtttctagtgtattcacagggctgtgcggtcctaaccatagtcagttttagaacctgttcatcatccccaaaagaaacctcatacccgttagcactcactccgtttcccctccctgagaccccggcaacctatttgcttattctgggcatttcatgtaaacggaatcattacaatatgtgatcttttgtggctgcgtcatgttttcaagggttcttcatgatgcagcacatgtcaatacttggtttttactgccaaattatatgccatctatgtatatgccag

SEQ ID NO: 28796 - DNA, 2300 bp, Homo sapien
gtgtcagagcccggagaggggatgaggagagcgcagtgttacttcctagagcatggccccggagagcctcccactatgctgacatatgggcagccgtctgggagcttgacactggcagaggggaagagcagtccaggcagacaagaagtcagtgcgaagaccccaaagcaagcatcaaggaggctgggggctgctgcagatctgatgaggggatggcaggggcagagcaggcctgagaacactggcctccactctgaatgaaacagggatccccaggccgggcacggtggctcatgcctgtaatcccagcactttgggaggccaaggcgggcggatcacaagatcaggagatcgagaccatcctggtcaacatggtgaaaccccatctctactaaaaatacataaattagctgggcgtggtggcgagcgcctgtagtctcagctactctggaggctgaggcaggagaatcgcttgaacccgggaggcggaggttgcagtgagccgagatcacgctaccgcactccagcctggggacagagcgagactctgtctcagaaagaaaaaaaaaagaaaaagaaagaaacagggagccctttttgggtgtcagtgcctggtctcaactccatagctatggtggaaggtaaagcagtttaccttttaactacatgaacaagcatggtggtgttccagttgaactccttaggaaaccgacattttaatttaatttttttttggagacggagtcttgctctgtcacccagactggagtgcagtggcgcgatctcggctcactgcaacctctgcctcccgggttcaagcgattcttctgcctcagtctcccgagtatctgggattacaggagcccaccaccacgtctggctaattttttattttttttcagtagagacggggtttctccatgttggccaggctggtctcgaactcctgatctcaggtgatccacccgcctcggcctcccaaagtgcagggattacaggcgtgagccaccgtgcccggccgatatttgaatgtcatatacttttcatatatgctaaaatactgttttaattctcccccaacctcttaaaaacgagaaaagcattcttagctcaggcaccatagaaaacccggctgcaggctggacgtggactttggaacagtcggcgtgcgggtgaaggggcacagccgcggggcaggggcgggctccgggcagaggcggccgtgataactccacgctcccgctccagccggtgaccgccacgcgggctcctctcactctcacactcaggccgagaaaatgccgaaagccgtgtcaccaacgggggacctcggggccacattcagcatgcagagtttatttggtctgctcaaacatttgtgttaggaaataacacattaaaagtgcacatttccttcagaccctgagaagcgggcgagtcccgtgcgctccgcaccgccagccccggccccgcgctcgcccagagggccgccctcctcccgccgacccggcttggggcttaggcgttaatcccgtcccccgggggggccgcgcggggagccccgatcgccttagggtcaacggcttaggtcccagcccacgaggcctgaccgcaccgcactgagcggcctctgcgccaggtaagggggttcggggcgggaccgggaaccgcgctgctagccgtcccggaaacccgcggtgggccgttgggtgcgcgccgagccgctgccaactgccaagccacgggacgaaaccaaggcgcccgcgccccgcccagccagagcgcctaagcccttcccgtcgcccgccagcgccggagcgcccactgcgcctgcgtagtttgccctcctggacccgggggcggagccgaagcgcgcattgcgcctgcgtcttccgcccgaccccgccccagcggccgggcctccggcgctccgtcctcccgcccggccagggacgaggcggggcgggtacgcggacactgcgcctgcgagagtaggccccgcccccgatcggccccgcccccggccagccccgccccgcgccgcgcggggccctgggaggggcgcagcgtccggcggcgtcgcgggcggcgggcggcggggccgcgggaggggcgcgggggcagacaaagccgcggtaatgaatggagcgtccgcccgcgccgccgtcgtccgcagccggccgggagccgccccagaggccgggccgaggtgagtgcgcgggcgccgccgccccgccgcctgccgcgagccccgtcccccgcggaccgcgccggggccgggccgggccgcgccattgtct

SEQ ID NO: 28797 - DNA, 2300 bp, Homo sapien
tactccagcttgggtgacagagcaagaccctgtctctaaaacaaaacaagccaaagtgcaaaagagcctacaaagaatgctccgtctaggaaagaggggaatatatgtgtaatgtttatctttacaaaattaaacacatgggagataaaccaggagacaattatgctcattaccaaaaagcgaggaggaggtacaggagggagtggctccctgcatctgtcttcaggggcagttttgacatctagaaggatggtcacactctacaaacctaacaggatgggggtgtggggtatggtgggaggcacaagactgaaagcaaacgggaaggatgaacccagctgtatttccaacgaaggcaccactacactgacggtggagaagccgacccaaggaactcatgagcacagtgcttgacggcacccgcagttgtgggcagggagtgaactgcacacaatcccgacctcttcatggtgggtttgtttttgcaatcctgtggcaaagctgcactggagctctcgagcaggcgtgcactggactccctagcagatgcgtgaggatgctgctgttgctgggggccagggtcctcagggtggagatggggggtgggggagaaccgtgcaaggtgggacggaatccaggcacggttctgtgctgtttcagatctgtacacacatattacatatgtacgtgtgcaactgcacgcagcatgcctgtcctccctagcctgtccacagaaagggcctaaagctcaggcaccccgtggcatcgagcacacctcgtgtctagatcccggtctctaacgctgttccccaccaaagggagccaagacccacagagcaatggccgaggccagaggcccaagaggacgccctgccatgcctggtcatgaggaggtgctcgaaggagaggcacggcacacaggcagagcatggcagggttcccgccagcaaatctcgtacactttgaacaccaggataattaaagacaggagtgactcacagaccactgaagtcgggaggcaatccacatgtggccagcgataaaagagaacaaacgagcgtggataaccagtgaatacctgagacacacaggtggatggatgggggagggagcccatgtctgtgggatgctggggccaggaagcctgctctccagccctcaccatctggcctctgtgggagtcaggaagtgtctgcacagatgttcgccagacgcaatgggaaaaccaggaggcatcaggtggagaggcagccccagggcacctgggcaacagccacaagctctcaaagagcacaggaagaaatcatgtctttatgcacacgtgtgtgcatgtgtggtatgtatgcatggtgtgtgcacgtgtgcattgtgtgcatgattgcattgtgtggtgtgtatgcatggtgtgtgcacgtgtgcattgtgtgtgcacgattgcattgtgtggtgtgtatgcatggtgtgtgcacctgtgcattgtgtgtgtgcatgcgtggtgggtatgtatggtgtgtgcacgtgtgatcatgcatgtatggtgtgtatgcatggtgtgcgcatctgtgcattgtgtgtggatgcatgtgtggtgtgtatgcatggtgtgcacgtgcattgtgcatgcgtggtgtatgcatggtaatgtgcacgtgtgcactgtgtgtggtatgtatgcatggtgtgtgcacgtgtgcactgtgtgtatgcatggtgtgtgcacgtgtgcactgtgtgtggtgtgtattcatggtgtgtgcacgtgtgcactgtgtgtatgcatggtaatgtgcacgcatgcactgtgtgtatgcacggtaatgtgcacgtgtgcactgtgtgtggtgtgtatgcatggtgtgtgcacgtgtgcactgtgtatgcatggtaatgtgcacgcgtgcactgtgtgtatgcatggtaacgtacacgtgtgcactgtgtgtggtgtgcatgcatggtgtgtgcacgtgtgcactgtgtatgcatggtaatgtgcacgtgtgcactgtgtgtggtgtgtatgcatggtgtgtgcacgtgtgcactgtgtgtggtgtgtatgcatggtgtgtgcacatgtgcactgtgtggtgtgtatgcatggtgtgtgcacgtgtgcactgtgtatgcatggtgtgtgcatgtgtgcactgtatgcatagtgtgcacgtgtgcactgtgtgtggatgcatggtaatgtgcacgtgtgcactgtgtgtggtgtgtatgcatggtgtgtgcacgtgtgcacggtgtgtggtgtgtatgcatggtgtgtgcacatgtgcactgtgtatgca

SEQ ID NO: 28798 - DNA, 2300 bp, Homo sapien
gaagcaagccggatgtgttggctcacgcctgtaattccagctactcaggagttcaagaccaacctgggctacagagccagaccccatctccacaaaaataatcccagctactcaggaagctgacatggggggtactgcttgaggcccggagttcaagaccaacttgggctacatcatgagaccccatttctacaaaaataaaaaataaaacggaacggggagcatctacgtgccaagatgtgggaggtgcacacagcaagtgctgcttggcagtcccccacaaccccactccacacctctccacccaggggagttccccagcaaggaagagttcagctgtggggtgaaaacattacgtgctgactctgacactcctggcgggcccccagcacctcctcggacccaacaaggtgtgccttctgctgatgaccagcacagctcactttcgagggcatgagaagaccaagggtgagtctggattctctgccaggagcacgggaagaccaagtcaacaccagcaagcacgaaaaccacgacgaaccccccaccaggcgagggtgaacggacactgtcctgcactagcccactctgctgggcagctgggcagcagctgtggctaatctaagtgacgggtgcttcgagagcacccacaggttaaaacgggcccaggccatgacactttaaaatggtggtttacagaacaatggcatctcagattagggaatgacctgcaaagaccctcttgtccccatcaatccagattttaaggcctctaccgaaattgatcaaatcaggctaagcatggtggctcacgcctgtaaccctagcactttgggaggctgaggcaggcagatcgcttgaggtcaggacttcgagaccagcctggccaacatggtgaaaccccgtctctactaaaaatacaaaaattagccggacctggtggtgggtgcctgtaatcccaacttaggaggctgaggcagcagaatcacaggaacctggaaggcggagcttgcagtgagctgagatcgcgccactgcactccagcctgggcgacaaagtgagactccgtctcaaaaaaacagaaaagaaactggtcaaatcagatgttactttttttttttttaaatgtgcagtgttatctgcactccttccttccacaggcaggagttctctgaaatccagacgctgcacgttttatttcccctaatttaaaccaggggttcctgaacatgagcgagtgttcatcacctcaagcgcctgtagaaatgcagatccccagcccccagagaccctaagtggaccccagatccccagcccccaggtgaaaaacccatcccccaggtgggaggtccggccccaggtgaggagcccggccccaggtgagaggtccagccccaggtgagaggtcgggcccccggatgagaggtccggcccccgggtgagaggtctggcccccaggtgacaggtccagccccaggtgaggagcccggccccaagtgaggggtgcagccccaggtaaggagcacggggctgtgacgcgtggacatgcgcggtgaggcctcaggaatccagcgccagcgccagctcgggtcgcgccctcgcccgcctcctccctggtctcgccgcgcgcccgcctgaaggccccggtcgcggcagcgcgcactgacctccgcagctcccggcggcgtccttcgaagcgcggctgcctgggccagcctcggcaggaagcaggacggcggaaacagaacagagcccgaatctaaagtccttgcccaaatctaaagtggctaccgcagccccggccgctacggccgcagagaccctctgtgccctgagtaaagatggccgccgcgggctgcgcgcgaggggcggggagcgggaggcggggtcggacctgcacgccccgcccccggactcctggcggccgctgatccggggccttcccattggtcacctctcgtggcgaactcggattgggccatatcaggccggggcgggtcccatcaaccaatagcggcgcggggctggcgggtggggcggggcctcgccggcgccgtcaagtagcctgggggacaggccggcgcggctgggagcgggtgggcggccgggaggccggagcagcacggccgcaggacctggagctccggctgcgtcttcccgcagcgctacccgccatgcgcctgccgcgccgggccgcgctggggctcctgccgcttctgctgctgctgccgcccgcgccggaggccgccaagaagccgacgccctgccaccggtgccgggggctggtggacaagtttaac

SEQ ID NO: 28799 - DNA, 2300 bp, Homo sapien
gacagactctcaggtgagtggactcagctgtgaacaacctgagtctgtgaacccctgaattaacagcacagctgggaagacatactcagagttttacgctaaagcatgaggttagtggtgaggctgcagccagacggtgcgaagtgctccaagctgtgttggggatgggggaggcagccatccggcagggtcccagaccctacagaaagctgatgcaccccaggtcccctctgtgcttttacctcccaagaatcatgagaagaagaggggaagtgacgtaggagatgggatttccctgaggagaaacgcaccgagacagtcgggaccgtaggttcctggagagcagcacactttcagtgtcttcacacaaaaccactcgaataagtcaggatattcgctcttcctgaggatggaggaaaacattcactgaatcccagcagacacggttctttaaaacaaacatgcagctgaacgtaacatatgctctggagtattgtaaggtccaggaaacaagagtctaggtgtggacagaatcttctccttaatttcctggttttgatcgctgactctggtgataaaaaacggtaatgcaggggtaaggtgggtgcgaggcaggtgggagctccctactgttcctgtacctttctaagtctgaggttatttcaaattctaagttggaaaataaaaagtatcttctaagaggttttaaggcactcacagctgcagccaccaggcctccaggtgctcctcctgcgcctctagcatctgattgcattcgaagtcgctgctctcgcacagcccctccaggatctccagcaggcgaatctcgctgaaacacaggcccacaccggcccaccgtcagcgcctccaaggcagtgaagaaaaatccgaaccaatacgccaacctgggtgcaggggccggggagccaggactccgggcacagagaataaggggaccccactgtcaggggaagccaggagcggttcccacaagtggggctggtgttccagtttacattttgaaaagccactgtctgttgagggggtagggaccagagcagaagctggaaggccagagaggggccagccattagtcctcagggagaagccgaggtgactcggacgggtgactggtgcctcgggggctgttctgtctccctgtcattaacacaggcaccaaaggcaggacacgacttcccaggacagcgccaggccaagacccacaggggtgctccagggcacccacctggactcgtacttggacagcgtcttttcctcccaagccgtgttcccgccgccaaagttcttctttgcggtgtccaccatcccctgcgaggagacagtgcccatagtgcttggtaccacctgacccgggtccagggtgggggcgagcccaggtcgagggtgaggggactccaggcccacggtggcgtcgaccctggttccacggtgggggtggatccgggtcaagggtgagggggactccaggaccacggtggagggactctggatcgacggtgagggggatcccgaatccagggtgagggggaccccggatccagggtgagggcgaccctgggcccaaggtggggcgaccccggatgcagggtgagggggaccccgggcccaaggttgacgaccccgcccggccccttcccacctggttaaacttgtccaccagcccccggcaccggtggcagggcgtcggcttcttggcggcctccggcgcgggcggcagcagcagcagaagcggcaggagccccagcgcggcccggcgcggcaggcgcatggcgggtagcgctgcgggaagacgcagccggagctccaggtcctgcggccgtgctgctccggcctcccggccgcccacccgctcccagccgcgccggcctgtcccccaggctacttgacggcgccggcgaggccccgccccacccgccagccccgcgccgctattggttgatgggacccgccccggcctgatatggcccaatccgagttcgccacgagaggtgaccaatgggaaggccccggatcagcggccgccaggagtccgggggcggggcgtgcaggtccgaccccgcctcccgctccccgcccctcgcgcgcagcccgcggcggccatctttactcagggcacagagggtctctgcggccgtagcggccggggctgcggtagccactttagatttgggcaaggactttagattcgggctctgttctgtttccgccgtcctgcttcctgccgaggctggcccaggcagccgcgcttcgaaggacgccgccgggagctgcggaggtca

SEQ ID NO: 28800 - DNA, 2300 bp, Homo sapien
ctttagtatcatcttaggggacagctgtgctatgcagggtcccttgttgacctaaacgtcatcatgcagcacgtggccatagtgaagcccaggagcctgtggcttgctccactcaggcgatccaccgccagccctgcagacccaggaaatcagtttccccaaacacccactccaagccttcaggctcatgtacgtcctcagaatcgtacagggtttgggtgccatgcgttctctccgtgtgagaacaccgcaccggtcaccaccaggtgtgctctgagcatggttttgtgtcccctaaagcatgccagggcggatcccagaggccctgcagcgggaatggccactgcagcggagatgggagcagacagggcgacgggtcctgccggtgccacatggggtaccagggcccgctgtgcactgactgcatggacggctacttcagctcgctccggaacgagacccacagcatctgcacaggtacgggctacgcctgggctggccccggggttgaggcgggatgacaagagccccttgctggagctgcctgcctagatgggaacaggggcctgttgatctttaaccccagatgtccaaggaagcttcgagggcccagaaggatgaatgaaaacatcagaggatagaggcagaggttgtcgggcacttcctgtcccgtaacagccctcagaagggagaagctactcacctttctctctagttcaaggtccaccccgaccttgagttgtgatgggccatgcagtgcacaggtcctggaggtgccgtgtgggccccgcaccggcccagagagcagcatctgtcaaatccctgcaggccgttatgagtggcatctttccaaaggacgttttctccctggttgtcactgatatgtaggaaaactctgagtgtctcggacgtgagtgtgtggttggccggcagcccctaggctattctgggcagacagacccgtggatcgatagtcaggaccggcctctccgattcttacgcccctcagcagtcaggaccggcctctccgattcttacccgccttgctgtctgtctcttggatgttggcgtggcgtgggccacgcatggatccgtggccggaacacgcacacccagccaggctacagctccagagtatggatagctgccttctctccaggttattaaaaattccttggagtcctggtttgctgagaattttaaattcatgggcactgaaaatcccgtgttgcttttccctcttaaattcctcacttttaaacgagccttgtccccaagctggtacctgagagtggggtttgtacccaggcccgcctttgccttccagcctgtgacgagtcctgcaagacgtgctcgggcctgaccaacagagactgcggcgagtgtgaagtgggctgggtgctggacgagggcgcctgtgtgggtgaggagcggcccgggggtggaggagggcgcctgcgtgaggcgtggggggtgtgagatgggggcgtaaggcgtggggggtgtgaggcatgggggcgggaggcaggggggcgtgaagtgtgggggcgtgaggtgggggcgtgaggtgtggggcttggggtgtggggggcgtgaggtgtgggggagcatgaggtggggcgtgaggtgtgggggcgtgaggtgggggcgtgaggtgtgggggcactcactgtctcactctcacacaatgtgtcgccatcctcatggggcgcctgccccggttggcactgagtgtctaaggacagggcctggccatcgcctcatcccctcccctgccgcgtggggcctccgaggatggcatttgagatgattcctcctcaggggctgccctcctccctgcccttccccagccggccctggccacgggctgtgtcaggccatgatcggtccttccccgctccctggccgggctgtcctgggccgctcacagctgtgccgctctgttccagatgtggacgagtgtgcggccgagccgcctccctgcagcgctgcgcagttctgtaagaacgccaacggctcctacacgtgcgaaggtgggccaggcgggcgggtctgcactccggggcctgccgggtttcgttgctgcctttgtcaacattcatttatggcttcttagtgtcacttccatacatcctgcctgccctgagaacacttagtgtggcaaagtaagtcataggtatttgctgcaggaaaatcagaaaattcaagtcagatgaaaagaaaacagttaaaaacccaggaactccctggagagcgcaccctgctggtgcctccactgctcgtgcccccccagcgccccc

SEQ ID NO: 28801 - DNA, 2300 bp, Homo sapien
cgtacaacagtaaatcgacaacatacaccagtgtctggacagacgtggttacaaagatgtcacactttagggaaagggctgcctctggccctgccctgccctccactccagggccaggctgctggacccccacgcaggagccctccggaggctttcaccgaggcctgtgtggcaggaatcccatctggaggcctggaggaatctccagcacacctggagtgagcgggaggagggccgtggaggacaggcacaccgtgctttctgaaggagcaagtcctcctggatcttagttaagggacacttgagggtttcagagcaagacccggggcctagggagagccagggtggggtgcctgcccgccagagcctggtcttctacggccaggatgactcagggaagactggcctggagcctgacatgtcagactcaaggaagactagcctgacatgtcaggctgaggaccctcgcccctccagactgacatgaactcaactgtagtggtcaccccctagacctaccgtgctctccagcatctctgcccacctctgctgcgtgtccagcacagaagagggcagccccactggaccctcaggtaggtccccgggaggacccacatgggcagcagcccctcctccttcgcaggtgctgtgtggatactgctggaggggaaggcttggggtgtcatcctaccagggatctgatctcgggggagccctgtgctgggtgcgtggtgggtgggggaaggctaacccaccagccccaaccctgccctcgtactgcgggagagaactggacagagctctgggaagcagcggctggagggggaggggcctggggacaaacaatgtcgcgttggctttgatcctcaggacccaagggacaggaagagatgagctaggcaagagaggagcccccaggagcacaggcatgggcccaggcagcgggcgacgaagcgagccccagagggcgcccagatggcaggtgggcctgggccagtcccgagagccacagcctcagaagagctgaacaggggagtggtgtgtgagtggtcagcgcagggacagcgatggtgactgtatagagatgagaggtcagacttaggggaggctggaagctccgaggcaagtgtgtgtgcgcgctgacggtcacaccagaccgcccggggatgtctgccacaatatttagacccctgagggccactgagaacgcctggcagtgccaagaggaccagcccctgggccctctggcccccaactctcaacccactagccctggggctggcgggtggccactcacgtcctggaaccctgagctgctctcaggccggtgactttggaccaatgttggcaatctgtgggtttgcaccaaaccacacaggtgagtcagacttctgtacagagagcagggaaggggcacgacagggtgaagtccagaccagggcaatgtgtaccccggctgttcagcctttgagtgcggctgtcgcagcaatcaaggtgggctccctggtggaggtggacagcagctgctggagagcccggagggcagccaggaccgtgtcagacggcaggagtcgggcggggccactccaggcaccggccagcagggcagaggtaccagggagggccctcgggctgcgggcgtgaggtcagagcccagggtgaggaggaagcatctccagccaggtgcgctctcggcccccgccggggctgcgaggctgggggcgctgccgctgcgagggcttccagaggagccggcgctacctccccgcgcgcccggccacgtgcgcgacgggatgcgcagacagccggggacgcagactggcggcgtgtgtcacctcgaggccgcgggacaagcgcaggtcgcctcccgcactcccacacccccaggaaccctgctcggggccggcgggtgaccttcctaggcactgctgggggcggagccaggaaacggctcgccccgccattggctggggcgccggatttctttaaaaactccggcttccattggctcgtgcagtccctcctcgttctgcccgaggcgccacggccgccacccgcgcgggcactgcgcctgcgcggagtgagagcgtgagcgcggagagcggaccgacgcgacacgccgtgcgcctccgcggctgcgctacgaaaacgagtcccggagcggccccgcgcccgccgcacccggccctcgcccgcccgaagacaggcgccaagctgccccgccgtctccccagctagcgcccggccgccgccgcctcgcgggccccgggcggaagggggcggggtcccgattcgccccg

SEQ ID NO: 28802 - DNA, 2300 bp, Homo sapien
tggggtgcagggtgcaaccccacccttcctgtagctgatcaggcccgaggtggtcaaggatcaccccagtttctgcccagggcaccccacactggctggagtccacctctcctgtctgtgcatccttgggtgctgagcttcactggggcacccgccccactcggacccctccagagggtctcagcttccccagatcccagccccactcacccagcaacggtcagtcacttcctgtggtctcagaggccacctgcctgggggccacctgctgggatgtgcggttctcagacattccaagtggcacatccaggtcccagccaggggtgcccagcagtggcctgtgcagtgggccatggggtcggcccttgaagacttctcgtgtgggtcacgtaggctctccggcttccccgctgagccaccctctggagcctggacatcgtctcacctgagtgctgtgcaggaccacatgcccagcctgtcccagcggtggtcgcaccccatctgcagatgcactcccaccgcagtctgggcccaggctgccctcttccagctggccgtgggccgctgggccttcttttccctcctgcaacagaggctgctatgtcccatagactggagagggggctgcagagcgagtaagtccccgccactcagtaaacattggtccaggggtagctgttaaaatggagcttgggcctggctggatggtgacggcaccagggacaagtctggagtgcgggtgtcgtggagccatccccaccaggctggacccaagagcaccccaaaggcgtgggaggccgcacccccatgggcatgtggggggcagggagcaccttgggactcaggggaggtgccgggtctctgggagtggatttgaggtcagcgtcacatggtgtgaccagacatccccatccaagtgtccccataaaggaccagtggtggagacaccctggggatgcggaggtcaggccaggtgaggggctttagaagctgggtttgagcaccaggggcagggaggccagtggggggcatggacagggtgtccctccctaacctggagatcaggggcatggggggatgcaggctgccactcgcccaggtgcccttccctaacctggagatcaggggaatggggggatacaggctgccactcacccaggtgcccctccctagcctgggggaggtcaggggcacagtgggggtggggggcacagcacaagctgccactctgctctctccatgtctcctctggagaccccgtccgcccccagccagaaaacaagtgtcccggctcagcagggcagtccccgccccaggttcctgctcctgcctcctggaccagccaggggtgctccctgtggtgcacaaagacccctgctctgacccagggctactccgggaatcctggccaccgtggaggtggggctggggaggattggccagaccagggtcacagagctgagctcctgcctgacgggtgtgggctccctcaagccttccacagatgggggaaactgagtcttttcttctgcagatgggggaaactgagtctttggggactgttaagaggctgtgttcagatctcagctgtcctactgtccctcccagacaagggaggaacctgctggaggacacacgcgtgctgccaccaggcggcagtggctcttagtgctggtgctgagccggatcagccgccccagcacccaacacggagcgcccacagcccagtgcacccaccgcctccttggccagggacgctgccctccctccaccaccaccgccggaaacccacccccacacctgccaggagaaaagtgctgaggaccccgggccccagaaaggggggtgcggtaggggcgggcaggagcacctgtactggggtgcacagccctgctcacatctgggccacagtataacacgggtgagccttggacgcccgcctgcctcattcactcatgacacacagctgagcaggccttgggccctgggccccgacccagcaccgggaacaaacaacactggcaaagatcccgggccctgcagctgggggaccaagtctggggctgcctggcactaaggagggtcttgggtcagagtgtcagtgctgacaccaggacagtcccaggcaaactgggatcatggagctgacctttgcatgagagagacaaccagagccaagtgacataagtaagcgagggggcgtggctggtgccagtgtggggtgaggaatgaggctgggagcacgatggggagtgtggggagctgcaatctgaaatagggtgggtctgggcacggtggct

SEQ ID NO: 28803 - DNA, 2300 bp, Homo sapien
gcgaccgatggtcactgggctgtgtggccgtgctgccctggagacccagacttggaaagaccccacccccaccccaggcctcgcccagctgcggtgggtgatctcggtggccggggcccgcccaggagcccgtggcctggctcttcatggatactgagcagggccaatcccccagccctcagagacagggctggagccctctgacctcaggctggagagggtggccgggggcctggggcagagggcagaggccggccccactgtccttccctgggccttggaaccagcaccagccacaccccgtgggccgtccctacacgagatcaccgactactggccacctgcagcccctgcctgcgtcacggcacgctgggatggcgccttcaggcaacgggtgtgtcgtggtgggggcctgtcccagagaggcctggagagaggtttgggtgtgagtgggcccatgggggagggacatttgtcctttcccaatgatcctgctggccgtgcccatggacatcgtctgggacacccctgccacagtacagcagcccccatcgtcccctggtataaggagggctggaggccaggctgaggggcgaggcccagctggagtatctgtcttacagctcagccagcctgggataggggatgacagtggcccgtcctgagccacccccaaatgtgcctgcctgctgctgaccatgccgtggcatggaggctggcactagccactctctccagggcattgtggccacaggcacgctgctgcagggggcgggctcagccccatctactctgcccagcagtgagtgcataagttccagcccatggagggctctaggccaggcgggggcagggtcgaggtgctggcccaggaggcagggaggtgggcagtgcggggtggtgggagggagggaggacttcacggtcacagcagcccctgccgccttccctcccctgggaccgaaccccagagcttgtttctcaagctccctcctgactacccgagcccacagtgtgaggcccacagcctctcccagcctgggggtggtgccgccctccacacttggggtgtcctgtgggtattccaggcagaacaccccagctagacactcccaggctccccagctattaactcccgccatcccccccccacacacacacagacacacacacacacacacacacacacacacacacacacacacacacacacgtggggcagtgccctcccagaacctgaggcaggtgcagaagcctctgtgcctgtccaggaagggaggagccaggaggacccaagaactgcaccctggttctctccaaccccctgccctggctggaggcaaatgggaagcagtaagcttctgcccagaaactttcctatgcatttgatgctccaaataagaagatgacacagaacggctccctgagcagaggctgggccccagagttcccagcctcggggggtgccctccggagtgggggggggctcatagggaggaccacacaggggaggtggccttttgcatcttgaggggaggtggaggccagggacttgggtggaatctcaggtcttaggagagggctccccttaggggctggggctgaagccaggggctctggggtatgagtgcccaggacagattccacccctctgccagcccagccagctttccagggcccttgtctaccctcctggcctcatgcatgcctgagggaggtgcacgccggcggcagcctatcccgccggcctggagccatctctgcaccagtggccgccctgtggggaaccccattagggtgtcctcggaccccaaaggccccaaggtttctggatgcttcctttggaaacctagaaactccacaagtgtctggccacagtcttctggccccaggcggtggaaagtctcccgggctgctgtctgtgaagcgagccctgttttgccgggagggggagtgtctcgctcgctccagctgtgaagagcagcctccaccctctgtttgtctttggggctggagctgcagggtcagcctggagccgctgccacagggcatcctgcaaacttgccccactcacatccacgcttaccagtgggagctctcactgcacagccagatgctggctgggcaagcactcgcgttcttgggcctgacctggggcactttccagagcctggccatcccccggattacagaatgtggcctctcctgttctcaggtaagctcctgcctcctcctaggcccctacactgtggcagataaggccctggtttctcctcaggtgggtctggcctgacgctctc

SEQ ID NO: 28804 - DNA, 2300 bp, Homo sapien
gacttcttttccctcatagaggaaatcatgtgtgtcactggatgcattagtctgttctcacgctgctataaggacatacccaagactgggtaattttagagtcaagtccttataaaggaaagagctttaattgactcacagttccacagggctgaggaggcctcaggaaacttacaatcatggtggaaggggaagcaaacatgtccttcttcacaaggtggcaggaaggagaagtcttgagcaaaagcggggaaagccccttataaaagaccatcagatctcataagacctcactcattgtcaggagaacagcagcatgggggtaaccacccccatgattcaattacctcccaccgggccccttccacgacatgtaggaattatgggaattacaattcaagatgagatttgagtggggacacagccaaaccatatcactgtataacacactaatttgtttatcctgtgcactcctgtgcccccaatgaatgtaaacagcctataggaaggacgtcacttctttgtccaccccataaatgtttgttgaatgttgaatgatgatgggacatcagcaggcagagggatgaagggcattttaggagcaagaatttgttggaagattgtatgaaagaacagggcctgttctagaaactagtgttgccaacagaaacttgggagcatttctcaagtgatgacttatgatctgggaagctgagggatttgctctgcaacctctggttcagggcagcttgtttgtatttctaagtggagagcaacttttgaaagaaaaaaatgttgaaatccgattaacatttttttccaaacaaaaagaaacacaggaggattcgatccagttggacccactcccactaatcccgtttatcgctttaaaagatagtgaagtttgggaggtttctcaatccattaaaatgagttcttgacttcacagattatagtttttgaaaattatttctcatccttgcttgattgaaatgaagacaacagaacattggctgtggtggctggcacaaaattaactaaccctaaaatactagtatagcttaaactttcgtttattgctaaaaatttatcactgctgtttcctgtgggggtgaggttgagcaaagtgttttgagctgcatttatgcgtacttgacacttacgcattttgatcgaggtgatttagtgggcattttcactgggacagggatgcttgtatgtgtaatcttactaaaagctaataaaaacttactaaaagctaataaaagcttactaaaagcttcttgcttgattgaaacgaagacaacagaacatcccatggtctggaacctgatgactttgctcaagttttaatgtgggttcatggtttaaggagctggtttttcagaaactttagtttgagcctttttacaatgtgcacaaagaacccgttgctgtagttgtcagggtgccagtgtctctgggcgacacacattactgtggtttttctctgcttggtgagcagagataaagggggcagcaggaccgggcccaccagccatccgggctgcccacgcaaaccacagggccgaatccggagccgcccaaggccacacagctaagccgagtgcgtgaatgcttatgtgaccgtgtgaaggaggttcccaccgtgtggctgtgggggatggaaaaaggctacttggaaagatgtagaagaccttcgagtaaacagttacgtttcagaaacagagcctgctcagaatgtgtacttggtgggattctattcttagggacgcttctttcttctgagagacccgagctctgtggcgagtggcacaggcagggccccttcctttcctagttgggttctgacagctccgaggcagtggtttacacaaccaacacgaaacatttctacgatccacccgattcctcccctcattgatattcaggaagcagctctccttcccctgccttcagctcaagtttgctgagcttttgtttcatttgtgaatacttcttgctggaagtccctcacccagagaccagtgctcccaacggcagagcagcgggggaggtaagtgctcagacattaagccgttgagtagaggcatgttttgcaatctctcgtttagctaccaattggagcagtttaacgtgcttgagtccccggcgtgatgtgttcatggacgaagttgccgatggatgttgtcaggtgttgcacctggagggcccagatggatcaatgaggcatttaaagtgtagaatctcaccctgaacccagactattcaggtccgtttttctaggaaagttatttctt

SEQ ID NO: 28805 - DNA, 2300 bp, Homo sapien
tggtggctcatgggctccctgccagggcagctcgcagcgggtgctgtgcctgcagggctgcccctcagctccccagctcgggccactccctgggattctggactcagtagacccggcagatgcccacagacatctcggcctcatcatgtccagaatggaactccagatcctcgctccacacctgctccaccctggtcttctcatctctgtcctcactgctcagacagaactcagcaacgtcgccctgacagcagattgcgtccgctcttcaaaccctgttcagagcccagtccctcctcaccacttgcccactgccacctcaatgccaggcagcacctgctcctcccaccccccagcctgctctccacccagtgagtgaccggatgctgctctgcccagacccctccagcaggtctgtctcagagttgaagcagagtcgtctccatacccacaggtgctggcacctggctgtcctacctgtatcccccttgcatggtcctcgcctgccttccccaacctgtggcctttgcttcaactctgccagcctcccctccctgcctccttctcactgaggcctgccctggcccctgcaaacagcagcccctcatttctctcccctgacttcttttccctcatagaggaaatcatgtgtgtcactggatgcattagtctgttctcacgctgctataaggacatacccaagactgggtaattttagagtcaagtccttataaaggaaagagctttaattgactcacagttccacagggctgaggaggcctcaggaaacttacaatcatggtggaaggggaagcaaacatgtccttcttcacaaggtggcaggaaggagaagtcttgagcaaaagcggggaaagccccttataaaagaccatcagatctcataagacctcactcattgtcaggagaacagcagcatgggggtaaccacccccatgattcaattacctcccaccgggccccttccacgacatgtaggaattatgggaattacaattcaagatgagatttgagtggggacacagccaaaccatatcactgtataacacactaatttgtttatcctgtgcactcctgtgcccccaatgaatgtaaacagcctataggaaggacgtcacttctttgtccaccccataaatgtttgttgaatgttgaatgatgatgggacatcagcaggcagagggatgaagggcattttaggagcaagaatttgttggaagattgtatgaaagaacagggcctgttctagaaactagtgttgccaacagaaacttgggagcatttctcaagtgatgacttatgatctgggaagctgagggatttgctctgcaacctctggttcagggcagcttgtttgtatttctaagtggagagcaacttttgaaagaaaaaaatgttgaaatccgattaacatttttttccaaacaaaaagaaacacaggaggattcgatccagttggacccactcccactaatcccgtttatcgctttaaaagatagtgaagtttgggaggtttctcaatccattaaaatgagttcttgacttcacagattatagtttttgaaaattatttctcatccttgcttgattgaaatgaagacaacagaacattggctgtggtggctggcacaaaattaactaaccctaaaatactagtatagcttaaactttcgtttattgctaaaaatttatcactgctgtttcctgtgggggtgaggttgagcaaagtgttttgagctgcatttatgcgtacttgacacttacgcattttgatcgaggtgatttagtgggcattttcactgggacagggatgcttgtatgtgtaatcttactaaaagctaataaaaacttactaaaagctaataaaagcttactaaaagcttcttgcttgattgaaacgaagacaacagaacatcccatggtctggaacctgatgactttgctcaagttttaatgtgggttcatggtttaaggagctggtttttcagaaactttagtttgagcctttttacaatgtgcacaaagaacccgttgctgtagttgtcagggtgccagtgtctctgggcgacacacattactgtggtttttctctgcttggtgagcagagataaagggggcagcaggaccgggcccaccagccatccgggctgcccacgcaaaccacagggccgaatccggagccgcccaaggccacacagctaagccgagtgcgtgaatgcttatgtgaccgtgtgaaggaggttcccaccgtgtggctgtgggggatggaaaaaggctacttg

SEQ ID NO: 28806 - DNA, 2300 bp, Homo sapien
tggcccgagctggggagctgaggggcagccctgcaggcacagcacccgctgcgagctgccctggcagggagcccatgagccaccagccctcatgcagctcgctcttgtttccaagctaatctcccaccaaccagtaggtccctgggaccctgctggctcctgtatgtgttccagcacccagcccaagacacaggcttagcggggatttgaaatgctagggagtgcgccactctctcccttcccacagcaagaactatcagtacactctgcatccatggacaggcaaggtccaggctgtcatcagactgacagatctgacctaggaaaataaagctatgtcaatcaaaaataagtcggggctgggcgcagtggctcacacctgtaatcccagcactcgggaggccaaggcgggtggatcacctgcgggtcagaagttcgagaccagcctgaccaacatggtaaaaccttgtcgctactaaaaatacaaaaaaaaaaaaaaaaaaaaaaaaaaaaaaaagccagcgtggtggcgcacgcctgtaatcccagctgctctggaggctgaggcaggagaatcacttgaacccgggaggtggaggctacagtgagctaagatcatgccactgcattccagcctgggcgacggagcaggactccatctcaaaaaaaaaaaaaaagaaataataaaaaacagaaaccactggaatagtaaagatatatatacgtattttgtttttgtttttgttttgaggcagagtcttgctctgtctcccaggctggagtgtagtggtgtgatctcagctcactgcaacctccacctcctgggttcaagtgattcttctgcttcagcctcccaagtagttgggattacaggcatgcgccaccatgcctggctaattttttttgtatttttttgtagagacaggattttggcaggttgaccaggctggtctcgaactcctgacctcaagtgatctgctcaccttggcctcgcaaagtgtaaagatatttttaaaatagagaaaaatcaatgaaatcaagggatgattttttttaaaaactcaataaaattgataaatatagactgatcaaggaaaatgagagggatgagataaattacctatgtcaagaatgaaagatggctcatcattatggaccatacagacgttaaaaggataataaggaaatatgctgaacaactttatgccaataatctgacatctaataattggatgaaatggacaaattccttaaaagaattaccaaagtttattcaatattaccttgataacttgaatagccctctagctgatgcagaagtgaatttctcattaaaaaccttcccacaaagaaatctcgaagcccaaatgggttccccagcgaatactaccacaatttttagggaataagttaccccatcctactcccaggtcactgcaggcccggcttaaaccgaccccaaaccagacagacacagaaaacgggaggtcggccacagagcaatctgcttcaccagcaccgtccccaaccttggacaaagcgttaccaagctgagtcaggcaatacaccaaaaggataacgaatcgtgaccaagtgagttttccaaggagagccaaacaatgtaattccctatgggctgaaataaaaagctacaggatcatttgaatacatgcagaaaagcgttgcagaaaatttcacacccactcataagaactcttggaaaaacaggaatagagggaacttcctcaacttgataaaaaacaccaacaaaaaacgactcctaacatcactctgggtggtgaaagcgcacttttccctaatgtgtgggcggcaagaaggcggacccgctcgaagctccgcccacccacgcgaggccccgcccgcccgctcgaagccccgcccacccggcggtcacaccgccttgcgcgctcggcatgacgtcactcccaccaggcacctcgccttgtcaggagctgccaggcgccaaccgccgacctctgaccgctacgggtcccggctcgcgcaacgaccccaaggcgcatgcccaggcgcggcgaccccattggtggcgggcggcgggagcggcgcgggcgcgtgcgggcggcggcagcggcggtgacggcagcctaggccgggcgagggccatgctgagcctcgcagccaagctggtggccttcttctggaggacggcggacacccctagggaggaagccgggcagctggagcccgagctcgcggaaggtggctcgcgggaggcggctgggaggcgggtcccgggccctcgcgtgtcggccacgagg

SEQ ID NO: 28807 - DNA, 2300 bp, Homo sapien
aactcactagggccgctaaggagacagcacagcacggaacccgcactctccttctctttaggctagtaatgcttgaaaaagacctgtttctgcccccacagcatttccccactgaggcctcctgaccacagagtagaagctgctggggtgggtgagccagggaagctggggtgcctgttcctcagctcgtggccccgggtggggcagcccctctgcactctagaaacagatcatgtgccaagcgagctcctgctctccactcagccccacagccttcccgtggcaagagctccgcagcttctcctgtgggggctgagccacgcaccgggcagtcgcatctgacgactcctttctgcaaaatccccaccccgtccatcagcaacgctgtggactctctgcccctgtacctcccttgtcacaccagggcacacagagaaggaagagccaaacaggcacccgccaggaggggctgctctgtagctgggaacctcactgagtttgcagcaggggccagaagtgtggcgagccattctagagaccccatttttttaatggtgcttcggactgggaagtggcatgaggcaggtttaccttctggaaagaggttgtggagaggcagggaggagaatcaagcctgtagcatcagtagaagaaggggaagtaagtgggtccatttttagggaaaggtaaaatctcatcttctcattttctaaagagaaaaacttctcatttcattgttttcaaacacttcaaagcaacaaaactctttccaaagcaagtttagtggagccctaataggcaaggcccatgcttcccccaccaccaccttgggagttggctggagagaagaggactgagaatgccaccctaaccctgcactctgagcaggaggtaggggagtgctggggagcacgttcaggacaccgttctcagactccttgcctgtggctgtcccctgggctgctcccttttctctagactttatgaagtgcatcgttctcttccttagggtttgccatcctccttagaaacctaagtctgtggaagccctgcctgtggtgaggtggtcctctgagtgcccccaccagcagtctatcctcaggagcggaggcaggcgaggaaggggtggtgctgctgcagagggatgtctttctggggctcttttttcagagacgccgcccctgttcatgaggccactcatttctatggaacgattttgctgaagaacaaaggtgatattgaagttacacaggtgacgcattttggaaccctaaaggaaggaagaagtaaaaccatggtgatctggatagagtgagtttgccactgaaacattttctataaagctacattaatggcttttacactatgactcaataatttctgtaaaaccaactttactttggtcatttatttttttctttatgaagatcttttcttttttttttttttttttttttttgagacagcgtcttgctccgtcgcccgggctggagtgcagtggcgcgatctcagctcactgcaagctccgcctcccgggttcacaccattctcctgcctcagcctcccgagtagctgggactacaggcgcccgccaccacgcccggctaattttttgtatttttagtagagacggggtttcaccgtgttagccaggatggtctggagctcctgaccttgtgatttgccgcctcagcctcccaaagtgctgggactacaggcgtgagacaccacgcccggcatgaagatcttttcaaaattttttacccaaaaatgaccttttgacttatattcataagtgtatttgcagtcaccacttcctagattaggttttgtgttttatgataactgaatattttggttttagaaatcctggctgtgttcatagttaattgtatttttccaggaataaaggagacattcctcaaaacttagtcagctgtaaactggctggctgggataaatctaaacaattcagattccaaatgctggataaagaccagatgtgccccgtggtatcttttgtttctgttcctgagaaggagaattcatcagatgaaaatattaattcattaaatagccacacaaaaaacaaaacctctcagatgtcggagagcagtttggtgaacaacagaggaatctctccaggtagtggacgtttcggctgtcactgcgtgaggtcgggtgggctgggggccgtggggttgtgagttctggacagagggcgggcagcaggggccaggacacccggcagctacagtgctttgtgctctgagctcttcggcttcaggcccttctcttgc

SEQ ID NO: 28808 - DNA, 2300 bp, Homo sapien
gcccaggctggagtgcagtggtgtgatcttggctaactgcaacctccgcctcccgggttcaagcaattctcctgcctcagcctcctaagtacctaggattacaggtgtgtgccaccacatccagctaattttgtatttttagtagagacagggtttcaccatgttggtcaggctggtcacgaactcctgatctcaagtgatccacccgcctctgcctcccaaagtgttgagattacaggctttagccactgtgcccagcctgaaatattgcgtttaaaaaagacattgaaaatagctgggcgtggtggcatgcgcctgtaatcccagctactccggaggccgaagcaggagaatcacttgaacctgggaggcagaggttgcagtgagccgagattgcaccattgcactccagcctgggcgacagagcaagagcaagactccctctctaaataaacaaacaaacaaactgaatagaaaatgtacaaagttgttttggggaagggtctgcaggattatgtgttatatttgtggctctagagttgataaaacatggactgaattgataaggaagtatgagatattttgagaaaaaaaccttaaatcatgacttagacgtaactaagaagtggtaccagggcaaggttcccttttggaattctgcttaataattggaggagtaaactaactctacgcctccttgcccccagatagttattgacgccgtcaaaccgtattgcagagacggagaagacatctggaaagcctcacgcttccggataatcatcaccacatgcagcagctcagggctgttttaccaaataggagtgaggtgagccccgggcatggagcgcggcatggggcctcccagggcagaggtcggagtcctctcctagcttctgtctgaggggcggatgacccagagactcagtgctcagggagggaggcagggctgtgggcgagaaaggctggttggggagggccgtgcctgaatggagctggggaagccgagaccccaaggactcgaaggagccagcagtgggatgggcaggcagatggactggcccatgcagaggccccgcggtgggggagcactgaggtctccccaaaggagactgtagagccagagcctcgtgagcaggaacggcctgaaaggggtggtgagggggaggcctggcgggctgtggaggggcctttggacgacctctggtgagccgggaagccagtgaagggcttctgagcaggagagtgagtctcttggagtgggcgtggggaggcaggctgcctaggaaacggctgggctctgtaaggtcagaccctgggggccatttgtgtccctggcgctgggggctcttcaggggagacaggcggaggagatggattgtggggtgccggctgtcataggaggacctcccctgggggctgggaggaagagcttcgagcccagggaggctgagtgaggaccaaggcactctcagaccccagtgcaggggggtggggtcggggaggcagcaggcagctccctctcagtgcatagagccagacagtgtcgggggcacaggctgagggtgagagagggagaagccagggcctctgagggaagccccaccctccctgacggcctggagacaggtcgctctgaacagtgtccagcgtcacagtggtcgtgaccctccctgacagcctggagacaggtcaccctggacagtgtccagcgtcacggtggtcgtgagggtgaccacaggaggtggtccgtcagctccacatggagcaaaggcacagccagccacgcctatcacagcgtgtcacggatggtttcatcggcgcgtttaactctctcacatacatgatgtcctttcatcatgagattagtagaacgtgattgatgagacactttacattttttttggttcaagtcttcaaaatccaccatgtattttacacttagagcatgtcaggtttcagactagccactgtgcggtgcccgagagccgtgtgtggctaccggattggacagcacggatctgaacaagacagggattttttttgttaatgtgtgttgatgagtcaaaggtcaagagccgaagagccagtcctcactggggtgcagagggctctttgggggcagagcgggcactgcatggaccctgcaccctggagctgatgttcaggtagtgggaggaggtggccggccagggcaggccgctctctcagaggcactctgtgcagaagcagggagggtgctgcaggccgctctctcagaggcgctctgtgcagaagcagggagggtgctgcaggccgct

SEQ ID NO: 28809 - DNA, 2300 bp, Homo sapien
aggcgctctgtgcagaagcagggagggtgctgcaggccgctctctcagaggcgctctgtgcagaagcagggagggtgctgcaggccgctctctcagaggcgctctgtgcagaagcagggagggtgctgcaggccgctctctcagaggcgctctgtgcagaagcagggagggtgctgcaggccgctctctcagaggcgctctgtgcagaagcagggagggtgctgcaggccgctctctcagaggcgctctgtgcagaagcagggagggtgctgcaggccgctctctcagaggcgctctgtgcagaagcagggagggtgctgcagcccagctgcagaggccccacagcgttagttggccactgggggcggctggagtggggaggggcacttcaaagggcaaagaagtagcaatgtcatctggcaaaagtgacattaaataactgcaattaatacagaattgaaacctaaatacttacattctaggaaagatacataatgttaatttttttcaacagaaatagggacatgagatggggaaatggcagtttgctgatttccacatctttcactgggaggggttcacggtgtcacttgtgaaatccgtgtcttgagagttacacattgatacctgaagtgaaaggtgtcagctgaccgtgagtggatgcaggacatgttgggcccagcactgctgtaagcaggagcccgcccccgcacaggtctgaccacagggtctcaccccacagtgggacacctgaggctcagaggtgatggatttgcccagcatctagggttggagaggggagatcctggaatcagcagtgagaagggtaaacgtgggctcggcagtgaggacggtgcgggcccaaggtgcgtcctgttgagtgttggcgtggctccggacactctctctgccccatacctgcttcctcaggcatcaggacatgtttctgccccaagagcatttccccactgaggcctcctgaccacagagcagaagctgctggggtgggcgagccagggaagccggggcacctgttcctcagctcatggccccaggtggggtggcccctctgcactctagaaacagatcatgtgccgagcgagctcctgctctccgctcagtcccacagccttcccatgcaagagttccgcagcttctcctgacgactccttcccgcaaaatccccaccccgtccatcagcaacgctgtggactctctgctcctgcacctcccttacctcccttgtcacacggagaaggaagagccggacaggtacccgccaggagggctgctctgtagctgggaacctcactgagtttgcagcaggggccagaattgtggggagccattctagagaccgcattttctttttttcttttttttttttttttatgagatggagtcttgctctgtcacccaagctggagtgcagtggcgcgatctcagctcactgcaagctccgcctcccaggttcacgccattctcctgcctcagcttcccgagtagctgggactacaggcgcccgccaccacacccggctaatttttttgtattttgagtagagacggggtttcaccgtgttagccaggatggtcttgatctcctgacctcgtgatccacccatctcggcctcccaaagtgctggcattacaggcgtgagccactgcgcccgaccaaccccattttcttaatggtgccgcagattgggaagtggctcccagggcctcagcctattggcatgcaggccaggcagtgcccagctgagagtggctcacaaggatgagtcaggaggaaatgagcggatggcaggagaggctgccatctgtggccgcctgcatggccaggcctgttctcagcgctttacagcggccagttcagctgctctcacctcagccacctcccgagagacacgtgggaggtggaggctcagagaggggaagtcaggactagagcctgggcattttgataatgacaggagtgagacgcaggtggagagcaggccaggagcctgcggcgcttctcctgtgagctgcccccaggaggcgctcgtgtgttgcccatcgctcccaccccttcttccctccacatctctagaaatacagacgctgcgtgcaaagcactgggtgctgatgtggcttagcatctcctgacacctgtggcctgtcctccctccagccgggtgacacccagacccccagctcctgcacacccctgggcaaccctgctgtgcccccggggtgctgagcgtggctttgccagtgtgtcagaggcatcaattgctaaaacaattcggcagaaat

SEQ ID NO: 28810 - DNA, 2300 bp, Homo sapien
actgggttatctggggtgaatagattatgtgaggggtgcccgggttatttggggtgattggtttatctggcagtgactgggttatctggggtgaataggttatgtgaggggtgcccgggttatttgggaggtgactggtttatctggcagtgactgggttatctggggtgaatagattatgtgaggggtgcctgggttatttggggtgattggtttatctggcagtgactgggttatctggggtgaataggttatgtgagaggtgactgggttatttgggaggtgactggtttatctggcagtgactgggttatctggtaggggtgactgttatcggggggtgagttggtttatctggggtgcctgggttgtcagggtgactgggttatctgccagggctgatttatctggaggtgcctgggttatttggggtgactgggtttatctggggtgactgggtggttgggtgctgggattggatgtagctgaactgcctgcctcaggatgaagtttgctggaagtcaggggctggcatccctcagaaaacatgcaaggatctttaaaaacgcagacggcgtgaaagctcaaagcagacacatcccctacgcagcccagggaggcagggggacctcctggtttgctcacagcagtggccgggcctgtgaacacgggctcaaaatacatttttggaatgaattattgaatgaacttaaaactccaatcacactaaatcttttatatgaaagatcgtgcacgttcgtcctggtatagtgggaaggggacctgcacgagggaaaacggctgcctcgaagaggcagggaccacgcgggatgcgcccgcgtctgaagccagacccccggctccccgagggagaacaggacggagggcggggctgtggggagcggagggaatgaaggtcagggaggcggcggggaccccctgagctggcacaggccccgggaacgtctgtggaacaggggacgggatggggcgtgggggaaggaggtgcgggctgcaggagcgggggtgatggggtcactcacggcggcgggactgggggtactgggtgggggggtcgggtggggccggggctgcagtggagggtgtggggcggggagatgccctcattgcccgcgcactggcgcccgagcccagagaagagagcgccggcttccccgccagtggccgcagcaccccaggagcgcgggaacctccggacccacagcggggcgcggccggggcaggtggggggcccaggcgaggaagccccctctgcgccctgggctgggcgaagggccctgcgatgcgacgggggcagccccagcgcgcgcccagtcctcacgtcgccaccgagcggcgcccccgccccagcccggagccccgcagggccgcccccacccctgcccaccctcccgcgggccggggcagccccccgccagccaccccgcgttcccaggaagagggaccggtcattactcattcatgtcctttcatttcatttcaatattttctgcaaagtcatcgcccgcgccgcatctgcgtggcggggggcggggtggggcggagccacgccgcggagtcgccgcaggtaaacagccccctccccgcggcgggagcggggccgccggccccaggcagggacagcagccgccgcccgcgctccgggccgggatcccgccgccgcccccgccggaggcacgcgccagggcgggggccgggctgcggcggaggcgggcggctccggtgccccccgccgccgccccggcccggcccgcccgccccctgaccccgggggcggcggcggagcgccccccaaaccccgctgcgggctccgcgcccggccagccccgcacccgccgcgcgcctccggctactcccatcccccggagccccccgctcggtcccggcgtcccctgccaccctctcccgcggcccgcggccccgtccccgtcccgcgcccccacgctccccgatccccgcccccgcgccgcgcgtcccctcccgcccgcgcccccctcgccgggccccgccccgcgccccccgccccgcccgcgccccccgccgggccgcgccccccgccccccatgcaccacctcctggagcagtcggcggacatggcgaccgcgctgctggcgggagagaagctgcgggagctgatcctgccgggcgcgcaggacgacaaggcgggcgcgctggccgcgctgcttctgcagctgaagctggagctgccgttcgaccgggtggtcaccatcggcaccgtgctggtgcccatcctgctggtcaccctggtcttcaccaag

SEQ ID NO: 28811 - DNA, 2300 bp, Homo sapien
cccctgtggggcatcaacagtgaatgctgctcttcccagagtggacagagtctctaatccgcctcgctttccgtccctaattcaggcctcggcacagacggacaggcctgtccctgttgcttctggtctgtggggaggggattgtgctgatgtgggccctgccctggggctgctctttggggctgggagacaaggctgaggctggtgtgggcctccgcgcctgtgctgtgtgaagggctcagcctgaagagactgcacggtggctggaggcccccaggctctgagccttcctgggaaacgttagcaagatcccagccgctcagaccccacactgggccaaggcgcgaatgtcctgaacactttcactgccgttcgtgtcattgtcacctgcaggcagagacagactcttgagggaaaacacagagttcagtaacgaccatttgcctgcagttcaagggactccctcttttcaattttagcggcagataccgcagtccagctggtgacatccccaaccagccccacctggtgtctggtgtccccaggctggccagtccccagaacagtgggtcttagggaggcgcccctcaccctcaagggtgggcagagcccaccctgccttcccggtgctgtggaaaccaccctgccagctagcagcacctgagccaaccgccttcctcccaggggagcccgggctgtacacggcctgtggctgggacctggtttgggtccggctgtgtgtggatagaagaaggaccctggctgggagtcctggcctgccttggccctctctgggatttggtttccccttgtgcacacagggctttgtgacatttggagaggcgcatggctcaggtggtttcgcaggcggtcatggcttccacctgcaggtgccccgcagctgacctcgtgggggtagtcagggcgggacccccacaccaccgtggtggggggagggggtggggttcatctgggcaaccgcaggtgctgtgtgggaggaggctggagaggctcctgggaggggttcggcagggacgcggtcaggtccagcccggtttcttcagcccagcccgtgcgcctccccgccccagcccgtgtctcctctttgcccccagaggaacccatttactgttacaccccgcacaacttcacgcgcgaccaggcgctgtacgcccgcggctactgctggacggagctgcgggacgcgctgcccggcgtggacgccagcctgtggccgtcgctgtttgagcacaagttcctgccctacgcgctgctggccttcgccgccatcatgtacgtgcccgcgctgggctgggagttcctggcctccacgcgcctcacctccgagctcaacttcctgctgcaggagatcgacaactgttaccaccgggcggccgagggccgcgcgcccaagatcgagaagcagatccagtccaagggcccgggcatcacggagcgcgagaagcgcgagatcatcgagaacgcggagaaggagaagagcccggagcagaacctgttcgagaagtacctggagcgccgcggccgcagcaacttcctggccaagctgtacctggcgcggcacgtgctgatcctgctgctgagcgccgtgcccatctcctacctgtgcacctactacgccacgcagaagcagaacgagttcacctgcgcgctgggcgcgtccccggacggggcggcaggtgcggggcccgcggtgcgcgtgagctgcaagctcccgtccgtgcaactgcagcgcatcatcgcgggcgtggacatcgtgctgctgtgcgtcatgaacctcatcatcctcgtcaacctcatccacctcttcatcttccgcaagagcaacttcatcttcgacaagctgcacaaggtgggcatcaagacgcgccggcagtggcgccgctcgcagttctgcgacatcaacatcctggccatgttctgcaacgagaaccgcgaccacatcaagtcgctcaaccggctggacttcatcaccaacgagagcgacctcatgtacgacaacgtggtccggcagctgctggcggcgctggcgcagtccaaccacgacgccacccccacggtgcgcgactcgggggtgcagaccgtggaccccagcgccaaccccgccgagcccgacggcgccgccgagccgcccgtggtcaagcggccgcgcaagaagatgaagtggatccccaccagcaacccgcttccgcagcccttcaaggagccgctggccatcatgcgcgtggagaacagcaaggcggagaagccgaagcccgcgcgcaggaagacggccacggaca

SEQ ID NO: 28812 - DNA, 2300 bp, Homo sapien
ggaggaccttgcacccatcccagatggccaagactgagaacccaggcctccagcccccaggccagggatcttccctccacaccagcccagcactgagaaatgggtgaggtggagccggggcgactgccacccgctgccctcctgtgaggatgtggccgagatggtcggaaaggcagaatgaccacaaaggcagcgaacaatgagaatcaatggagaggatgtgaaccagaggccctagggcccaaagtgagtgtccttcaccaaggaggacagaggcctctctaaggccaggcctggccatttggggaccaggaagctgtaggagggggcggggcctcttgtgtaagaatgctcagtgggcagccagcccagcctgctgccgtgtggacaggcattttcacccatccgccccaccccgggaggaccacctgcagactcaggaccagggacctgaggggacccctgcaggccacccgagccggggcagctcctcagaacctggggctggggccggggcctcccttcctggagcctggaaggaagcaggctccccagcacggagtcctggtggacggcctcaggcagacccagaccaagcctgggcgctgcgttggactcccccaaccccaggcctgctgggtcagccttccaggctcgctgaaggttcctgcgtggggcagccctcactgaggtcctccccgtggctccagagaggagctagtcctagggcactcgagtagagaggtgcgccctcctccctcttctaaatggttccccagctggccccacctggcccctttccccaactaactcatcagtgcctggcaggaagacacagcagccctcccccggtgactggagtcctggccccagggcaggccccgctccaagaacctgatcctttggctggggcagggccgtagaggtgggcgcagagcttcggggagctggctgtggggtccgcgcatgcagcccgcaggcaaaccattgccaggcccacgcctgcactaagcccagcgccagcgccaggtcagccaagaacccggggtcgtggaggaggaaggaagtcgtgggcccgggatgcgcggccggaccattgcaggagagcggggcaggcggacggcgcagcagcttgcgggcagcgagtcgtctgcatgcggcggcgaagcgcccgggcccccgtccgcgccggtgcccgcagcgcgcagcaacttggccgccgggtcccggccgccccggtagaggctgggtacagcgagggggccgggcgcccgggcaggacgggcgcggcgggtggggcctggccgtctccccctgccctcggggccgaacacgcacagcgagagtctagcgtcggcgtggctgcggccagccgggtccccctggaggcctccggacgatcggaagtgactgagcgtccgggtccgtgaggccgggggtcggcccgccctaagactcccacctggtcccggttctccgtccgctaggctggccgcggggcccctggggcccgaccttcccggggtgccccaacctgcggcaaggccgaggtcccgctgaggcatgagtcccgggtcggggaccgctctgggccgacccccggaggacggactaggccgatccccagagggaagggggccaggccgaggccatggcagcgcgttccctgatcccgtgttctcggctcctcgcgtcccactatcggctgtccctttcgtgcgggactgacggctcacagaacagttacatttcaatatcattcgactgaaaaccatcctgtggacgccgtgcgagcattgtccccatttcacagcttgggagctgcgaccagagaacgtgggcgcgcctcgcaaggccgtgaccgcggcgggactcgaaccctccctcctgagtgcgcgccgatgttccttaggacccgggagcgccgggggggggggggggggcgggggccccgcgcgctaccccctgggaagtgtagtccgaagttgcgggccggggccaagcaggaggcgcgtgggactacacttcccggcatgccacgcggccgccggcgccctcggcccgtccgccccgccccgccccgcggccccagcccgccccgtccgttgagggcccgcgccgcatggaggccggctgaggagcgccgctgcctcgcctcggtacgccgcgcggcgcggacggcgcgtgcgtgaggacggggcccagcaccgagcggggggcgggcccgggtcagggccgcggggtgactgtggggggcggggggagcgagcccgagtcggggggtgggggccgggggcggg

SEQ ID NO: 28813 - DNA, 2300 bp, Homo sapien
ctggttgccatgcagcctcctggcttgtagacgggcccccgcggcgtccttacccgggggagcaagagctgcgtggcgtctcttccaggagtactaaccccgtcatgggggctatgcactcatgacctcatccgaacctgatcacctcctggaggccctgccttctaataccttcatagtgggagttagggctctaacctgtgggttttgggggacacagttcagtctgtagcagtgggacctgagcaggcaggtgggatgcgctgtctgaggctcccactggatgtcaggtcctgggacagaagccctgcgggacatttcggatgcagacagccgtctctgacgccaaaggactgtagatgccgctctgattttgtgtcctagggccgcacacctcaggcagagccctaacggatgggcttttgcgcacaacagatgtcctcctggggctgttgggaattctcagaggcttcgtctgcacagaggatcatggtttccaaagccagatatccctttttacagatgagggacagtgcttggagaacaagtgtcttcagaggcagtgtctagggtctcctgaaatcgggctgctaagtcttttcttgccctgtgggtctccaccccgttctctgccttcgggacagactgtgctgcggcagagaagctcgaggccgaggctgaccgctaaagcagcatctgaatgtggcttgtgcttgcagcccagagagggcctcctgtgtggggcaggtgggatgctggccctggaggcaggttcccgccttaaacggcggctcctgcccagagcatcctgcccagggtagcactggggtctgagatctgaggaccctgtctgccggctacccatgctcaggaggcatgtcccacaaatcgtgttcagcacccaccccagtcctgctcggtggacgtccgtgcggggcagggagagtgaagcacagctggtctgatacaagcgtctggcttcctgccaggctgcaccgcttcccagcgggttggccttgcaggtaacaaggccagaagccactgcgaggttccctggggcagtgccagcactggggatttgggaaggagagatgtctgtccccccggaggggcagccagggtctgctggtctctgctgatgggcctgagcgtatctgaaaaggacaggtagaaagggggtggctgcagcgtgcgctggccggaccccaggtgatgctctgctgggacccagagggggtggctgcagtgtgtgctggccggaccccaggtgatgctctgctgggacccagagggggtggctgcagtgtgtgctggccggaccccaggtgatgctctgctgggacccagaggttgtggggctgggaaccaggtgggggttcttcagacattgtctctgaagacacttcagagtccaggctcagcatctgtggcttttgggccagggccttttgctcaccgccaggcagctgggagaggctctgggcccagccataaatgtctgagagcacagctgcctgggagcagactagagggaggagggctggtaacctgaaatcacaccctagagctctccaggggccttggcgaggagggaaagagagtgttgagactgtaagagtgactgtcagagacgtcccccagaatcacgggctttaggtgctggggggtcctcagtgaccttcccgcctggctccctgcgggcagcacgcctctgctgagaggctgcaggggccagggctgggggctggcactgcctctggtggcgctgacatcgtcctgctcaaggcttggcagccggcccaggaaagcttctctgccctccctgacaggagacctgtgcacgcccaccccatggcacgactggggtcaggaccagcgcctgctgctgcaccgagaccctgccctgtccatggccacaggcgtaccctaggccggcctcagaggcgggtctggccaggctgggtggagggtgggggctgaccgcagacctggggctgccacacccatgggggaagggctgtggcgacgtgggcgcctcctgttggctgggccgacgcagcctcccgcccggctgcacaggagtttctttaaggagtttccccggtgtgcctcggcagccttgcgctgctctaatggtccggacttccgtgtgtgagtttcccccgtgcgccccggcagtcttgcgctgctcctaagagttctggcttgtgtgtgtagctagacccagggaggcggccgtctcccggaccgggtgcttgtctgggctggctggcctggcggctgctcacaacagcttccgg

SEQ ID NO: 28814 - DNA, 2300 bp, Homo sapien
ctcactgtgccttcctgtgctccggccacaggagcgtcggcccaggggcggctcctgggggctccagggcaggcgagactgggaaaggcccagccctggagctccagccgaccccaccgtgcccctggcatcctggccctggccgccacctccctggcaccgtctgcctgcagggattctgtgtttttggcttttttaatgtcttaaaatcttttactcaggtaattttaatttcagagagaaaaactgaagtaaatgtcaaaaaacaccagccttaaatccaaagggagagaattcgtgttcttgggtctgtcccgagtgggctcgcgtgcagccaaacatcagctctgggtccaggcgtggcctcagctgggagcctgtgtcctgagcccccggagcgaaggggtgcctggggcatcttggccctctctgggcagacaatgtgtgcacctatgtggaaggccaaggacatgggctgtggccaggcctgtcccgctcaggccccctgcccggcggccgtctgtgtgcggggcctccctcctggctgtccaggacacagcccgtgcagccccagcctggacccaggccatctctggttgtgtctgtgccgactcggtgttgaatcaaatcaggtgtgcgtcaggagccggctgtgtccttcctgccacactcggggattcattccttagaaactgaaataaattctaattttggaaactcctgttttgtgacgtgtgaacatggggttcaggtaatgaaggatccctgcctcttcccccgtgctccagtgcagcgggtactcgtggccctgccggggccctgggggaaggaacctgcctggtttccagcagaagagacagagtcgggtccctccatgctgacctgtgggacccttctcacccaccaggtgggacgcaggtggcctgctgacactcaagaccctccatacccagtcccaccagattccagagtgtggaccagactgagccagactggggccccagggggtcgaggagacagatcaggagggcccagggcctggggaatggggaggggtaacacctgccaaggaggatgctgggaacgggcgcccagagcggccggggggagggggctgctgaagagggaacggttgctgtgggctgcagaggagggttgggcacggggacctcaccacattatccctcatccagttacctgcccaacgcacgcggagggtcctgagggcttcacccgcagccccaaaggggcagagctggggtcacgcagagtctcggaagcccacgctgtggccccaggagaagcttctggatgtagctcctgtatgtgaagggtgggctcgcgccgctgccggaataaagggaaaccacaggcaggagggaggcgcgtccaggatccgcggccaccggcctctcagacagtcctctggggccggggccggaggagatggaaagcgggggcaccacagactcatctgaacccccgcgttcattcggacacacagaccccaaattcctcccccaggggtcgggtccctcaagccagccgaagaccccggtgcccgcccagccctccgggagggtctgcgcctgcggcctcgcggggcctctccgagcccgggcgctgttccatgggcggggcacagatccaaggccccttccctcctagacggcaggcgaggggcccgagaggccggaggccaggggacaaggtccccgagaggcggcgcgaggctccggcggcccagaaccgcggcggggtccgggtggggtcccggccgcccgtggggcgcggggctaagccccggcccgacccgaacggacgcgggcctcggtccccgctgccggcgccggtgcagccgaggaaatccggggctgcccgagcggggtcgtcgctggcggtctcggaggcgttcccatctgtcaccccgttcgcatcagcgcgcgccccgtgacgccgacagccaccccggacgcctccgaccctccggccgggagatgcggatagacggacgaggcagccaattagagcccggccagacaccgcgacccctccccccacccgccccactctcgcccactggcgattgggttgcgggacgcgcggggcggggcttccgggcggggcaggctggcttccggcgggagcggggccgcggatggccgtatacagggcagcgctcggggcttcgctcgcggctgcccgactcttgcccctcggtcgctgttccccgtcgccggcgccccgctctacgttgtcgggcgccgccatggagcccgcgcctcgctggctggcggggc

SEQ ID NO: 28815 - DNA, 2300 bp, Homo sapien
cggcggccgtctgtgtgcggggcctccctcctggctgtccaggacacagcccgtgcagccccagcctggacccaggccatctctggttgtgtctgtgccgactcggtgttgaatcaaatcaggtgtgcgtcaggagccggctgtgtccttcctgccacactcggggattcattccttagaaactgaaataaattctaattttggaaactcctgttttgtgacgtgtgaacatggggttcaggtaatgaaggatccctgcctcttcccccgtgctccagtgcagcgggtactcgtggccctgccggggccctgggggaaggaacctgcctggtttccagcagaagagacagagtcgggtccctccatgctgacctgtgggacccttctcacccaccaggtgggacgcaggtggcctgctgacactcaagaccctccatacccagtcccaccagattccagagtgtggaccagactgagccagactggggccccagggggtcgaggagacagatcaggagggcccagggcctggggaatggggaggggtaacacctgccaaggaggatgctgggaacgggcgcccagagcggccggggggagggggctgctgaagagggaacggttgctgtgggctgcagaggagggttgggcacggggacctcaccacattatccctcatccagttacctgcccaacgcacgcggagggtcctgagggcttcacccgcagccccaaaggggcagagctggggtcacgcagagtctcggaagcccacgctgtggccccaggagaagcttctggatgtagctcctgtatgtgaagggtgggctcgcgccgctgccggaataaagggaaaccacaggcaggagggaggcgcgtccaggatccgcggccaccggcctctcagacagtcctctggggccggggccggaggagatggaaagcgggggcaccacagactcatctgaacccccgcgttcattcggacacacagaccccaaattcctcccccaggggtcgggtccctcaagccagccgaagaccccggtgcccgcccagccctccgggagggtctgcgcctgcggcctcgcggggcctctccgagcccgggcgctgttccatgggcggggcacagatccaaggccccttccctcctagacggcaggcgaggggcccgagaggccggaggccaggggacaaggtccccgagaggcggcgcgaggctccggcggcccagaaccgcggcggggtccgggtggggtcccggccgcccgtggggcgcggggctaagccccggcccgacccgaacggacgcgggcctcggtccccgctgccggcgccggtgcagccgaggaaatccggggctgcccgagcggggtcgtcgctggcggtctcggaggcgttcccatctgtcaccccgttcgcatcagcgcgcgccccgtgacgccgacagccaccccggacgcctccgaccctccggccgggagatgcggatagacggacgaggcagccaattagagcccggccagacaccgcgacccctccccccacccgccccactctcgcccactggcgattgggttgcgggacgcgcggggcggggcttccgggcggggcaggctggcttccggcgggagcggggccgcggatggccgtatacagggcagcgctcggggcttcgctcgcggctgcccgactcttgcccctcggtcgctgttccccgtcgccggcgccccgctctacgttgtcgggcgccgccatggagcccgcgcctcgctggctggcggggctgcgcttcgacaaccgcgccctgcgcgccctgcccgtggaggcgccgccgcccggtcccgagggcgccccgtccgcgccgcggcccgtgcccggggcctgcttcacccgcgtgcagcccaccccgctgcggcagccgcgcctcgtggcgctgtcagagcccgcgctggcgttgctgggcctgggcgcgccgcccgcgcgcgaggccgaggccgaggccgcgctgttcttcagcggcaacgcgctcctgccgggcgccgagcccgccgcgcactgctactgcggccaccaattcggccagttcgccgggcagctgggcgacggcgccgccatgtacctgggcgaggtgtgcacggcgaccggcgagcgctgggagctgcagctcaagggcgccgggcccacgcccttctccaggtgggccggggcgggcgaggggcgcgggtgggtcctccccgccggggcgccccttccctccgcccggcgcggtgttgggggcgtccggcggctactgc

SEQ ID NO: 28816 - DNA, 2300 bp, Homo sapien
gttggtcgggcacagtggctcacgcctgtaatcccagcactttgggaggctgaggtgggcggatcatttgaggtcaggagtttgagaccagcctggccaacatggtgaaaccccagctctacaaaaaatacaaaaattagccgggcatggtggagcgtgcctgtgatcccagctacctgggaggctgaggcaggagaatcacttgaacccaggaggcggaggttgcagtgagccgagatcacgccactgtccctgggtgacagagtgagaccctgtctcaaaaaaaaaaaaaaatcgtaagttaaaaagtgttgcggctgtggagaaattggaacccttctgcactgttggtgggaatgtaaaatgatagagttgctgtggaaaacagtgtggaagttcctcaaataattaaatcaccacatgattcagcagttctgcttctgggtatatccccaagagcaggatctcaagatttgtataccgatattcatggccaaaaggcagaacaagtgtctatcagcaggtgaatggattaaatgtgatgtgtacatacagtggaatattattcatccttaagaaagaagatgctgatatgctacaacacggatgaacctggaggacgtggtgcagtgaaataagctggtcacagagagacaaatcctgggtgatcccacttacatgaggtacctagagagccacattcatagagacaaagtagaatggtgggtcccaggggctggagggagtagaggaatcgggagccagtgttcgatggggacaaagtttcagtttctgggtcccaggggctggagggagtagaggaatcgggagccagtgttcgatggggacaaagtttcagtttcacaagacagatttctggacatggatgggggtgatggttgtgcaacattatgaacgtatttaatagcactgatctgtacacttataaatggctaagatgggccgggcgcagtggctcatgcctgtaatcctagcacttttgggaggccaaggtgagaggatcgcttgagcccaggagttcaagactagcgtgggcaacataaaccccgtctttacaaaaagtaagacaagaattagcagagcttggcggcattgcctgtagtcccatctgcttggcaggctgaggcgagagggtggtgctgcagtgagccaggtttgtgccactgcactccaggccaagtgacagagtgagaccctgtctttaaaaaacaaaaaaagtggcttaagatggtaaatttattttatgtgtattttaccacagtgaaaataattgaagaaaaagggggcagtcatctggccctcagatctcacatccccttccccatgcctgtccgattccctggcctcggcagttctgcaggacatgaggccgaggccggggacccgaagacctgtggggaagggaatgcgagacctgggggtcagaagtggctgagtggcctgaggccagcgctgtcggagcctcgggcgggttttgcggggcgggcagctggcttctctgccctgcctcctcccactgtgggtgtgggggccccggcaggcacagaggagctcattcctcagctggcccgtaccggggcacccatcctggtgcaaaggctgttgtgtcccatggggcagggctgccccaggccctttgtccccactgtgcagtcacacagtcctggcttctgctgcggaaccctcgttctgggcaggaagacgggctgctgcgtgtgttcaggcccatttttaccagaggctgtgccgacaacctgctgggctgtgaggttgctggaactgggcggtgttggaggctcacaaggcacctgatgtcacctgggacgggcggttttcagggacgtgcaagctgctcacgttacacgcgttccctcctttccatgtgctgcccggaatcctggtgttgggtgacctcctgaccggcccacgtagtgaactctgtgtttggtttcagacaggccgacggtcgcaaggtcctacggtcaagcatccgggagtttctatgcagcgaagccatgttccacctgggagtccccaccacacgggccggcgcctgcgtcacgtccgagtccacggtggtgcgcgacgtgttctatgatggtaatcccaaatatgaacaatgcacggttgtgttgcgtgtagcttccactttcataaggtaatgccgggggcctttcggcctgtctacacgcacttgcttagagtcctaggagatttgggcctgtgctgctaggattctggtagaaacaaacccagatgaccgccttggcctcttctga

SEQ ID NO: 28817 - DNA, 2300 bp, Homo sapien
aaacctgctgcccccaggcactggcccgtgatgcttgagggggagccgagggggctgggggctgatgtaggaagtagagagtccagggcaatcccggaggccttggccaggggctggtgagacaggacccctgtgggacagggccagagagccacggccacttgggaccttcccctgggcctcccctccagggtggctgcaccatctcccgggaacttcctctcaggcagggcgtggctctcttgccccgtgtggcaggtacgaccccgaccacgtgtgcaatgcctccgacaacaccggccgctacgcgtacagcaagcagcccgaggtgtgcaggtggaacctgcggaagctggccgaggccctgcagccggaactgcccctggagctgggggaggccatcctggccgaggagtttgacgccgagttccaaaggcactacctgcagaagatgcgcaggaagctgggcctcgtgcaggtggagctggaggaagacggggcgctggtgtccaagctcctggagaccatgcatctgaccggtgagtgacccagccgtgcccacagcaaggcgcctcccgtgctgttgtgcttagagatggtttaccttctggcttccaggttccaagtgcacagtcactccctgggcccaccccagccctggcacccccattctactctctgtctttatgaatttggtgaatctaggacctgctgcgagtggagtcatacggtgcttgttctgtagtgactgcttatttcacttagcataaggtcctcaatgttcacccaggtccgtatcaggattttattccatttgaaggctgagaagcatcccgttgtgtggacaggccgcagtttgcttatccacgacatactggcgtacgtgttcctcttctggctgttgcgtacggtgcactgtgtgttgtgtgccgtgctgccatgaaagcgaatgcagagatctctgactccctgctttcagttccgtggggtgtacaggtggtaggattgctgggtcgtgtgggtgactcactgggttgcactagctaggacgtgtatgttgaacagaaggagctgagatgggcattcttttcttgttcctgaccttcggggaaaagtgttcagtgtttcacccattgagtgtgatgttagctgtgggcttttaccatgctgaagttttctttcagaatgcttttaccatgaaaagctattgcattttatcaaatgctttttcctgcaatgaagatggtcatgtggttttattatttcattcatatctccttgcattctggggataaattttacttggtccttttaatatgctatatgattattatttttaatattttttgagacggagtttcactcttgttgcccaggctggagtgcagtggcacgatcttggctcactgcaacctccacctcctgggttcaagtgattctcctgcctcagtctctcaagtagctgggattacaggcacccgccaccacacccggctaattttgtatttttagtagagacagggtttcgccgtgttggtcaggctggtcttgaactcccgacctcaggtgatctgcccacctcagccgcccaaagtactgggattataggcgtgagccaccgcacccagccatatgctgtataattattttaatatgctgaatgttgcgagtattttgaggatttttgcatctgtatgcgtaagggatactagcttagagttctgctttttctttagtgtctgtttggctttgatgtcaaggtggtgctggcctcagagtgagttaggaggtatgcgcacatcttccatttttttccttcaaagtttgagaaggattgccatttgttcgtaagagtatttggtagaaatcaccagtgaagccatctggtcctgggcttttctttgttggaaaaattttgattactgatcagtctccttgcttgccttacctcaatttagattttcttttcttcttgagtcagttttggtaatttatgtttccaggaattttctgtgtcaggtagtttgtccatgtcttgtaggtaattttggcatataattgttcgtagcagttttttacaatttcattgtggtaggaacacaacatggatctatcctcttaaattgtggagggcaccgcacatcacagctgacgcaggagcagtgctgtacagccgagccctggagcttgttcacatccgccacccaaaccctgtgtgagccggttaccagctccccattcccctccctgcagcccctggtagcaaccactccgctccgagtctgtgaacctgactgctc

SEQ ID NO: 28818 - DNA, 2300 bp, Homo sapien
cacaggagtacgactttagtactgtcctgaggccagctgtggccacctcacctgcaccagggcccctgcaggctgcagagtgcagcttgggcagctcagggctacagctgtgggaggacagttgtgggaagatggatgcctgtggctccgcctcgcgggagactctgctcccctcacacccacccaggcgtgctgctctggaggaggggagcagccagcccacagagcggctctttgggcaggtgtcagggggtggtcttcccacaggggactacgcttctgaaatagctcccacccggccacggtggaacacccacgggcacgtgtctgacgccagcatcagggtcggggagaatgtgtcagatgtggctcccacccagccacggtggaacacccacggacacgtatccaatgccagcatcagcttaggggagtctgtgtcagatgtggctcccactcggccacggtggaacatccatggacatgtgtccaacgccagcatcagggtcggggagaatgtgtcagatgtggctcccaccaggccacggtggaatacccacgggcacgtgtccaacgccagcatcagggttggggagaacgtgtcggacgtggctcccacccggccacggtggaacacccatggacacgtgtccgatgccagcatcagcttgggggagtctgtgtcagacatggctcccgcccggccacggtggaacacccatggacacgtgtctgatgccagcatcagcttgggggagtctgtgtcagacatggctcccacccggccacggtggaacacccacggacatgtgtctgacaccagcatcagggttggggagaacgtatcggacgtggctcccatccggtcacggtgcaacacccatggacacgtgtccgacgccagcatcagcttgggggagcctgtgtcggatgtggtttccacccggccacggtggaacacccatgtacccatccctccgccccacatggtgctgggggctctctcaccagaagctgagcccaacacacccaggccccaacagagcccccctggccacacgtcccagtcagcgctcagcctgggagcacagagcactgtgctggactgtgggccacggctgcctgtagaagtggggccatctctgtcctcccccagctcgggctgcggggaggggagcatcagcgtgggggagaacgtgtcagacgtggctcccacccaaccatggtggcccaacaccccgggagacagtgtctctgaagaactaggtcagagtagggtggctggtggtcaggagtgggactgtgggacgcacagagcctgggaggtaggcgggcagtggggttggtggcatgtgaagttcccctcaggcctccttgtcagccaggacctgggctgctgtgggggacatgggaggggctgcttgagccagggccggctcggctctgtacccgccacaggcactcggccctgatgccctcgtgtccacttgtgtccacacaggccctgggaggagcggggacactgaggacctctctccaaattggcctctcaactcacaggttaggtggatgcagcctgggggtcccacagcaggcagggagggctctgtccctctaggttgtcacgcgggtgggtcccacatgcgattttcctttttttggcacaagctggttgtggggacagcgtgcagtggggaggtggttctgaggctggtgttttgttaggaagacacagctgcccagagcagcccaggccgtggtgaggaggcggaggcatcggcggcggaggctcagggtggggagcaggcctacctggcaggcctggcagggcagtaccacttggagcggtacccggacagttacgagtccatgtgtgagtgcagcagttgctgttggcagggagccctgggctggctggttcccagcacgtgctccacctcctgtgggttggggcggagccctgggctagccagttcccagcacgtgctccatctcctgtggatgggggcggagccctgggctggccggttcccagcacgtgcgtgctccatctcccgcagccgagccgcccattgctcatcttttgcgccccgtgcttccccgggccttcgccttccccgtggacccccaggtccagtctgccgctgatgagactgctgtgcagctgagcgagttgctgacgctgcccgtgctcatgaagcgctccatcacggcaccgctggccgcccagtgagtgcccctgcccctgcgccagtctgcccacccagcccgtcctggcccgccctgactccagctccctc

SEQ ID NO: 28819 - DNA, 2300 bp, Homo sapien
cagaggcaccgactggagagtgcacggcttcgttttctcttagaagatgagaaacacattcaggtatgtctgcggcttcagatggcagctcttcccctgggctttgggggtctggaaaccccctgagactgcacacaaacctacatgctcttctaggagagggctggtggctttcgcgtttgcggcagagcactctctctccccgtgtgccaccaaattgcacagatacaggtggtgaggagctcgtggttttggagtactttttgcaggcccagcgtcccactggagcccagcacaagccttgtctggttcagtgcacatggctgccatgggcggtaggggctgtggctttgtgtggggtagggctgtgcttgactccggcttggccagtcacccctctggcttgaatttcaggagatgctgaaagcagtgtctgaggctcaccagccccaggagccgccagacgtcctcttgagcgtgcacccccaggtaagcggcagagtggaacccagggtgccctatggttttcccatagccctcggcacctggtgttggtcatggctgcagagctgaacttgggggacagttcgagggctggggggtcctgagaccagactgggtctgatgtcacctgtgtttcaggtcacgtctccgggccctgagcacccagagggaggccaaggctgtgattctgggtctgcagagcaacactcgcctgcctgggatggctggaacaggccaggcctgctgaccccacagccccttaagcctctagcagtgggggctggtggcagggggctgcagcaggcggagggggccagacccttctctgacagcctcagcattggagacttcctacctgtgggcccaggggctgagccgtccgtgcagactggcatggtccctctcctggaggtggcgctgcagaccattaacttggacctgcccccctcagctcctggggaggcacccgcagcagccagcactcagccctccaggccacaggagtacgactttagtactgtcctgaggccagctgtggccacctcacctgcaccagggcccctgcaggctgcagagtgcagcttgggcagctcagggctacagctgtgggaggacagttgtgggaagatggatgcctgtggctccgcctcgcgggagactctgctcccctcacacccacccaggcgtgctgctctggaggaggggagcagccagcccacagagcggctctttgggcaggtgtcagggggtggtcttcccacaggggactacgcttctgaaatagctcccacccggccacggtggaacacccacgggcacgtgtctgacgccagcatcagggtcggggagaatgtgtcagatgtggctcccacccagccacggtggaacacccacggacacgtatccaatgccagcatcagcttaggggagtctgtgtcagatgtggctcccactcggccacggtggaacatccatggacatgtgtccaacgccagcatcagggtcggggagaatgtgtcagatgtggctcccaccaggccacggtggaatacccacgggcacgtgtccaacgccagcatcagggttggggagaacgtgtcggacgtggctcccacccggccacggtggaacacccatggacacgtgtccgatgccagcatcagcttgggggagtctgtgtcagacatggctcccgcccggccacggtggaacacccatggacacgtgtctgatgccagcatcagcttgggggagtctgtgtcagacatggctcccacccggccacggtggaacacccacggacatgtgtctgacaccagcatcagggttggggagaacgtatcggacgtggctcccatccggtcacggtgcaacacccatggacacgtgtccgacgccagcatcagcttgggggagcctgtgtcggatgtggtttccacccggccacggtggaacacccatgtacccatccctccgccccacatggtgctgggggctctctcaccagaagctgagcccaacacacccaggccccaacagagcccccctggccacacgtcccagtcagcgctcagcctgggagcacagagcactgtgctggactgtgggccacggctgcctgtagaagtggggccatctctgtcctcccccagctcgggctgcggggaggggagcatcagcgtgggggagaacgtgtcagacgtggctcccacccaaccatggtggcccaacaccccgggagacagtgtctctgaagaactaggtcagagtagggtggctggtggtcaggagtggga

SEQ ID NO: 28820 - DNA, 2300 bp, Homo sapien
gaaggctgaagtccctggaggaggagctggagaggaaggcgaggtagggcagcccgggctccaggcccaggggtgcagtgcggcaggggccccatagctctggcttaatcttactgatgattttactttttgttttgaaaaccttcaaacatacattaaggtagaaagaccaatatgctgaacccagagtggctgtgggcgttctgccttatccaggcatccttagctgttctgcgcgttgtcttgtggtggtttgtatggattagggtccaggcgaggcctgcgtactgtttggggtcctgtctctttatttatcttctttctgaacatccttccttatttatttttaagtctgttattggtctgacagagacagggcgtttttttttttttttttttttttggaaacagagtcttgctctgtcacccaggctggagtgcagtggcacaatctcggctcactgtaacctccgcctcccaggttcaagcaattctcctgcctcagcctcctgagtagctggggttacaggcatccgccaccacatccagctagttttttgtatttttagtacagacggggtttaaccatgttggccaggctggtctcaaactcctgacctcaggtgatccacctgcctcggcctcccaaagtgctgggattacaggcgcgagccaccgcgctcggctgagacagggcatttgtccagcacagcatctgcgtctgtctccctgtgctgttatcaacctgtcctgtgctgtcatcaggctgtcccaggctgagtagtgctggatccttcaaggggctgtttggggttttggagagagcccctcacgggaggggctggccgcttcctgctcagccccacgcgatgctgtaggtcccaaccttagatctctttatggagcgagtgagggatgtgtgtggaggggtgcgcgtgcctgtgtgcacgtgtgtccgtgtatgcatttatgcatgagtacgtgttcatgcatgtatgtcagtcgatactgtcctgttaacacatggagaaaaccaggcctagacactacgtctctggcctgtggcagccaaattagagctggccagtccaggtttgagcccagttgcctgctggtgagaagctcaaaatcatggggcacgatcggtgaagcaggctttgaattcagcaaataaagcgtttgtgttggttttgcttcatgtgcttttttgcattagttttcagttctcaggtttgtacctgtagaaggggaagaggcctaacttcttagaggcctggggccctcggcctcctgctcaccccttgcttcaggccacacaggatctcattctggtatttgtccagcagatgttgctgagccctggctggacgctgactcaccagggtctcccagcctggcaggtagaagggcctgcctggtgctgccctgtaggtgctgtgagggcccagagctatcagcccctggtagggggagacgggggcgggggcccactggggcctctgttatggagaaccatcctggcctgaggggtgccaggtagatggggtggggtgactcttgtggccgtgtcctctctggtgtgtggcttcaggcaggcactggtcgaccactacagcaagctctctgcagaggcagctcgtcgggagcagaaggcactgtggagaatccagaggcaccgactggagagtgcacggcttcgttttctcttagaagatgagaaacacattcaggtatgtctgcggcttcagatggcagctcttcccctgggctttgggggtctggaaaccccctgagactgcacacaaacctacatgctcttctaggagagggctggtggctttcgcgtttgcggcagagcactctctctccccgtgtgccaccaaattgcacagatacaggtggtgaggagctcgtggttttggagtactttttgcaggcccagcgtcccactggagcccagcacaagccttgtctggttcagtgcacatggctgccatgggcggtaggggctgtggctttgtgtggggtagggctgtgcttgactccggcttggccagtcacccctctggcttgaatttcaggagatgctgaaagcagtgtctgaggctcaccagccccaggagccgccagacgtcctcttgagcgtgcacccccaggtaagcggcagagtggaacccagggtgccctatggttttcccatagccctcggcacctggtgttggtcatggctgcagagctgaacttgggggacagttcgagggctggggggtcctgagaccagactgggtctgatgtcacct

SEQ ID NO: 28821 - DNA, 2300 bp, Homo sapien
ggtggtgggcgcccctggggcagctgggctcagatgagaggaagggttggtggtgggccacagcttctggcttcttgtggatgggccgcatttccacctggcccggtggcggggtgtggctcacagaggcccattgcttggaaatggagcccagagctgaggcaagaaacaaagcgctgttcccagcactggtgcccctcaggccctgggcacggctgcgtccatgtgcctggccgccctcctcccagcctctttgcccacaggccttcaccagtggcctgaggaggtacctgcagtattaccgggcctgcgtcctttccactccgcccaccctgagcctcctcaccattggttttctcttcaagaaacttggccggcagctcaggtgagcctcagcatggcggctgagcaggggactttgcgggagcggtgtggggcttgctgggtggtggagggtttgccctgctccctggcaaggagggcctgtgagaacagccctcagcaggcgaccggatggcccttggccggccgagttcaccaggtgcccggtgctgagcgggtgtgtctgccgtgggcccaccacagctggccccatccaggccctccaggtccggtggctcctgcctaattggcacacagggtccctggagatgtggcgtccggtacacacaagctggttagtgagcaaccaggctcgggggctattggcaggtgccatcagagaaggaagagtgaggagctgggcattgggagcagtgggagaggcgaccttccaggctgaggagcagagtgtggcagcgctgaggagacccaagggctgagacactgtggggcaggggagctgggctgtgaagggtgcgagttgtggcagatgcttggtaccactgtgtggatgggaggggctctcaggtgcagcccccagaagtgggaggatcagggtgattcgtgtgttggccagatcctgggagggagggcctgctgggtgtgggtacttcagtggggtgtgtgtggacagcgcaggggcacagggctgcacacgagtcctgcagggagcccgtttctgggtggttggggtgcctgtggtttttaaagcctgcatctaaagttagttgccccagggagcataaagatacgtggagactttgctcacgatctgatccaggcctgggaaccctgagcccggtcacctggtctcatcctgcctctgggtctaggtacctggccgagctctgtggcgttggcgctgtgctcccgggcacctgtggaggaggccccagggccgcgtttcccaccgtgagttgtgcgtccctgccgagtgtgtcagcctggtgggctccaggaaacgggggtggctgagcgtgtccctggagggctgctgccggcagggctgcgcctcactcccagcgctgggtgcgctgagctgccccccaccccctttgcggtctgcagggcgtgaagctgctgtcctacctctaccaggaggctctgcacaactgcagcaacgagcactaccctgtactgctgtccctgctgaagaccagctgcgagccctacacccggtgggcagtgggctgggcaggcgcggcgggcgcgcactcccaccaggcagacacttgagagcggtcccttgtcagacacctgctgaatgtgggggtcacacaggaaggggagggcaggataggtggactgggcaggagcccccaaccccccaccctgcccccactccacaccccccaccctgcccccactccatcccgcccctcatggatggccacaccccactccacctctcacagctacgcccccacttgcccctcactgacagccacgcccctgtcccacccctcactgacagccacgccccacccacctctccgttgaccacatctacccctgcttttcccccactgcaggttcatccacgactgggtgtacagcggggtgttcagagacgcttatggcgagttcatgattcaggtgaaccacgagtacctcagcttccgaggtaggtggcagctgattgcggggcaggggtccgtgcctgtgggcctgggttcagggccatggccatgccggccaccgtggtgttcaccctaccttagataagttgtactggacacatggctacgtgctcatctccaaagaggtggaggactgtgttcccgtgtttctgaagcacattgcccacgacatatacgtctgcggaaagaccattaacctgctgaagctctgctgcccccgggtgaggaggggctcatgtgtggggaagagaggggccggtcttccctggggctgagtat

SEQ ID NO: 28822 - DNA, 2300 bp, Homo sapien
tagtgtaagaagatgtgtggctgacagtagccgcagagacacaccgaatgaagggaactgtggatctgtttacctggcttgggagttggttggtgcctcattctccactgtttattcatcccacaggtgaacagtggtatagcagccactccagcctctgctgcagcagccaccctggatgtggctgttcggagaggcctgtcccacggagcccagaggtaagcctcacttggccatcctgagcctctgacggcaggacctgtgggcacccctatcctggctggccaagcacagagagttctgggaatggactctggacaacatgaacacctgtcctgaggccagctcttcttccaggctgctgtgcgtggccctgggacagctggaccggcctccagacctcgcccatgacgggtaggactctcaggtcttgcatatgtccagccatgcatgtggacgggcatgtgatggacgtgtgcctgggccccagggtgacgggtgggtggggcactgtgtggtactgaatggagccttcctcagctggggtgtgggagaagggctgctggaggcaatgccaggtgggtctccagcacagaggctcagcagtcacagcacccctgcccatggccccgtgaatgctcttccacctctgcctctgcggtttgggctcaggagggtgagcagggccttacacttatgcacctgtgtcctggaaggaggagtctgtggctgaacatcaggggcaaggaggcggctgccctatccatgttccatgtctccacgccactgccagtggtgagtgaccatgccacgcggcaaggcaggtgctggggagcccatggatgtgtacagctgctgtttgctggcattgtcatgatagcaggcctctggtccttcctgtctccctgctcctactccaggggccctgagattgggaggttgggaggccagagccagcaggtgtccgtagatgaggagctgggctctgctgtccccacagatgaccggtggtttcctgagctgcatcttgggcttggtgctgcccctggcctatggcttccagcctgacctggtgctggtggcgctggggcctggccatggcctgcagggcccccacgctgcactcctggctgcaatgcttcgggggctggcagggggccgagtcctggccctcctggaggaggtaagctgggcagggtggaggtgctgcggggtgggacgagggaaaggaccagtgactgcttccgtcttcgcccctggtccagaactccacaccccagctagcagggatcctggcccgggtgctgaatggagaggcacctcctagcctaggcccttcctctgtggcctccccagaggacgtccaggccctgatgtacctgagagggcagctggagcctcagtggaagatgttgcaggtgaggctgactgcggaggcatggccctgccctggggcctggctctgccgcacagatcggtggggagggcagggcaggggagtgccctgaaccagctccagcgccggaggccaactgcgcgcctcttctcggctcctcctgtagtgccatcctcacctggtggcttgaaatcggccaaggtgggagcatttacaccgcagaaatgacaccgcacgccagcgccccgcggccgcgatccggaccccaagcccacggctccctcgactctggggcacggaaccccgcccactcccaatccccgcgccccgccctctcccacccgtgcttcccccgctccacccctcacctcacctcgcccccgccccacccatcgcgccccggcccgtcccatcgaggcccatgcaacccacgctcggtcccgttccggcccctgcgccccgctgcgcttcgctccccgcccttgcgccgttagtaaacatcgctcaaacgaaacgctggctctgcctcctttactgagcacgctcggcctcggtctctcacccgcggtgccggactcaggccggaagtatgccgcggcccaggcctcaccaacttcacgcgctgccggcgttcccgtgacgtatttccggcgcgcccgccctagtgctcttcacactggcgcggctgtgacgcgacggaggcggcgagagcggcagccgtgggcactttccacgggtgaggcctggagaacgggtggacgtgcaggccagaacccgggacccacccggctgagcccccagactctccgctgcccacgaccctcggagtggcaccctctcctggccgtctcctctcgtgggtcccgaagaacgggtgcaaagccgagttcgtccgctgtactgc

SEQ ID NO: 28823 - DNA, 2300 bp, Homo sapien
gcgcggggcgggacccaggtccgaggcgaggaagccggaagccaggcgcggggagcctcccccttcgactgcagcctcgctccgtgccttctgcgcgcctgggatcccggagcctgcctaggttctgtgcgctcccgcccaggccggtgcccgccgcccgcctgcgccccaggcaggtcccaggcctccggctgctcccggccgaaggtggggacaggcagtggcaggcaccactagcgagggcgtttgggaacccagggtgaccacggcgcagccatggggaccgcgcttgtgtaccatgaggacatgacggccacccggctgctctgggacgagtaagtgggacctggccgaggtggggtgcggggagggacctctgaactgagctcctcatctgccccagccccgagtgcgagatcgagcgtcctgagcgcctgaccgcagccctggatcgcctgcggcagcgcggcctggaacagaggtgtctgcggttgtcagcccgcgaggcctcggaagaggagctgggcctggtgcacaggtcaggacgggggcaggccccacgatggggggcggggcgggcagcccagctagaaacctaagaacctgggcctaccccgagcctgccagcctcgaatacagagcctctccctatgcacctcgggtgggctcacaggcttgaggaagtgacagggtggccactcccaccatgaatcccaggtccccgcctcccgcccccctgctcctgctggtgaccctgcctctcctgcctgcccatctgcatgcagcccagagtatgtatccctggtcagggagacccaggtcctaggcaaggaggagctgcaggcgctgtccggacagttcgacgccatctacttccacccggtgcgtgtccccggacacactcacctgtgcagacacacatgcacgtgcctttgagcgttcacagccacggccgccaaccccagccagtgtcccctggtccatacacatgacattgccctgcacacctgcctgctggcactgccagagcctggggctggcctgttctgctcagcagctggtgtcttgcagcctggcacaagtgtgggtatggcctgcaaagggcagcagggaaggcagggggctcatctgcgcccctgcgcccacagagtacctttcactgcgcgcggctggccgcaggggctggactgcagctggtggacgctgtgctcactggagctgtgcaaaatgggcttgccctggtgaggtgagagctgccccttcccctggctgctcctccgtgggtggccctgtgaggggccagggcgaccctgacgtgacccaaatcctactctcacgccgtaggcctcccgggcaccatggccagagggcggctgccaacgggttctgtgtgttcaacaacgtggccatagcagctgcacatgccaagcagaaacacgggctacacaggtgtgtgccaggctggctgcaggggggtgggcccaggccacacagcaaggggcagcgcaggaggcgagagaacccagccagcaccttcccatccctggccgggctcctggaggtgggaggccctgcccctttgccaccagcgctgtctgtacccaggatcctcgtcgtggactgggatgtgcaccatggccaggggatccagtatctctttgaggatgaccccaggtgagcaggggtgcggaaaccacccttccctgcagccccagtttttgggtgcacagcctggcctgggaaaatccaggggtgagatacagacatgtgctcaggggtcagcgttctacagggagctgtagagctgttgagggtcctgacctttgacctctggccctggctggctgttggcagcgtcctttacttctcctggcaccgctatgagcatgggcgcttctggcctttcctgcgagagtcagatgcagacgcagtggggcggggacagggcctcggcttcactgtcaacctgccctggaaccaggtgcccaccctcaagccccaggtccccacccagccccctccccctgggcccctcccctcccccacagttcaccctcaagccccaggtccccacccaccccctcccccgggcccctcccctgccccacagttcaggatgtagcctgggatgtcctgccaggttgggatgggaaacgctgactacgtggctgccttcctgcacctgctgctcccactggcctttgaggtgactgcacggagggctcccccagggcagccgggtgggagggggaccttgtgcctggagtgcgccagtgaaggcaggaggagggttatgagct

SEQ ID NO: 28824 - DNA, 2300 bp, Homo sapien
gccaggtgttacttacaaagaggtgctcagcttcaagcctccccggcagctgggggccagggtctccaaggagacgcctctgtgaagatctctgggctccggggtggcagtgaggaccaccttcaccttccacctgagaggggactctcgttgccaccttgaccttggctggggcttgcatcccaaggcatccatcagagcagacgcccgggttccatggaccctcctccccacggccatgcctctgctcttgggcgcccatcatggaggagcacctgaactttctggacaagacctctggccgacctggggatggcctctgatccctggagcagtggcccacttgcccggtgctctcagaaacctcagagctggtggggctccagatcaggccttggcctctgagccctgcctgctctgggccatgcagaggaaggacagagggtgggcgcagggcaccaactcagggacatcccctctcctgggcgacgtcagtggaccttcctgcacccccagcctggaatgtaaatcagctgtgtggtgcccgcgtggctggaaggaaatagacccttttgtagctccctgttctggctgtgcgtcctcatgccgggtcccaccttaagacctccgggcccttggcctgcatgtagaggaggctggcctgatagctcagacccttagagccaggaggggggcctgagcatcccatctctcccaggccacaaagctggtgcccacttcccccaggcctgtgccagtgatcttcgaacccccacgttagggcttggcccctccccttttacggggtgacctgctaatggcttagactctaagccactgtgtgtggatcctgaagccagacccaggggcagggcctgatggggaggagtgttaggatctaccctagctctctgcatcctccaatgccagcaggtccctggggggagggggcacgctgggcacgttgagacccctgtggtgaagtggtgagcgccagccagtccctggggggacggggcacattggacatgttgagacccctctggcccctgtggtggattggtgagcgcagagggctgggttttattcttgatcaaacctctagcccctactaccctgctccagtggtatcttcgtgcccaggccgccctctgcaggccactcggtgtttccaagggtggcggctggaacacaggccatgggcacctccaaacctgtcccagggcaggggttacagcagagagaccagtgaggggcagggcagggcaggccaggtgtcctcggtggacatgcccacagctggcccagccaaagtggacctgatgagctgccacgacagatgggccttctctgcccagcgaccctcatgcctctccagggcatccgggcctgggggacgtgatcgccatcagttccggagccacgctgacttgtggcatggctgctgtccacactgggcccaaagtgtgggcccataggtggcctgaggactgggggccccaaaattctgtgacccagctggatgtgaactcccgcgggggcagggtgtcccctgggctccagggggcctcaggtttcctctcgggcatcttcctccgtggctgtgcccgtgcctcctatcttcctcagtcccccaccatgctaccgcaaccccggtccagtgtccccacctccaccgaccttgactctgctcttgggccaggggtcttcttggagctagaaccggactcactccctccttaaacctcgggggcggtgctgcgcctccatgcagccacgaccaccgccctgagccggccgcagcgccacctgcctccccgcgggctcctcccgcctcgtggcctttgccctgcagacccctcgcccccctcgcctttcaccccaggtcttcctgcgcccgggccgggtgggccttggggctgcgctggaccctgacccagctggtgcagaacggggctctcatgggcaggctcggccacgggcgttcgggtggggctgcggcgaccactcgcctaaggccgggggaccccgcccctcttggaggggatcggggcggggccaatggggaggcggagccgcagcgcagctccgagggctggcggctcggggcgccgaggcttccgcgcccgctggttcctcgctccggggcggagctcgcgatagcgaccgggagcagggcgcggggcgggacccaggtccgaggcgaggaagccggaagccaggcgcggggagcctcccccttcgactgcagcctcgctccgtgccttctgcgcgcctgggatcccggagcctgcctaggt

SEQ ID NO: 28825 - DNA, 2300 bp, Homo sapien
catggctctggcccacgtggctccggcggagctgtccttccagcttgtgtccattcttacctcactctggccggttcctacaccacggccaggaggacgcatttagcctcacgtccccatttaaatcgtccccgtctcttgggatcaaagccaaacttccacctggtgtgtgctgccctgccggctccctctggcctctcctcagcccctccctggcctgggcctccgccacctggcctccctccctgtattcttcaaactatccaagtgtgctccctcctgcctcggccactctgtgtgtgccctctgccaggtgtcccgcagcccacatgtctacctgcccctccacccttggctgtgcaaaactccaggcctccctgggaccgtcaccccaaaatgctgaggcggcagttgtcacatgacctgtctactgtctatctccccaaccaggggtgctgaggggaccaggtctggtgggtcacggtgctgtccgcctgggcctcaccagcagaggcctggcctctttccatagcgctgtccccaccctgggcctggatctgtttggttggggtgaagaggggtgaaagggtcaggcggcaggagccctttggatggttcggagccatcccagactccgggttgcccctcccccagaagatcccggttgtcaccgtccaaaaataacctttctgtgggtatgtgtgccagggctgggccacactgccagtgggtatgtgtgccagggctgggccacactgccagtgggcagagccaggccctttggacagtggggcatgacaatgacagctgcagagggggtttcctgcccagagggttgtgccactcttggggggtgccccagcccgtgtcctctgctgcattctcaaccctatgtggcccccccaggtgatcgggctgctggacgtattcactcctgatgagaccctggatgacttcacggacttgtgagtgccgacctgggctggccgctgggcacgaggggtgttgggcagctctgggcactggcttcaggttctaggttggcaatggggttctcttcctgcagcctgagtgggggatgcacaccgcccaccccctccccataccactgtccaccccacgccctcccccacatggtcctgggacccacgggcactggcacagctgggcagagctggggctgctgcctctctccacgcctggcacctgggccctctccagcaccggaggtgtgaaccttggacctgaccatttgttaacaggaaggtcccgtgctcgggaccctggcaccaagtgtgtggccggtaactggagctgctgaccttttccagcgggtgggggagaagcggtagggaggacccaccctgcccctgccctgcagccgaccaccctgggactcacaccctgtcggccaagagtgaagggccaggccgaggaaggcctggagagggtagcaggcgcctcccgcctgacttgcagaggtcaagtcagtggcctctgggaaggtgctaaataccattctcctgtgtctgtctccaccggcccagccgacccctctgacccagatgccttgccgcgcccccatcgcccccaggcacctccctcatttctggcacaaagttgtgaagttgaaacctgactgcctccctcccctgcctgtgaagactcgagtcctgctgcctctaccatggagcctcagcccctagcctggcacgcagggcgcttcagcggagggttcaaaaaccccaaggcagcctcctccctgcctgacagtcctcagggtgggaggggggtgtgagcgctgctggcagtaacagttgcgggaggatggagcctggcactgcaaggtggggctgcgaggacaccgaggccagtgtggatgtgtgctgcaggggtgaccttcctgggggtgcctgttggatccgggacgggtctgagcctgggcctgctgggtgggtctctgggatgcagaggctggctctgtccgctgacagcgctccggcccctcccacagttacctggtgatgccgttcatgggcaccgacctgggcaagctcatgaaacatgagaagctaggcgaggaccggatccagttcctcgtgtaccagatgctgaaggggctgagggtacgggccccgggggaggctgcagggaggcaggcagggcctcggggctgggcagaggagggccctgtggctctgagagggtgcgctgaagcctgccaaatcctctgccccccgcagtatatccacgctgccggcatcatccacagagtgagtcccggtggagaagccgctcat

SEQ ID NO: 28826 - DNA, 2300 bp, Homo sapien
tcagaagcctggtccgtgcagggcctgctggacccctgagccccaccacggggagtaagggggacagcgtggaagctgggcttcctggaagaggtggatggagtgccacaggcagcccagggcacaaagggtatgggccacaggcagctgtggtttgggtggccctgggctgccccgctcactggtcacgagctggtgaatgccgtggagcacggcccaagcccaggtgtaaagctactaccacccttgagcggctgagctgctgattcatggcaggagggcggggcagaaggccctagggatcctgttacccaccagcccagtgggctcctggggtgccccaacatcccttctgagatccaggttcctgggctggtgaaggggtgtcagggtggggctttgccctcaggagcatctggtccaggatggggccagacctatgggaggacaatgcccacacagaggggtcaggcggagggccccagcaggtccccatccctgctggagagagtgcagccactctcagcctgggttttgcaggacaggacaggcaggggtgggatgggcagagacaccagtacttgcaatgcttggagcaggcaccccacagatggggggagcagggggaggagctgggggtccaaaagggcccacggggacctatgggactgagaggcccggggtcagtggccacaggagtggggttggggatgcagcctgaggagtttgggggacagacccctccgtgtagaaagagggatacaggcaggacaggtgcagatggaccccttgttgggggacggatggatcaggctcagtggtagggcatccttgggggtggcctgcgaagttgaccccgggaacacagggctcagcccgacttgcggctgccatagaagtcagcgctcaggctgtcaaggatgggccctgcgccctggagccgtggggagttaggactggagcgggcggggggggggggggggggctcctgctgagacccccccagggcggggaagttcagccaaaggggagaggctggcagaggtatctccgcgccgcgtccggccctttatggggacgaagctgcggggcggcgctcccctccccctgcgcttccccccaggctccggccctccccaggctccggccctcccccggcggcggccgcctcgggtttccggaggggccggagggcgggcgagggcgtcacgtgcgcgccgcccgcgggccggttggtccccgggcgggggaggggccgtgcgcagcctgggtcggggtcgggccggggtcggcacctgggacatccctgagggaagggccgggagcgggagcgccccagcggccggcgggcgggcgggcgagcggacgagcggcgcggagccggcccgaggcgcgcgccgagggagccccgtccccggtcgtgggggcaccgcccgcaggctctgcggggtgggcagctcccgggcctgccatgagctctccgccgcccgcccgcagtggcttttaccgccaggaggtgaccaagacggcctgggaggtgcgcgccgtgtaccgggacctgcagcccgtgggctcgggcgcctacggcgcggtgtggtgagcgcgggccgggcggggcggccggcggggcgggcggggcctgcgcggggtgcccggccttcccgctaagcggtccgccccgcagctcggccgtggacggccgcaccggcgctaaggtggccatcaagaagctgtatcggcctttccagtccgagctgttcgccaagcgcgcctaccgcgagctgcgcctgctcaagcacatgcgccacgagaacgtgagtcgcgcggccccgctccgggaaggcgccgcggcctcggcttggttcagctgggctgggttcccccacccggcaacccctcctccaggcagcctgctgtggggccgggcgggggtcgggccgtgggtccccaggggagaaggagagcaaggcctgtctctccttgggagacgactcccccaagggccgttccccatcctccgccagccccgggaaggactcagccccttgactcggcgcctcagccaggccctggtcagggaacacgacttggccaggcccaggggatcctccaggtctcacgccaagccttgcccccagccaggaagcccgcggtgagagcatgctcccggcgggaggattttcctggaaggggcaccttccctcttccccatcccctttccagcccctctgtggagcccactctgctgctgtccatctcccgagtcttccgacccggtggtggagggggaggaggggggc

SEQ ID NO: 28827 - DNA, 2300 bp, Homo sapien
gaggtgctctggtctgtgggtcagtcctctttccttgtcccaggatggagctgatccagtaacctcggagacgggaccctgcccagagctgagttgggggtgtggctctgccctggaaagggggtgacctcttgcctcgaggggcccagggaagcctgggtgtcaagtgcctgcaccaggggtgcacaataaagggggttctctctcacttggcttgtatccaaaggctactccaggcccgggtgcccccaccatccctgctgctgggcgtggggggagtgtctgggtcatcctgcatcactcacctccagctggccagatccctcaggcccccagtcagaccagcggccatcttctggcaccctccctgctccctggagggtctgagagcccagggggaccaggggaagacatggctgatgggcagactttgagggcacagggtgtgacagccacccagatggtgaccccagctgccctgtggggatgtactgggcaggcttggctttgggccaagatccagacaccacccccgcctacccctcagtgttcagggaagctggctggggagaagttgggtgtctcaaggagcaagggtctgcccatccctgggtgggggctgggcagggtagggaaaatagctttcctttccctcctggtgaaggaaaaagaggccactttaacccagggaatgtgcacgctggtcccgttcccactacgcgctgcagcttatgtgtgggggagggtccaggccatttggggtcaggcagtgtctctaaggaccagggacagtctgtgcccttgcttgggtcttgggtaggggtggaaaccgtctgggagttgggggcctcctggggcctggtcagtgtagtggtcaatcccgggggaagtccagtgttggcggttgggggtgggaggagaatggtgacacagccccacctcagaagcctggtccgtgcagggcctgctggacccctgagccccaccacggggagtaagggggacagcgtggaagctgggcttcctggaagaggtggatggagtgccacaggcagcccagggcacaaagggtatgggccacaggcagctgtggtttgggtggccctgggctgccccgctcactggtcacgagctggtgaatgccgtggagcacggcccaagcccaggtgtaaagctactaccacccttgagcggctgagctgctgattcatggcaggagggcggggcagaaggccctagggatcctgttacccaccagcccagtgggctcctggggtgccccaacatcccttctgagatccaggttcctgggctggtgaaggggtgtcagggtggggctttgccctcaggagcatctggtccaggatggggccagacctatgggaggacaatgcccacacagaggggtcaggcggagggccccagcaggtccccatccctgctggagagagtgcagccactctcagcctgggttttgcaggacaggacaggcaggggtgggatgggcagagacaccagtacttgcaatgcttggagcaggcaccccacagatggggggagcagggggaggagctgggggtccaaaagggcccacggggacctatgggactgagaggcccggggtcagtggccacaggagtggggttggggatgcagcctgaggagtttgggggacagacccctccgtgtagaaagagggatacaggcaggacaggtgcagatggaccccttgttgggggacggatggatcaggctcagtggtagggcatccttgggggtggcctgcgaagttgaccccgggaacacagggctcagcccgacttgcggctgccatagaagtcagcgctcaggctgtcaaggatgggccctgcgccctggagccgtggggagttaggactggagcgggcggggggggggggggggggctcctgctgagacccccccagggcggggaagttcagccaaaggggagaggctggcagaggtatctccgcgccgcgtccggccctttatggggacgaagctgcggggcggcgctcccctccccctgcgcttccccccaggctccggccctccccaggctccggccctcccccggcggcggccgcctcgggtttccggaggggccggagggcgggcgagggcgtcacgtgcgcgccgcccgcgggccggttggtccccgggcgggggaggggccgtgcgcagcctgggtcggggtcgggccggggtcggcacctgggacatccctgagggaagggccgggagcgggagcgccccagcggccggcgggcgggcgggcg

SEQ ID NO: 28828 - DNA, 2300 bp, Homo sapien
agctccagtgaggaggggtggccaggaccagcgggggtggggtgggggcatgagcacggagaaggggtggcctgctgtattcaggggccacagcgaatcagctgggtaggagaggcgcctctggcccagggcttctcactcctgccctgccaccggcccttcctggctcccctgccgcttcccctctgggcctgggactgtcctccaccggcggctccctccaggggggcttcccttgcccccgccgagctctgaaggtgcctctcctggaagatggcctccaggccctgacgccacccgaaactcctcagtgatcactcccttgcagtgccacgaccccacactgtccccagtaggcacatgggcgggacctctaatgcctgggcaggcagggggttcccggggcaggtcagctcagtgatgagaggggcccgtttccaccgccccccgcccccacccccaccccacacgcccgcctgacctgctgagcggccggggcctgcagcgaggccgcgaggattgcgggcggacgcctgggggaagcctgacacctccccacctccatgtcccccaccctaggggcgagaacggagccgcccagtccacggggaggcgcaggggcggggccggtcgccatgggaacccgactcccgccccgcccggccgcggcgcagacaaaggccgctcccctcccccggcggccgcggccgcggttcccacagctccggggctgcgctccggcctcctcctcctttagctgaagctccattaactctgcacaaaacctcggcccgcctcggccgggcccagtgaaaggcgctcccgggcgggggccctcggggaggctgcccgtgtcctcgccccaacccagcccgagcgaggagaggggccatccccgggcccgcgccaggcccccagccggatgccggcttccaatggggaaactgaggcacggggcttggtcatgcaaaaggggccggagcggctgggactgagacccgttccttcgccgcggtccgcatgggtccggtggccagcaccgtgctggctgttttaatttggttgccgatatataaaaatcagatttgacattaaaactcggattttagtgttttaaaaaaggagtgttttgggccactgggatcctgatttctcacttcgctggagggggtcgcccagccgcgaagcctcccaccacggctctaccagggcggaggtcggtggccggtgttccagggagcaatgctccgccgagccccggtcgctttcaagtgggaataaaagtagctgtgcggccccgagcgcggcagagacgccgagtggggcgctgcccccgtcaccgccaaggcagccccccgcgcctgcccgcccgcggggctgacttcaaggaccctgcacccaaaggcggctcctcggacctgggatagtcagggtgggcttcctagaagaggtggccgctaaggaggaggaaaggttctgggcagcaaaaaggatccgtttggggccgctgcttgtgggtaggaaggccccggggtgacgccgctgtccctggtcctgacagtccagcggtcgcgcctctctcagaggggaggtcagggcgagccggggcaggaggcctggaaggttcccggggcgcaccgcggaccaaggcctgcaggtcctgcgcaagaaagccaggccggccctgtcccaacgcctttcggcttattttcctatccagtgccgagtctttagaaggtgctattcatatttctgtcttgaaaaatacttcccatggtttacccctggcttcttcgcttttgacggttctccctcgttggggagggcgccgccggggtagggaagcccgggccgagcccagacgcgggcgcaagtctggagaagcgcgcggcccccaagaggtgagagccggagggaggtgtccgccctcggcgccccccccgggaaggggagggctggtttccgctctgccaccgcctccgaggcgcaggaagcagcgcatttgtctccgggaacccccccacgccccggccacccagcccgggaaatccgcccgggcctcccggccccgccccggagccccgccccgcccgccgccgccgccgcctccgccgccctccgctccgctcggctcgggctcggctcgggcgcgggcgcggggcgcggggctgggcccgggcggagcggcggctgctccggacatgtcgggccctcgcgccggcttctaccggcaggagctgaacaagaccgtgtgggaggtgccgcagcggctgcaggggctgcgcccggtgggctccggc

SEQ ID NO: 28829 - DNA, 2300 bp, Homo sapien
ctgactgcccagtgggacagggaagaggtggactgcaggggtctagtacggaagccaggcctccaggttcccagctccctacttgagacctcccgctcagcacttaagccttcggtccacccccttgctctgatctcctgaccagccatgtctctgggtaaggggggaacccaatgtcatttcagggatccttggagcaggggatgtcagttggccttgtacccctttctcttgtgggggagagatggccacccgtttttcatcgtggcttgaatggagctgtgtgggcggcaagccacccaggcaccgaggcaagagagaggacacgagctgttgcagtataataaaatataaaacaagaatagttataccagatatagatcttagatatgattatatatgaatatcattaatcattagtttgtagcaattactttttattccaatattataataatccttgctcaataatcatagcctaggaaaaaccaggccatacagagataggagctgaggggacatagtgaggtgtgaccagaagacaagagtgggagccttctgttatgcccggacagggccaccagagggttccttggtctagcggtgacgccagcgtctgggaagacgcccgttaccaggcgggccgtggtccagccgtagcaaaaggtgtcaaggaacaacacccactacttagcagaccgggaaagaggggggggggtctccctttccccaggggagtttagagaagactctgctcctccacctcttgtggagggcctgacatcagtcaggcttgcccgcagttatccagaggcctaaacgtctccctgtgatgctgtgcttcagcggtcacactcctagtccactttcatgttccatcctgtacacctggctctgccttctagatagcagtagtaaattagtgacaatactaatagtccctgatatgcagaaataatggcgtaagctgtctttctctctgtctcctctctctctctgcctcggctgccaggcagggaagggactcctgtccagtggacacatgacccacgtgaccttacctatcattggagatgactcacattctttaccctgccccttctgccttgtatccaataaataacagcgcagcccgacattcggggccactaccggtctccatgcattggtagtagtggtctcctgggcccagctgccttttctcttatctctttgtcttctgtctttatttctacactctctcgtcgccgcacacggagagacccactgaccctgtggggctggtccctacagagctgccccagtccaaaggggactcgatcaatggaggccttgcccatcaagagaccccagccatgacgtgcccaggtggggagacaggctggggctgcctgagaatggatcctcgtgagtgggttagcagtccagaccagcagaacctcaggatgtgtgcctggatccagccacatttgaagctgggccttcactttgtgtctggagcaccgaatgccctctgcctgggctgtctgtattcttggcacacaggggaggctctgagccctgcccgtcctggttgctgctgttcctagcgctcaggacagtgcatgcgtggtgtgcagcgggcatttggtaagaatgtgttgcacgaaagaagccaccagatggcaccagaagcagtcccacctcccaccccccccacctcccctcagcacctctcccagccccctccacctccccccagcacccctcccagccccctccacctcccccagtacccctcccagccccttccacctcccccagcacccctcccagccccctccacttccccccagcacccctcccagccccctccacctccccccagcacccctcccagccccctccacctcccccagtacccctcccagccccttccacctcccccagcacccctcccagccccctccacctccccacagctcccctcccagcaggacccacagagcccagggaaggggtggtggacaggggcactgcagccccaggaggaacactcagccaacccgcagagtgaaaaagacgctgtatttgatttacaatgaacaagatttacaaaaaggggtggggtggtcttggaactgctcccagtccccccggactgggtggggctctagggcagcctgtctgacagaccaggaccccaggatgtctgggccccgacgtaggacttgacctacgtctcacttgacctttgacgtggggcccagcagccgtgagtccacccagagtgccggcacccttggggaggccggtgaggt

SEQ ID NO: 28830 - DNA, 2300 bp, Homo sapien
acgtgcacgaggccggcatccccgtgctggactacaagacctacaccgaccgcgtcttcttcctgccctccaaggacggcgacaaggacgtgatgatcaccggcaagctggacatccctgagccgcggcggccggtggtggagcaggccctctaccagttctccaacctgctgaacagcaagtctttcctcatcaatgtgagccaggcgtcgggcgggcgggagggcacacaggtggcgccgggcaggctttgaccgccggcccctacagttcatccacaccctggagaaccagcgggagttctcggcccgcgccaaggtctacttcgcgtccctgctgacggtggcgctgcacgggaaactggagtactacacggacatcatgcacacgctcttcctggagctcctggagcagtacgtggtggccaagaaccccaagctgatgctgcgcaggtgcacatgggcggggccacgagcggggccacgggcggggcggccgcaggggctctggggctggtggcgggtggcacagcggcctgttgggcccccaggagccggcaggtgccagccagcgctggtggtggggggcggtctaggggtggtgtccccggccacaaactcaaagccggactctagcccttcctgtccagcggtttcagctggtcacagtgtcagccctctgcagaacagaaggaaggtggcacacttcccacaagggctggagctgccaccaggtagtcctcgctgcaggccacacccaggctggacaggggcgaggctggcgcaagggtggccgggtgcttggaggagtcagttgggcctcaggaatactacggggtcactcggtacaaggcctccctgcacccccaggtctgagactgtggtggagaggatgctgtccaactggatgtccatctgcctgtaccagtacctcaaggtgggttccaccccagcctggctggggcttgagggatgaggcagactgctgccatcccctcctgcgttcccctatctgtacggcaccttgaggtgggccctgcctggacaggtttgcttcctgcccctgacatggtcagccccgtccatgcctctggccagggctccgggggccccttccaggccccaagtcccctgacctcccagcctcccctccgtgttactccaggacagtgccggggagcccctgtacaagctcttcaaggccatcaaacatcaggtggaaaagggcccggtggatgcggtacagaagaaggccaagtacactctcaacgacacggggctgctgggggatgatgtggagtacgcacccctggtgagcttctggggtgggggccgccatgggcgcctcggatctgggctaaggagcttgggcatcccctggccacagatgggacccacaggccagaggccgtccacctcctctgtggattcgagttacagcctgctctaactcggcctcagggaggggcctgggtgctggtggctgtgggctctggaggctctaagtgtgcgggccccgcatcagctcttcccgggcgcccccacctcctggaggccatacaagggcctggcacaccaggtgtgtccagggttctgtgcatacatgaccagtgggtgtggcaggagcctgtgcatgtgtgagacgtgtgtattctgtgtctgtacatgtgcttccatgagcttgcgtgacagcctgagtgagcggttctgagccgtccccgtctttctgtcctgctgagccggagcaggcaggggaagggcagagtgtggtcatctgggaagcctcgggggctcggagccgggctggcgggggcctgctgcccaagggtgccgctgtggtgggcaaagctggcggggcagggagtggctcctgcatggtgcaggtaagagcagggcctcccactgggcttcatcccggatgtctcggcagacggtgagcgtgatcgtgcaggacgagggagtggacgccatcccggtgaaggtcctcaactgtgacaccatctcccaggtcaaggagaagatcattgaccaggtgtaccgtgggcagccctgctcctgctggcccaggccagacagcgtggtcctgggtgagtgccggcccctgcccgtctgcacacaggcgcccatgtgcctggcctgtgtcctggggcggtatcctgcctggccagctttctcatatgggagtggtgggcagtgggaggaacctgggtggctggggcccaagctgggctgtctcttcccacagagtggcgtccgggctccacagcgcagatcctgtcggacctggacctgacgtcacag

SEQ ID NO: 28831 - DNA, 2300 bp, Homo sapien
tggtccacctgtccctggttccctcctcctcaccccgaccactgccgcctccccagggcaccaatctgaacaaggcgatgacgctgcaggaggccgaggccttcgtgggtgccgagcgctgcaccatgaagacgctgacggagaccgacctgtactgtgagcccccggaggtgcagcccccgcccaagcggcggcagaaacgagacaccacacacaacctgcccgagttcattgtgcgtgagcggggactggcggggggtgcccccacgggaccgcgctgaacccggccccccacacaggtgaagttcggctctcgcgagtgggtgctgggccgcgtggagtacgacacacgggtgagcgacgtgccgctcagcctcatcttgccgctggtcatcgtgcccatggtggtcgtcatcgcggtgtctgtctactgctactggtgagcccgccccccggctgtgccaacaccctgagccctcggccctcccgcctcggcccctctggcctcatccgccgccctgcacaggcaggcgtgtagatccacctcctcatccgggcagctgagcggccagccccggcagaacctaggaggcccgctgtgccttgcaggaggaagagccagcaggccgaacgagagtatgagaagatcaagtcccagctggagggcctggaggagagcgtgcgggaccgctgcaagaaggaattcacaggtagggaccgcttgggggctggtgctggggcgcctcctggggcggggatgctgtgtgtagcgtgggggtcagggccccacgtggccagggacgtctcacgccagcctccccccagacctgatgatcgagatggaggaccagaccaacgacgtgcacgaggccggcatccccgtgctggactacaagacctacaccgaccgcgtcttcttcctgccctccaaggacggcgacaaggacgtgatgatcaccggcaagctggacatccctgagccgcggcggccggtggtggagcaggccctctaccagttctccaacctgctgaacagcaagtctttcctcatcaatgtgagccaggcgtcgggcgggcgggagggcacacaggtggcgccgggcaggctttgaccgccggcccctacagttcatccacaccctggagaaccagcgggagttctcggcccgcgccaaggtctacttcgcgtccctgctgacggtggcgctgcacgggaaactggagtactacacggacatcatgcacacgctcttcctggagctcctggagcagtacgtggtggccaagaaccccaagctgatgctgcgcaggtgcacatgggcggggccacgagcggggccacgggcggggcggccgcaggggctctggggctggtggcgggtggcacagcggcctgttgggcccccaggagccggcaggtgccagccagcgctggtggtggggggcggtctaggggtggtgtccccggccacaaactcaaagccggactctagcccttcctgtccagcggtttcagctggtcacagtgtcagccctctgcagaacagaaggaaggtggcacacttcccacaagggctggagctgccaccaggtagtcctcgctgcaggccacacccaggctggacaggggcgaggctggcgcaagggtggccgggtgcttggaggagtcagttgggcctcaggaatactacggggtcactcggtacaaggcctccctgcacccccaggtctgagactgtggtggagaggatgctgtccaactggatgtccatctgcctgtaccagtacctcaaggtgggttccaccccagcctggctggggcttgagggatgaggcagactgctgccatcccctcctgcgttcccctatctgtacggcaccttgaggtgggccctgcctggacaggtttgcttcctgcccctgacatggtcagccccgtccatgcctctggccagggctccgggggccccttccaggccccaagtcccctgacctcccagcctcccctccgtgttactccaggacagtgccggggagcccctgtacaagctcttcaaggccatcaaacatcaggtggaaaagggcccggtggatgcggtacagaagaaggccaagtacactctcaacgacacggggctgctgggggatgatgtggagtacgcacccctggtgagcttctggggtgggggccgccatgggcgcctcggatctgggctaaggagcttgggcatcccctggccacagatgggacccacaggccagaggccgtccacctcctctgtggattcgagttacagcct

SEQ ID NO: 28832 - DNA, 2300 bp, Homo sapien
cacacccagctgcctcctcagtgcccttggctgactgtgctgaaaggaatgtggtggggctggtctgtgcagcgggaggcggcctccggaaaaccccactgcactccagatccacttcctcctagaaacccagatgggcacaccagaggctccacgctcaccaggccccgtgtgccccccgcccacttgcggcacagtctcgtgctcagcacgtcccaccgcgttgcccctttgcccaccgagacccacacatgcacctggaagccccgtgtggtcagggccagggtgggcggggacgggagggcggaggctgcagggaccacccctgccagccgagcccacgaaggcactgccctccgcagtggtggccgcagcatcaacgtcacgggtcagggcttcagcctgatccagaggtttgccatggtggtcatcgcggagcccctgcagtcctggcagccgccgcgggaggctgaatccctgcagcccatgacggtcagtcctggcgtgggctcagctctggcaccggcccatgggatcgtgcccaggaagggcggggtctgcgcccgggggctgacagctgggacttgcctgcaggtggtgggtacagactacgtgttccacaatgacaccaaggtcgtcttcctgtccccggctgtgcctgaggagccagaggcctacaacctcacggtgctgatcgagatggacgggcaccgtgccctgctcagaacagaggccggggccttcgagtacgtgcctgaccccacctttgagaacttcacaggtggcgtcaagaagcaggtcaacaagctcatccacgcccgggtgaggacggtgcagccccgggtgtctgggtcctgctcgggtctgggctgagagctggtccacctgtccctggttccctcctcctcaccccgaccactgccgcctccccagggcaccaatctgaacaaggcgatgacgctgcaggaggccgaggccttcgtgggtgccgagcgctgcaccatgaagacgctgacggagaccgacctgtactgtgagcccccggaggtgcagcccccgcccaagcggcggcagaaacgagacaccacacacaacctgcccgagttcattgtgcgtgagcggggactggcggggggtgcccccacgggaccgcgctgaacccggccccccacacaggtgaagttcggctctcgcgagtgggtgctgggccgcgtggagtacgacacacgggtgagcgacgtgccgctcagcctcatcttgccgctggtcatcgtgcccatggtggtcgtcatcgcggtgtctgtctactgctactggtgagcccgccccccggctgtgccaacaccctgagccctcggccctcccgcctcggcccctctggcctcatccgccgccctgcacaggcaggcgtgtagatccacctcctcatccgggcagctgagcggccagccccggcagaacctaggaggcccgctgtgccttgcaggaggaagagccagcaggccgaacgagagtatgagaagatcaagtcccagctggagggcctggaggagagcgtgcgggaccgctgcaagaaggaattcacaggtagggaccgcttgggggctggtgctggggcgcctcctggggcggggatgctgtgtgtagcgtgggggtcagggccccacgtggccagggacgtctcacgccagcctccccccagacctgatgatcgagatggaggaccagaccaacgacgtgcacgaggccggcatccccgtgctggactacaagacctacaccgaccgcgtcttcttcctgccctccaaggacggcgacaaggacgtgatgatcaccggcaagctggacatccctgagccgcggcggccggtggtggagcaggccctctaccagttctccaacctgctgaacagcaagtctttcctcatcaatgtgagccaggcgtcgggcgggcgggagggcacacaggtggcgccgggcaggctttgaccgccggcccctacagttcatccacaccctggagaaccagcgggagttctcggcccgcgccaaggtctacttcgcgtccctgctgacggtggcgctgcacgggaaactggagtactacacggacatcatgcacacgctcttcctggagctcctggagcagtacgtggtggccaagaaccccaagctgatgctgcgcaggtgcacatgggcggggccacgagcggggccacgggcggggcggccgcaggggctctggggctggtggcgggtggcacagcggcctgttgggcccccaggagccggcaggtgcc

SEQ ID NO: 28833 - DNA, 2300 bp, Homo sapien
gcgggcaggcacggggtgaccactgacggcagctctccccgcagtgaccctctacaactgctcctttggccgcagcgactgcagcctgtgccgggccgctaaccccgactacaggtgtgcgtggtgcgggggccagagcaggtgcgtgtatgaggccctgtgcaacaccacctccgagtgcccgccgcccgtcatcaccagggtgagcccctcgaagcctggcctacaccttccctcgtccctggcatgagcccctccctgctcacccggctctgtggtttcagatccagcctgagacgggccccctgggtgggggcatccgcatcaccatcctggggtccaatttgggcgtccaagcaggggacatccagaggatctctgtggccggccggaactgctcctttcagccggaacgttactccgtgtccacccggtgagtggacggccctggtctgggccctgtcagctgggtcagtacccacgctggggttccgggtgactgggtgggtggggaggctgagggggtgagggtgtcagggtgtggggtgggtcggggagtgcctgggccacactgcctgtcgcccgccaggatcgtgtgtgtgatcgaggctgcggagacgcctttcacggggggtgtcgaggtggacgtcttcgggaaactgggccgttcgcctcccaatgtccagttcaccttccaagtaagcacccggcctcggggacctgccgaacccgggaggaccgggaggaggggctctgcccgccgcctccccacgacagttaccatccagcccaggaccgagggcgtcctgtgccccgtcctcacccgagtgcccctgcggctctttcagcagcccaagcctctcagtgtggagccgcagcagggaccgcaggcgggcggcaccacactgaccatccacggcacccacctggacacgggctcccaggaggacgtgcgggtgaccctcaacggcgtcccgtgtaaagtgtgggtgtcaccgccagctgctgagtctggttggccctggccctgggtatggaggggggcacttactgagacctgagtggccctgaggggatggcggggccagcctggtcgggctggggctggtcccgggggaggggttgatgcagaccagcaccctccctcccccaggacgaagtttggggcgcagctccagtgtgtcactggcccccaggcgacacggggccagatgcttctggaggtctcctacggggggtcccccgtgcccaaccccggcatcttcttcacctaccgcgaaaaccccgtactgcgagccttcgagccgctacgaagctttgccaggtgaggctggtgtccccccgcccccctctgctccccacacccagctgcctcctcagtgcccttggctgactgtgctgaaaggaatgtggtggggctggtctgtgcagcgggaggcggcctccggaaaaccccactgcactccagatccacttcctcctagaaacccagatgggcacaccagaggctccacgctcaccaggccccgtgtgccccccgcccacttgcggcacagtctcgtgctcagcacgtcccaccgcgttgcccctttgcccaccgagacccacacatgcacctggaagccccgtgtggtcagggccagggtgggcggggacgggagggcggaggctgcagggaccacccctgccagccgagcccacgaaggcactgccctccgcagtggtggccgcagcatcaacgtcacgggtcagggcttcagcctgatccagaggtttgccatggtggtcatcgcggagcccctgcagtcctggcagccgccgcgggaggctgaatccctgcagcccatgacggtcagtcctggcgtgggctcagctctggcaccggcccatgggatcgtgcccaggaagggcggggtctgcgcccgggggctgacagctgggacttgcctgcaggtggtgggtacagactacgtgttccacaatgacaccaaggtcgtcttcctgtccccggctgtgcctgaggagccagaggcctacaacctcacggtgctgatcgagatggacgggcaccgtgccctgctcagaacagaggccggggccttcgagtacgtgcctgaccccacctttgagaacttcacaggtggcgtcaagaagcaggtcaacaagctcatccacgcccgggtgaggacggtgcagccccgggtgtctgggtcctgctcgggtctgggctgagagctggtccacctgtccctggttccctcctcctcaccccgaccactgccgcctccccagggcaccaa

SEQ ID NO: 28834 - DNA, 2300 bp, Homo sapien
tcctccctgcacgtgggcagtgacttgctcaagttcatggagccggtgaccatgcaggaatctgggaccttcgcctttcggaccccaaaggtacggctccagggcaggccggctcggctgctggaccccagggccccgggtggggtggggggtcaccttcaggactgtgaggggaggggcagcagggagaccccagggaccagagcccagccaggggctcgccatgccctgtgctgctggggaagccccctctgccctctgcctccctggggacagagtggcacagagcagcgtccatggggttcccgaacttccgacacctgaaggcctcccctgctgcccttggctgggaagggacccggtggccacagggaggctgcccttgtgacccccgccccacgcccctctgtgggggcaggaagtgcagtgtgcccctgcgtgtcccccagctgtcccacgatgccaacgagacgctgcccctgcacctctacgtcaagtcttacggcaagaatatcgacagcaagctccatggtgggggccacgggcgcagtggggggcgggcaggggacgggtgggcacaaggcggtgggtggggggacaggtgggcgcagtggggagcaggtcgggggcgggcaggcacggggtgaccactgacggcagctctccccgcagtgaccctctacaactgctcctttggccgcagcgactgcagcctgtgccgggccgctaaccccgactacaggtgtgcgtggtgcgggggccagagcaggtgcgtgtatgaggccctgtgcaacaccacctccgagtgcccgccgcccgtcatcaccagggtgagcccctcgaagcctggcctacaccttccctcgtccctggcatgagcccctccctgctcacccggctctgtggtttcagatccagcctgagacgggccccctgggtgggggcatccgcatcaccatcctggggtccaatttgggcgtccaagcaggggacatccagaggatctctgtggccggccggaactgctcctttcagccggaacgttactccgtgtccacccggtgagtggacggccctggtctgggccctgtcagctgggtcagtacccacgctggggttccgggtgactgggtgggtggggaggctgagggggtgagggtgtcagggtgtggggtgggtcggggagtgcctgggccacactgcctgtcgcccgccaggatcgtgtgtgtgatcgaggctgcggagacgcctttcacggggggtgtcgaggtggacgtcttcgggaaactgggccgttcgcctcccaatgtccagttcaccttccaagtaagcacccggcctcggggacctgccgaacccgggaggaccgggaggaggggctctgcccgccgcctccccacgacagttaccatccagcccaggaccgagggcgtcctgtgccccgtcctcacccgagtgcccctgcggctctttcagcagcccaagcctctcagtgtggagccgcagcagggaccgcaggcgggcggcaccacactgaccatccacggcacccacctggacacgggctcccaggaggacgtgcgggtgaccctcaacggcgtcccgtgtaaagtgtgggtgtcaccgccagctgctgagtctggttggccctggccctgggtatggaggggggcacttactgagacctgagtggccctgaggggatggcggggccagcctggtcgggctggggctggtcccgggggaggggttgatgcagaccagcaccctccctcccccaggacgaagtttggggcgcagctccagtgtgtcactggcccccaggcgacacggggccagatgcttctggaggtctcctacggggggtcccccgtgcccaaccccggcatcttcttcacctaccgcgaaaaccccgtactgcgagccttcgagccgctacgaagctttgccaggtgaggctggtgtccccccgcccccctctgctccccacacccagctgcctcctcagtgcccttggctgactgtgctgaaaggaatgtggtggggctggtctgtgcagcgggaggcggcctccggaaaaccccactgcactccagatccacttcctcctagaaacccagatgggcacaccagaggctccacgctcaccaggccccgtgtgccccccgcccacttgcggcacagtctcgtgctcagcacgtcccaccgcgttgcccctttgcccaccgagacccacacatgcacctggaagccccgtgtggtcagggccagggtgggcggggacgggagggcggaggctg

SEQ ID NO: 28835 - DNA, 2300 bp, Homo sapien
gacaggcaggctcaggtacggagggaggggtgccggccggtgacaggcaggctcaggtgcggagggaggggtgccggctgtgacaggcaggctcaggtgcggagggaggggtgccggccggtgacaggcaggctcaggtgcggagggaggggtgccggctgtgacaggcaggctcaggtgcggagggaggggtgccggccggtgacaggcaggctcaggtgcggagggaggggtgccggccggtgacaggcaggctcaggtacggagggagggggtgccggttggtgacaggcaggctcaggtgcggagggagggggtgccggccggtgacaggcaggctcaggtgcggagggaggggtgccggccggtgacaggcaggctcaggtgcggagggaggggtgccggccggtgacaggcaggctcaggtgcggagggagggggtgccggttggtgacaggcaggctcaggtgcggagggaggggtgccggccggtgacaggcaggctcaggtgcggagggagggggtgccggttggtgacaggcaggctaaggtacggagggaggggtgccggccagtgctgatgggtgtgtgggaagcctgagctccacccgtgccccccgactcggggcccccacatgaggtagagggcacaggatttatcggggacagaggccaggaggcagcactcgggggcctttggatgggcctgaagagaggcagtggaggaggcaggcgtgtggagattgaggggccagtgccacctcctgaggagggagctgtgggggccacgatgtcaggtgggccgggcgatgttctcaggtgtggatgagtggtggaggtggccgtgggaaacccacagaggacgttcagaggcttctgcagacacaggtgtttgggctcaggagtggccgaggggtcagctggcatggtaatctgaggggcgggcatgtgtggggtgaggagagggctcccacactgtaggcacagaggaggggctgcaggggttctgggaggagggccagggtgccacagccgcctgtccagggtcctgacggcatggtctgcagggttcctccctgcacgtgggcagtgacttgctcaagttcatggagccggtgaccatgcaggaatctgggaccttcgcctttcggaccccaaaggtacggctccagggcaggccggctcggctgctggaccccagggccccgggtggggtggggggtcaccttcaggactgtgaggggaggggcagcagggagaccccagggaccagagcccagccaggggctcgccatgccctgtgctgctggggaagccccctctgccctctgcctccctggggacagagtggcacagagcagcgtccatggggttcccgaacttccgacacctgaaggcctcccctgctgcccttggctgggaagggacccggtggccacagggaggctgcccttgtgacccccgccccacgcccctctgtgggggcaggaagtgcagtgtgcccctgcgtgtcccccagctgtcccacgatgccaacgagacgctgcccctgcacctctacgtcaagtcttacggcaagaatatcgacagcaagctccatggtgggggccacgggcgcagtggggggcgggcaggggacgggtgggcacaaggcggtgggtggggggacaggtgggcgcagtggggagcaggtcgggggcgggcaggcacggggtgaccactgacggcagctctccccgcagtgaccctctacaactgctcctttggccgcagcgactgcagcctgtgccgggccgctaaccccgactacaggtgtgcgtggtgcgggggccagagcaggtgcgtgtatgaggccctgtgcaacaccacctccgagtgcccgccgcccgtcatcaccagggtgagcccctcgaagcctggcctacaccttccctcgtccctggcatgagcccctccctgctcacccggctctgtggtttcagatccagcctgagacgggccccctgggtgggggcatccgcatcaccatcctggggtccaatttgggcgtccaagcaggggacatccagaggatctctgtggccggccggaactgctcctttcagccggaacgttactccgtgtccacccggtgagtggacggccctggtctgggccctgtcagctgggtcagtacccacgctggggttccgggtgactgggtgggtggggaggctgagggggtgagggtgtcagggtgtggggtgggtcggggagtgcctgggccacactgcctgtcgcccgccaggatcgtgtgtgtg

SEQ ID NO: 28836 - DNA, 2300 bp, Homo sapien
cacccaaagccgaggctcgggagaaacacttcccctggctacggagcagcagagcgggctcccctgccctcctgggaggacagaggccagggggtttggggggttgtcaaaagggtggagaaacacagtggtcagaggccaagctgctcccactgcatgtcagaatcccagccccacccatgcccgcggtgtggccttgggtaaattctgctccgtgcctcagtttcttcacctgagaaatgggtcacaggctgtcgtggtcagcctggccgtcagagacacagggatgtggaaacatttgcattttgtggcttgttctttgtacacttaaaactttttttttttttttttttttttgagacagagtctcgctctgtcacccaggctggagtgcagtggtgcaatcttggctcgctgcaacctccgcctcccaggttcacgcgattctcctgcctcagcctctggagtagctgagactacaggcgggtgccagcacgcttggctaatttttttgtgtttttagtagagacggggtttcaccatgttggccaggctggtctcaaactcctgacctcgtgatccgcccgcctcggcctcccaaggtgctgggattacaggcgtgagccaccgggcctggcaaaactttcaaatatgtggtgagaaagcggattgcgtttcgaggggatgagacatatgcagggaggtgacacttgtggtggcctgagaggatgtggcagtccctctggaggcacggggtgggcctgcacagggaggtgggggaggccagggcctccatccctcgtaaccctctgccatcgagtctggacccccttggcacctgccatggcagggctgccctggacacctgggagccccccgtactggtgcactcagggaagatgatggtgggcccaggagtgggggtggttgtgagcatgaggagggggcactggcaggggaggctgatgtagggatcactggccaggatggagcagggtccctagcgtgagagggacggaccaccctgaggaagagctcagaggcagaagggccctgtctctgccacttgtgtctgagcccccaagatgcagttgagtctggtagggagggaaagagagaggaccacgcatgtcctgggtccacctgtggggccttggatcttcctcctattgggagaccctcagctcagcctggtcctcagcagctcacccatcacaccacacatccccctcatccacccggacccaggcacagaccccacaccgagacgtgctcagttacacacacgcatgtggacacagcctgtccaggctgcagatgtgggggcctctgcctctgagacctggtggatttggagttgctcatggctccccaggtccccttgttgcctccgctgtgcgcacatcagaggctgtgccctgggcgtgacatgggccgagcgaggagctgtgggtgattgctggcttccactgtttcaccagggcagggggcctggaggtggtcagggaggctcaggccgcctgggggctctggcgggcagttgtaaacagcatgtgcacttgctgggctatgcacagggcacccctcgctctcacctgagcctctggtttcccgtgtccttcacctctgccccatgggtgagccacctgttccaacgtccaggggtctgtctgtcagcctgagcctgtgcgctggggccggtgcgtcccgaccacctggagctccttggggtcacaggtcagggggcatgaatgtgagcacttgagagcctttctgggggcgtcaactccttgcctcggggataggcctgccggtgttttcagcacctccgggagggatcctgtagcaggcgatggcagtgccttggccccagtggtcagtcagggtggacttgaggagggctgagaagtggtctccggcgagacctcgaggatggcgggggtgtgaagcaggaaggggcggagctccaggttcctcagttcgtggagtggcgtgaccctctctcccatgttctgacgtttggggcagggactggagagggatttgatcgggggtcctctgggtcggggctcccctgacccttctctcttcccacagggtgcggggggcaatggcactgcagctctgggccctgaccctgctgggcctgctgggcgcaggtgccagcctgaggccccgcaagctggacttcttccgcagcgagaaagagctgaaccacctggctgtggatgaggcctcaggcgtggtgtacctgggggcggtgaatgccctctaccagctggatgcgaagctgcagctgg

SEQ ID NO: 28837 - DNA, 2300 bp, Homo sapien
cagggtagcacagtccatgcacagctgtggagctcacctcccttcccgccgcccccctgctggtgtcactgcatgtccaaccccgggtcccgctgcacagggcacatgaggatcccggtggggtgggaggagagtggggcctggccctgcgggaggaggtgctttgctggcacacaacctggccaggctgcagtggactctggggcctgagcaggattcagtagctgaaccttggttgtaggggtggctattgagggcctggagagtcacatcttgaggcagagtggagcctaccttcttttctttctttcttttcttttcctttttttttttttttttttttttgagacagagtcttgctctttccccaggctggagtgcaatggtgtgatctcagctctctgcagcctcaggtgatccgcccgcctcagcctcccaaagtgctgggattacaggcgtgagccaccgtgcctggctcagcttcttatttagacaagcaatatgtaaatataatcttaaacttgtgttttgctttaatcttagagtcagggtctcgctctgttgcccacaatcatagttcactgcagcctagacctcctgggctcaagctactctgccttagcctcctcagtacccgggacttcaggctgtaccaccacacgcggccagttcacggtctagttcaagttccttgaacttttttattgtgtgtgtgtgtgtgtgtgtgtgtgtgtgtgtgtgtattttttgagacagtctcactctggcctgggctggactgccgtggcctcctccttgctcccaaagttcaccactattttcttttctttttttgagacggagtctcactctgttgcccaggctggagtgcagtggcgcgatctcggctcactgcaacctccacctcccaggttcaagcgattatcttgcctcggcctcctgagtagttgggattacaggcgcgcaccactacgcccggctaatttttgtacttttagtagagatggggtttcaccatgttggtcaggctggtctcgaactcctgacctcgtgatccgcccacttcagcctcccaaagtgctgggattacaggtgtgagccaccgcacccagccttagccggccactattttgattttggtttgacggcttctggagcctctcagagatggatggggccaaatactgcacccaggcttccccatcagaatcagcacagacgcacctgcatctaccatgtagtcttccacagtatcctctggtgggatgctgggtggctgccaaattttcactaaagccaaccatgcggagaagcaccctgggtctgtgcctccctgtgggtatagtcggtgtttatccagaactagaagatacaatagcaagggaagatacaatagcaagcattgctgaatgctacagtgtaacactctgaggctttttgtgaatgaattcatttagtccttgtaaacctctgggggtagctcaccattctgtctccattccacagatggagaatgaggcacagagaagttaagtaacttgcccaacgtcacacagctagtaagtgaaatttcagggtcatgggtgtgcgtatttttcagaaagcaactttttttttttttttttttttgagacgaagtcaggctggagtgtagtggtgcgatctccgctcactgcaagttccatcggccgggttcatgccattctcctgcctcagcctcccgagtagctgggactacagctgcccgccaccaggcccatctaatttttttgtatttttagtagagacggggtttcactgtgttcaccaggatggtcttgatctcctgacctcgtgatcctcccgcctcggcctcccaaagtgctgggattacaggcgggagccaccgcacccggcctcagaaagcaacttttattttaagcaaagtaatagccatacctagtttaaacaggcagaaagcccctgacagaggggagtgccaggagccctggaggtgtctgaggaaggggctgtgcaggggccagagggaagccaaaggccagatggggtcctgtgggatgtttcttcccccaagccccaccagcatgggacagaggtggggggctccacagcagaccgggctcctcttgtgaccggcgtctctcctttgcctcctagagaatctcgatgctggcctggagcagaaactgagctggaccactggagcctcggtgaggggtctgtaccccacctgggaaaggcagtgggtggctggggctatgtggacagggaggccggaggtatctagaactgccatgtgg

SEQ ID NO: 28838 - DNA, 2019 bp, Homo sapien
gatctgttttaactggacccctctgggtgctttgctgattacagcaagctgacctacagcaagtactccaggatagaagcagggggcccctgtaggtctcaggagtcaggagagagaaactggttttgaaccagaatgttggtagtggagctaccacatgttgcagtgatgaatccagtgtgggtgagagaggaggagagggctggccgggcgcggcggctcaggcctgtaatcccagcactctgggaggccgaggcgggcggatcacgaggtcaggagatcaagaccatcctggctaacacagtgaaaccccgtctctactaaaaatacaaaaattagccgggcgcggtggcgggcgcctgtagtcccagctactcgggaggctgaggcaggagaatggcgtgaacccaggaggcggagcttgcagtgagccgagatcgcgccactgcactccagcctgggcgacagagcgagactccgtctcaaaaaaaaaaaagaggaggagaggggctcctgctcaccccagttgcactggctgagcacaggaggggtatcaagatcaggcagagttgcacgtgctcacggcagcaggagcatctcctgcatctggtgcccctggccccagtccccattccgtagctcaactcagcagcacctcccgctcctgcaaaggagaccatggtgagggcaggagaagggcatagcctgctgaacgcagggtgtctcttctctaggttgtgaggctgaggctttttcacccccacttcctggaagttccctcaacggaacctgccagaaatctgccccttaggatgctaggggaaaagcttttgctggggaaaggctcgccagaggcatctgctataaaaccggcgaggagggtgctgctgaccagggcaggggacaggcgtcggggaagcccggggccgccagccgcagggccaagcccttttctcctgcaacgtctctggcgccctctaccgacaaagcctaacagcgccagctggcaaaagagaaataccgaatatttgagccgcccagatacgctttcgcagagagcatcggtgaatcctgggcaatacactgacaactggaaaaaacgtttagagatcccttaagtgctccatgttttcccaacatttacccacggctcgctctaacatctgaaataatagtaatcatttttgaaattattttgatggaattaaacaattccagcacttgttaaataggcacatacttaatttgcaaaacgccgtgcaagaacccgtagcgcacctggagaaaactgtctggaggcggctcaggcactccgggtccaggcaggacgcgggacggggaggggccaggcctggcgcccggggctgagcccgctcctgctgctcggggcgtccacgccccgcggcctctgggaggggcctgtggcaggagggaggcccgggagaacaggccctttcctgggccacgggggaaacccctgccccaggtgtgtgtctctcaaatgctgcgtcgggccacgcgaggattgttttgtggctacaacaaaattaactatgcttgcacaaaactttagccaatacctcaaagggaaacgtaaaaggggaaagacgcactcttaccccacccactccaaggcagcagtcagcacacccaagccctcgtgctcccacgcgggtttcaccgagtgccccactccagggggcccggagagccggcccaggtcccggccccgcccacccgcgcggccccgcccccggccgcgagcgtgcgcgccccaagcggagaccccgcccccggagcgcgtgcccgtgcgccgccgccgccattttggagcgatcggagtgccgcccgcggccccgagtcggtctcgagccgccggccggccgtgccggtgtccgtaggcgctgcgccctcggccgggcccatgtgtgtgcggcccgcccgaggccgcccgggctttgcctccaccagcgccctggcctccgctcgggcctccacacgggcctccgaagagctgcc

SEQ ID NO: 28839 - DNA, 2300 bp, Homo sapien
ctccagcacttaagtgatcctcctgccttggcttcccaaagtgctgggattacagatgtgagccaccacatcccacctttttgatttgtatataaaatgtaaaaatatgcaaaagtagagaaaacataattaacatctatgtacccatcacctaacttcgacagtgatcgacactttttttttattttgaaagatctgattttattttctgaatcaaaagtaagtgtattcatgttaaatttagaatgttttagctttccattgatctttcaagatgctttccaaatactaacagtgcacagaactatgtgccacgtcttgtttgtttgtttttgagatggagtcttgcactgtcaccagggctggagtgcaatggcgcgatctcggctcactgcaacctctgcctcccaggttcaagcaattctcctgcctcagcctcccgaggagatgggattacaggcgcctgccaccacgcccagctaattttttgtgtttttagtagagatggggtttcactatgttggccagactggtctcgaatgcctgacctcgtgatccacccgccttggcctcccaaagtgctgggattacaggcgtgagccaccacgcctggccacgctatgttttaaagaaaaaagtttaaaagtaggacctatttctttttttcttttcatttttttgagacggagtctcactctgttgcccaggctggagtgcagtggcgtgatctcggctcactgcaacctctgcctcccgggttcaagtgattctcctgcctcagcctcccgagtagctgggattacaggcgcctgccattgtgcctcgctagtttttgtatttttagtagagacggggtttcaccatgttggccaggctaatcttgaactcctgacctcatgatccacccgcctcggcctcccaaagtgttgggattataggcgtgagccactgcccccagccacaaatgtaggacctatttctaagaaaccctttgtagaggtcagggtattgggaatcctaatttaaaaatatttttaatcattattggaaatttaagtgacagtgggttcaagagctaaacgtcagaccttttttaaaacaaattttattttctgaaggacttcatacctgacaacgccaattaaacataatactccacccatcctacaaattattaaatacattatttcacctgggactaggataattataaaatggaattttaaagttgtaatatagccaggcacagtggtttgtgcttgtaattcctgctactcagcaggctgtggcaggaggatcacttgagggctgtaatgtgctgtgtgaactgggtgtctgcactaagttcggcatcagtatggtgacctcccagaaaaggaagactgccaggttgcctaaggaggtgtgaaccagctgaggttggaaatggagcacatcagaaactcccatgctggttagtagtgggactggagctgtgaatagctactgctctccaccctgggcagcatagtgagaccccatctctttaaaaaagaaaaaaaaaagaaaactatcttaaaatatcattttaactgtcatgtttgctagttgaattatgaaatcaaagacaaattttatatttaagggacagataataaatgctgttccattgctttatttttaaaattttgtaattgcttttttttgagatggggtcagtctctggtcacccaggctggagtgcagtggcatgatctcagctcactgcaacctctgcctcccaggctccagtgatcccgcctcagcctcccgagtagctgggactacaggcatgcgccaccacacccggctaatttttgtattttttggtagaaatgaggtttttccatgtcacccaagctagtcttaaactcttggactcaagtgatctgccgccttggcctcccattctgtggggattaaaggtgtgagccaccgcaccctgcctccttttcctgttgtctgccattttgataagttaactttaccgaggaagaacttaaagcaagatttttcctcttatttttcaggtaaagagattataaatcttccactgaatgaaaaaaattttcttaaagctgcatatactccaagaaaaaaaccacaaatgtttttctgttttgcctgaatacatgatttaaacaagagatttccacagaaggtaagataagtttctttttcaatttgattctgttttattgtgtaatttatgtaaaagttctgtacaggtggaagttcaaagatgggtcacagcgaaaaacgtagtttagaagatatgctgg

SEQ ID NO: 28840 - DNA, 2300 bp, Homo sapien
aaaaaaataaaaaataaaaagaaataaatatttaacaacataaaaatatttgtaagaaacagtaaaaggtgatatagaatatttgaaaaaggaccatgtagaacttctagaaataaagaataaaatattcagtatcacaaattcaggccaggtgaggtggctcatgcttgtaatcccagtactttgggaggtagaggtagggagatcacttgagcccagaagttcaagaccagcctgggcaacatggtgaaaacctgtctctacaaagaatttttaaaattagccaggcgtggtggtgcacacctgtagtcccagctacttgggaggctgaggtgggaagatcactcgagcccaggaggtcaagccatcattgtgcaagtgcactgcagcctgggtgacagaacaagaccctctctcaataataataataataattcagtgtgtacaggtttaataacaaaatatatacagtgaagtgaaaatcagtgaaccagaaaacaggtcagaaggaattacccagaatgaagcacagagaaaatgatgggaaacataggccagaacatgggacatcgagggcaaatgtctaatggatgtttacttaatgttctgtaaagagaaaagagagaatgaggcagatttattattagaaaagataaagactaaaatttctcagaattggtgaaagaagtctacagatttaggccaggcgcggtggctgacgcctgtaatcccagtactttgggaggctgaggcgggaggatcacaaggtcaagagttccagaccagcctggccagcatggtgaaaccctgtctctactaaaaacacaaaaagtagctcagcgtggtggcacgcacctgtaatcccagctactcacgaggctgaggtaggagaattgcttgaccccagaaggcggaggttgcagtgagctgagcttgagcgctccagcctgggtgacagagcaagactccgtctcaaaataaaagaagtctacagatttgagaagacaaatgaatggtaagcaggataaataaaaataaaatttatagctagccaaaggagagtaaaactacaaagcaccaaagagtgttcttaaaataaacgaaaaacacagatcaactttatctgagcagcagtaagaatgatggctgacttcttaagtgccacaatggaaaccagaagccagtggagtaatattttcattgtgctgaaagtaaaacaattcctgacttctaactttatatcaggaaaaattatctttcaaaaaaattatctgctgtaggctgggtgcggtgggtcaccctgtaatcccagcactttgggaggctgaggcaggtggatcacctgaggtggggagttcgagaccagcctgaccagcgtggagaaaccccatctctactaaaaatacaaaattagccagacgtggtggtgcatgcctgtaatcccagctacttgggaggctgaggcaggagaactgcttgaacctgggaggtggaggttgtggtgagctgagatggcgccattgcactccagcctgggcaacaagagcaaaactctgaaaaaaaaaaattatctactgtagttgaatgtttatgtccctccagaattcatattgaaacttaatccccaatgcaatagttttaagaggtggggcttaccagcctgagcaacatggtgaaaccccatctctacaaaaaaaaaaaaaattagctgggcctggtggggcatgcctgtagacccacctacttgggtggctgaggcaggaggatcactcgagcccaggagattgagactgcagtgagccatgattgcactgctgcactcctgcctgagcaacagaattaaaccctgtcccaattaaaaaaaaaaaaaaaaaggtgaggcctagaatatgatgaggccgtgagggctccactctcatgaatgggattagtgccttgtagaagggcttgagggagtctgttagtcccttttgccatgtgaggacacagtggaggcaccatctgtgaaaattaggtcctcatcacacactgaatctgctgctgccttggttttggatttcccatctcccagagctgtgagaaataattttctgttgtttataaattacccagtctaagatattttgttatagcagcagaaacaggctaagacacagtcctttactaaatacaattctcaagaataggggccaggcacagtgattcatgcctgtaatcccagcactttgagaggctaagaagggtggattgcttgagtccagaagcttgagaccagcctgggtgatgtggtgaaaccccgt

SEQ ID NO: 28841 - DNA, 2300 bp, Homo sapien
agcccacactaaaagagatgggggctataaaggcatgaactccaggacgggattgctaggggccccctaggagccacccaccctggaagcacctaaggtgacaatggggctccctgtggtgatccctgttgagagtttggggtatatcccagtaggccttttcctagcattacacataccgatctatacatacaaccacgtgtccttggcagattggaaaacagtggtgctgactcgtgtctgaggccttcaccgctgcctggccaaccaccctactttgttctccatcagcccacagggctgatcagacagacaggagaggccacgttggcgtctgtaggaaacaaggaggccgccctgcctgatgttggcgtctgtaggaagcaaggaggccgccctgcctgagaactggagcccacccatgcatgtgggtgttgtgggctgatggcctggcctgggtcccaaaggcagacctgagagctaatctggctgctttcttttctccctaaaatactcctgtgagtgtttgctttccctcagtcttcccacagcatgtgaaccaatgctgcagggagtcaggggttgtttctctcttaatcacatttgtcttacctacagaacagccctacattgtcagcaggggcacgttcccatcacggattgcgtgttaatgtttccctagaaaagatgagtcctctgttttcttggtagcaacttccctattttcattagcttacaggactcattctgaataatagcagctacttattaccacatttaaaatatagtatcagtaacatggccacatattcagcatatttcaaaacgtggatcacaggtatagcccagtatctgcattgcatatctgaccattattagccctgttttgaattcctgaagatagttcaatgcagctttaaaaaaaagaaaactctaaccagatctacattttgacgacagaaaaggcagacacaggcttctttgaaatgaagctgttgtctggaatctttctttgtaggaaactggtttagagaaagtcccacatctttttctttttttttttgagatggagtctcgctctgtcacccaggctggagtgcagtggtgcgatcttggctcactgcaagctccttctcccaggttcaagccattctcctgccctcagccaaccgagtagctgggactacaggcacccgccaccacgcccggctaattttttgtatttttagtagagatggggtttcaccgtgttagccaggatggtcttgatctcctgacctgatgatctgcctgccttggcctcccaaagtgctaggattacaggcctgagccattgtgcctggccaaaagtcccacatcttaaaaaaaaagaaaaagtatttgaacatcacagtggtattgaacaacaacgaaagtctagcatctgccagagaagcagcaggacttgtgccctgtgtgcccagcagggctggtcctgctgtttcttctccacactgagggactctgtgtttcccttgtcttttcagaggcagtcaaatgcttctcagactctctgtgacatagttaggctgggcagagaccagggcagtcagctgcaagaggctctggagccagacccgctcctcacagcgctggagtcgtgagtgctggtgggccgtggtgctggtgggcctccctttctgggtcatggggacgtctgtgagccttgctctgagcaccaggatatgttgccacctcctctgattcacattcgaatgaaccccaggttcagagcccatgttaacttggggcctgtttccagagggaggggtctccagaggagtcacctggtgggtctagagagtgggccagcagcagcaggagtgtcctgagaaccctggcgccttgccttgagcctgagcaggttgagggttttgctggggtcctccacggggaggaaggagcatccttgcatcctttgtgtgtgtgtctgctctgccaggcagtgacctctgtgtgtgtccagcaggcaggactgtgtggagcagcttctgaagaacatgtttgatggagaccggacggagagctgcctcgtcagtgggactcaggtgttactcaccttgctggaaaccaggcgggttgggtgagtctcacgaggagaaatcgtgtagagctgaacttgacgcctcagtgatatggcagcccacacgagcagtctggattatgtcatttgtggttttaatttttgattatgcaagtaacaacatggatagattccccttgttgaaggcttgactttatggctgtggccaagtcccctt

SEQ ID NO: 28842 - DNA, 2300 bp, Homo sapien
caggctggagtgcagtggcatgatcttggctcacggcaaccgccgcctcctgggctcaggcgattctcctgcctcagcctcccaagtagctgggattacaggcgtgtgccaccatgcccggctaatttttgtattttcagtaaagatggggtttcaccacgttggccaggctggtcttgaactcctgacctcaggtgatccaccctcctcggcctcccaaagtgttgggattacaggcatgagccaccgcacctggccgtatgtggaattttatcagattttttttgtatgagttgagatgatcatttggctttcgtcctttatcctgttaatgtggtgtattgattgattttcatacgtcgatccatccttgcatttgaggagcaaatcccactttatcctggtatataattcttttgatatgatgctaagtttggtttgctagtattttgcatccatgttgataaggaacattggtttgtagttttcttttcttgtagtgtcctcattcagctttggtatcagaggtaattctgtcctcacagaatgaattagaaagtattctctcttagttttttggaagagtttgagaaggattagtgttaactcttctttaaatgtttggtagacctcatcgccaggaaaggaaaaacaaacaacaaaataaatgtttggtagaatttaccagcaaagccatctggtacgggctttttgttgagaggtaggtctgactccatgttacagatgaggtgacacaggaaagcctcctccaaggttgctcaaggtcacatgggcagagaaggtgaagccaggatttaggactacgtttctgtggagaacatgaagcaaatgagcctcctgcctttctctagctccaaccccactgtgtggaacgaggagcccaagctcgaatcctggtgtggaatatacacctcaccccattcccctctccatacagtcctccttctccatggaggcagaagagggtctgggacacaggctgccgtggccctggaatgtaagagacggcagtggggggcgagtgcgtcagacctatgtccccctctctgtcctcatctggaagaagctacatgggaggtgagagatggcagctgtcctcgttcagccacctctgtcccccaggggagtatctaggtggccagaaccacctctgggcttcagcccatgctggttaagtctgggctcccttggggagtgtctgaatgtgcccctcacagtctcacgtttgtgtggtggacgatatgcacacgcctgcccatcctgggtggaatcctcatgtgcttgagagtctaacacacttccaataattcatgagaaagacagaatcataaaggaacttctcacatacttagaactgaagaatcataaaaatactacttagcaaaatgtgtagaatgtagttaaagttgattgtatacagggaaatgtagcctttaaagacagactggaaagaaaggctgcaattaatgagttgagcttccaactgaaggacaaaagaagccaggcctggtgacttatgcctgtcatcccagcactttgggaggcggaggcgggcagatcacctgaggttggaagttcaagaccagcctgaccaacatggcaaaatcccgtctctactaaaaatacaaaaattagctgggcatggtggtgggcacctgtaatcccagctaccagggaggctgaggcaggagaatcacttgaacccaggaggcaggggttgcagtgagccgagatcgtgccactgcactctagcctgggagacaaagcaagactccgtctcaaaaaaaaaaaaaaaaaagaataaacccgcagaaagtagaaaggtgatgattcagattgaagcagagaccaacagacacccacaggcaggaggcagaagtgctcagtggctatttgaagaagctccgtaatagagagatgaccctcaggaaaacgcttaaaactccttcctagctacccagagactggacttgtgaggagttaggacgccacctttaggaagggtttccctcagctttgtggtgtagccggcaggagaaaaccgatctaagaactgtcttctgtcctctgtttacccaggacttgttctttaagtacacctggaataactttttgcacttccaagtggaactatgcatagccgctattctctcccacgctgcccgtgaggagaggacagaagccagcggatccgagagcagggtggagcctccgcatgagaacgggaaccggagcctggagactccccagccggccgccagcctccctgacaacacaat

SEQ ID NO: 28843 - DNA, 2300 bp, Homo sapien
ccatcacaagccctggccccctgagtggaggacaaagggccaggatgtggagggagggactcagagacagacttgctctaagctggtttgagtgggaagaaaggaagtgttagaggagagcccgggatccccaccgcatagcccttctgctgccacggagtgctctgcggcctgccctgccctggcagagaggcccacaccaggatggctcttcccactttcctgcgatcagggacttggggctgacccctgctgtctccaggctccctgggggcttggtggaaccctctgacctgtaggcacccccaagctgggcacgcccaggcctggggctaggcctgagccttctctctgctgtgccctcagttcccagccccagagccagggtcaccacgctgtccaaccccatggcggcctcggcctccagacggaccgcaccccgaggtaccgtaccgagcctgcgcaggcccgcctccccttacttggtgctggcggcctctagtgtgcactgagttattgcgggcactaatgtctccctccacacctgacactaacgacccgtctcccgagccccagtccttacctccctgacccgtgagtcctgccctagaaactaacactggctgccaccccacgtctcagaatctgtgtgttccagccctcctctcgcacggccctgctggggtcctgccaaccacccctgccctgggagctcagccccctccctggaggccgggcccagccagccccaggtaagtggtgccctggccccctttgggtgcttacctggcatctccttcacaggtaagtggggcagtgtccggaccagtggacgcagcagtggccttggcaccgatgtgggctcccggctagctggcagagacgcgctggccccaccccaggccaacgggggccctcccgacccgggcttcctgcgtccgcagcgagcagccctctatatccttggggacaaagcccagctcaaggtgactggggtgcggggggtggggggtgagggtgggggctcggcagggggcttggggcctcatgtgtctcacgggacttgtccggattcttttcagggtgtgcggtcagaccccctgcagcagtgggagctggtgcccattgaggtattcgaggcacggcaggtgaaggctagcttcaagaagctgctgaaagcatgtgtcccaggctgccccgctgctgagcccagcccagcctccttcctgcgctcactggaggactcagagtggctgatccaggtctctgcactgccccgtccctctgcccgccttggtgctgggccctccccttgggtagagccaagtggacgggtctaggtttgcttgtctgacagtgtggagcgctggaaggaggaggtgacagccacttcccacccaggctctggtgcctagaaggcagctgggaggctgggcctggctggggccagctgacagtgagagtggccagggcttgggcatgggtatgtcggagcagcctgctgggcccacgtgggctgatgaccacacgggggatgcagtttatggttctgggcccctgctgcattctctcgggggtgggtactgacaggatgctggcttggtaaacactggagggcttgaaggtagggccaccggcatcttgagggacagggacgtccctcagtcctagagggcttggaagggggtgggctgtgaccagcaggctggaggcggtggtcggcacacccagagcgagctgtgtttgtccagtgctctgcccgcatacagggcttggggggctgtggacagggcctgcctccccgctgcctgtggacatgcgggtctctggcctggtgagtggccaggcgggagggcggtgggtccccgaggtgctgaggccgcctgtccctgcagatccacaagctgctgcaggtgtctgtgctggtggtggagctcctggattcaggctcctccgtgctggtgggcctggaggatggctgggacatcaccacccaggtgtgtggcgcgtggggctggggtgggccaggctcccgggctcctcgctgacctcctggcggtgctggcaggtggtatccttggtgcagctgctctcagaccccttctaccgcacgctggagggctttcgcctgctggtggagaaggagtggctgtccttcggccatcgcttcagccaccgtggagctcacaccctggccgggcagagcagcggcttcacacccgtcttcctgcagttcctggactgcgtacaccaggtgggcaggccgctgtgtgggtgggccgggactgtgcaccctgacc

SEQ ID NO: 28844 - DNA, 2300 bp, Homo sapien
cagcatctgcgtccttgtgtctggcctggtgaacttgtacttgtggagttgtcgggcccactggaggttttagtctttattggtcggcaaagccccagagtctggcacaccccacctgaaaggcatttgggtctcctggacacctgctgccctccctgccagggccccgagtgggtcttctctgtgccctcagcccgtgtctcctttccccacccccagctgctcccagccgtgttgagggccctgaaggggcgagctgcccgccgctgcctcgcccaggagctgcacctgcatgtgcagcagaaccgtgcggtcctggaccaccagcagtttgactttgtcgtccgtatgatgaactgctgcctgcaggtgaggcctcttatcctgctagtgacatggctcatggcgcatgagcgggaacaggcgggcagaccctggtctgtgagtgagagtggagagacggtgcaagagactcctgtgccagtgggcaggggtcctcggtctgcagggaacagggtggagagaaccattgttgggggcaggtgctggggcctggggtctcctgatattgagcctctgaggcagccttggggagctggagccaagggtgtcaggtgctggtctgtggtggttatggggtggtgggggcatggtgggaggtgagtgctgcctgggaggggagaggtcctgacggtctctcgctctacctgcaggactgcacttctctggacgagcatggcattgcggcggctctgctgcctctggtcacagccttctgccgggtgagtgctggcatggctgaggtctccttcccagcccccccttcctggtggctgaggtctccttcccagccccccttcctggtggccgaggtctccttcccagccgcccttcctggctgcatccagctgaccttctcccctggctcctgcagaagctgagcccgggggtgacgcagtttgcatacagctgtgtgcaggagcacgtggtgtggagcacgccacagttctgggaggccatgttctatggggatgtgcagactcacatccgggccctctacctggagcccacggaggacctggcccccgcccaggtgcgcagggactccctgggctgggggctgggggctaggggctggggcagcgtggccccggctcatgcgtgtggtgccgtggcaggaggttggggaggcaccttcccaggaggacgagcgctctgccctagacgtggcttctgagcagcggcgcttgtggccaactctgagtcgtgagaagcagcaggagctggtgcagaaggaggagagcacggtgttcagccaggccatccactatgccaaccgcatgagctacctcctcctgcccctggacagcagcaagagccgcctacttcgggagcgtgccgggctgggcgacctggagagcgccagcaacagcctggtcaccaacaggtgaggcagggactgggggttgggcccagtggaggcggggccgtggtgggcagggcccatgcccacagtttcttctctggcccagcatggctggcagtgtggccgagagctatgacacggagagcggcttcgaggatgcagagacctgcgacgtagctggggctgtggtccgcttcatcaaccgctttgtggacaaggtctgcacggagagtggggtcaccagcgaccacctcaaggggctgcatgtcatggtgccaggtacgggggtttgggctggtgattcccccttggatgggtggggctgggcacaaagtgtgagaactgtcttcccccagacattgtccagatgcacatcgagaccctggaggccgtgcagcgggagagccggaggctgccgcccatccagaaggtttgcgggggccgttggggctgcgggggcccaaggcccgggctgcatcctgagctcctgctcttgttttcgagcagcccaagctgctgcggccgcgcctgctgccgggtgaggagtgtgtgctggacggcctgcgcgtctacctgctgccggatgggcgtgaggagggcgcggggggcagtgctgggggaccagcattgctcccagctgagggcgccgtcttcctcaccacgtaccgggtcatcttcacggggatgcccacggaccccctgggtgagcctgcagactctctggccctgtcgccccctctcccccaggtctttgggatggatgggctttccctgcctccctctcccttttctcgggggttctgggtgcccgtgggaaacgggcctttgtctgctccttccccacccacttgggattccccataactgtggtacc

SEQ ID NO: 28845 - DNA, 2300 bp, Homo sapien
gcaggtgagttttggaggcagctggtatctgcacagccacaggccctcctgctggggccctggtaggtatttggagcccagccagagccacacacagctggaggccttggatgctccctcttgcgtcctcgtgccaccattgcccccaacagtcctggcctgcttacctggccctcgcacctgtgctctgggcctgtgtcgttcagcctctctgtccactcctttgatggtgtgtgcctgtctctggatgttgatgtcagcttgtttgtctgctccctgccctgtgcctgggtgtgttggagtgtctaaccgtgtctttctgcccgtctgtcctgtgcagctggactctgttgaggaaggagcggtatggattctttgtttcttccgcccacctaggccccatccctacccccaagtcaaaagcagccactcctgtcctgagttttctctgcagctgcttgggacaacagaggcagggcatggcgtttccctcttgccatgttgcccatcccagccagtcccacctcgggtctgtcagtacaccagggtctgcctggggacacagagctctgggctgactctgggctggctctggccaaactactgagccccgatcctttttttgctgcagaggacgatctctttgggggctggtgaccggcaggtcatccagactccactggccgactcgctgcccgtcagccgctgcagcgtggccctgctcttccgccagctaggtgagcctgtctgtcccacccccgcatggcttcccctcggggactggtagttagggatgtgggttctcactctgcctgggtgggggcccagggtcctctccaagcttctcttcttcctttaggcatcaccaacgtgctgtctttgttctgtgccgccctcacggagcacaaggttctcttcctgtcccggagctaccagcggctcgccgatgcctgtaggggcctcctggcactgctgtttcctctcagatacaggtgacccctgcccggccctcccagccccttctcctggcccctttgcccagccgcgtcccctggctcactgcatcctctggggcctgcacagcttcacctatgtgcccatcctgccggctcagctgctggaggtcctcagcacacccacgcccttcatcattggggtcaacgcggccttccaggcagagacccaggagctggtaagggctgtgctttgtgtccacctcacggcccaggcctgcaggtccctgactgccggctcccttggtccgcagctcgatgtgattgttgctgatctggatggagggacggtcaccattcctgagtgtgtgcacattccacccttgccagagccactgcagagtcagacgcacagtgtgctgagcatggtgaggggcaccatgggcaagcgggagccttgggggcctttgggatgtggctacctggcagcacggggagcctagagccggggccagcgtgcagctgcctgctccattctgtgctggcaggtcctggacccggagctggagttggctgacctcgccttccctccgcccacgacatccacctcctccctgaagatgcaggtgggggtcgttgctgctcctgcatggggaccccaggcacttaggctgcccccactcaggtctgctgccactgacacacagggccccacccccaggctggccccggctccagtagcagaagcaggagcctgggagcaaagcagctgccagcagttaggagtggtggtcgtgagtggtgcaggcgaggcggcaggggcccagcaaggggctggaacttggcgtctgatcacaggagcccttgagggtgctgagccaggagtgccttgtccagacagtttcagaggagctggtggccctgagtgcagaatggtgggaggggcagaaggatgggagcggggcagcttggggtgggttggggtgtggagaagctcctgggcagcctggggtggggattggcaggactggctctcacctgcactcagctcttctcccaggacaaggagctgcgcgcggtcttcctgcggctgttcgctcagctgctgcagggctatcgctggtgcctgcacgtcgtgcgcatccacccggagcctgtcatccgcttccataaggtggggtgcctggtggctgggcgtggggtaggagataagcgcatggtggagacccctgagggaccgacctccttctgtcatccaggcagccttcctgggccagcgtgggctggtagaggacgatttcctgatgaaggtgctggagggcatggcctttgctggctttgtgtcag

SEQ ID NO: 28846 - DNA, 2300 bp, Homo sapien
tctgagacactgagccactgtggatggttgttcccaagggcctggtggaagcatgacagtggagagagtgcgacgcagggtccccagagtctcagagagagtggagagtgcggtgcagggtccctagagtctctccgaagagagccagccctgggctcaagcactagcccagacttgccccgggcccctgccagcctgcacacaagctcagtggtgtggtagtgtggtgctgaggacctttttgggtacaagtgacagaaaccaacttgagccagctggggcaaaaaggaggatttctggcagggcacagtttctcacacctgtaatcccaacactttttgaggcagatgcaggaggatcatttgaggacaggagttcaagacaagcctaggtaacttatcaagaccctgtctctacaaaaaaattaaattttaaaaagatgatttctcaacctgtgaaaaccaacagtgggagaggagaggcgtagcgtggcctgtgcctgagggcagggaggggaccctggtggggcctctcagtttgattccattcattctcttgggctggctcctgcccatggatggagactggatgccagtcatttggccagttcttgcagcagccaaactcatttaaaaacagaccttcagggccaggcgcggtggctcacacctgtaatgccagcactttgggaggccgagatgggcggatcacgaggtcaggagatcgagaccatcctggctaacacagtgaaaccctgtcgctactaaaaatacaaaaaattagctgggcgtggtggcaggtgcttgtagtcccagctactcgggaggctgaggcaggagaatgatgtgaacctgggaggcggagtttgcagtgagccaagatcacgccactgtactccagcctgggcgacagagcgagactctgtctcaaaacaaacaaacaaaaacaaacaaaaaacaaaaaacagaccttcgggctgggggcggtggctcatgcctgtaatcccagcactttgggacgccatggtgggtggatggcctgaggtcaggagttcaagaccagcctggccaacatggtgaaaccccctctctactaaaatacaaaaattagccgggcatggtggtgcacacctgtaatcccagctacgcgggaagctgaggcgggagaattgcttgaacccaggagacggacgttccagtgagccaagatggtgtcactgcacttcagcctgggtgacggattgagactctgcctcaaaaacaaaacaaaacataacaaaaaacagaccttggcctgctgtgctcagaggggtttccctgctgcaccaggctggctcctgcaccttctctcccagcatgttctgctctgggctcatgctcatccctgagccacttcaggggtggccctggccagccctgcccttgagaggggtgggcactgtcagggatcctgggggatgcagctttcccagagccccctgctccgtggcctcatgtgcctcacacgcttagaacatttgctctttacagggggacatgagcgtgccgtttttaagctgtgttaaatgtctcacttggcctagatgggggctcttcagcctgggaccccaagggcagggcctgaattctctctctgttccccatcgccaggctggcagcccctgaggtgatggccctgcgcctcctctgacttctagtttggggggcccggtaggcagcgcctaggcttctcccgcctttctcccgctggacagagaggggcgggggacgaggagtctggggacccgatccccagattgggacggcccaggggtggggttcgggctcctgtgcggggagtcccaacggcgagggcagctgtggtcctggcccatgcctcccgccgacaccacagccgacccgggtcagggcgtcagacccgccggagccgtagtccaggtgcccggcccgaggggcggtgctcgggccccagagtggtcagcgatgggcggggcgctgctctcgggagccgccctcccaccctctggaccaatggagatgcgcggttgcaggccccgcccgctcagggcttgacgacagcgcgcaggcgcacggcgcgcccgggcgggccggctggctgggaagatggcggcgggaacctgggccgccgccgccgccgccgccgccgccgcggagcgaaccaggggtgtccggggtgcgcggtccagggccggggccgggccatgagcgcgccgtcctcgagtccccgagccgcggagcccgcccgcgcccctcgggccgccccgcgtccctcgccatggc

SEQ ID NO: 28847 - DNA, 2300 bp, Homo sapien
acaacaacaacaaaacactgggtgcagtggctcacacctgtaatcacagcactttgggaggccaaggtgggtggatcacctaaggtcaggaattcgagaccatcctggccaacatggtgaaaccctctctcaaatacaaaaattatctgggcgtggtggtgggcacttataattccagctactcaggaggctgaggcaggagaatcgcttaaacctgggaggcggagtttgcagtgagctgagatttcgccacggcactccagcctgggtgacacagtgggactccatctcaaaaaaaaaaaaaacatataaatgtgacactccctgccccctcaactggtcaaaataagtaaataatacctgcaaggcatccctgccctcccagatcggcctgtggggtgtgtgctcggcactcctcgacttattcacccagcaaatgttgactgtgctcccatggtgtgtcagcaggagggttacggggtgagcgcaggggttggggagacagaaggggaagcacgaacggacgcagagatcctcagctcacccaacagagaggccagtctcagcagcttggaacccgtgacaccaagtccaggactcgtggacagtgggtaggcgaaagctctgtggagaacagtgaaccatctatcaacataaacacatgctcaccttcaaccagaatttctacttccaggaaggtgtcctatagacacatctgtgagctcaaggcagcaactcatgaaaagactggcagtcacctaatttcatattaatagcagatgagatgaatcatacaacacctatatgttggagtagatccaaccataggaaagagtggggtctctgatgtgaggacggtcgggctgtgacgcctgtcaccccactggtcaccagtgttgattcggctgatgtggctggctcagaggcaggtgtccccctccttccccactgttccctgtgcgtccctccgaagctgcacgctccatcgaagaggatggaggaccgggcttcgagtagctgcgctcctctgccaggacctccaaacaagctctcaggaaagaacggggtctcagtcctactgcaaatctgcacacatggatgtgtgtgcctcacatagccacacctaggtgtgcccagggcaagtcaggagagggctcccccccagaccagggtaggggtcccaagtgggtggcaatggtgaggggagtctcacgtttcactcgttttaaatttttctttttcttttttttttttctttttttgagacggagtctcgctctgtcgcccaagctggagtgcaatgccgcgatgtcggctcactgcaacctccgccgcctggattcaagcctcagcctttcctgcctcagcctcccgagtagctgagattacaggcacccgccaccacgcccggctaattttttgtatttttagtagagacggcctttcaccttgttagccaggatggtctcgatctcctgacctcgtgatccgcccgcctcggcttcccaaactgctgggattacaggcgtgagccaccgcgcccggacactttaaatctgttacaaaaaccgtgcaatactttggtccggggttggagcggccgagggtcggtacagccttttaggagcgcagccccggggtcggcggcaccgcgtcagaggagagcggaatggccagcccgctgcggaatcccgcggacttgctggtcaggctggggggccggggtccaccgggtcagaccctggagggtgggaccgcccggactcgggaggtggttgacggggtgggccccgtcgggtccgagtccgccccagccgtgggatcagctcggacgacggttcgccccccagaaccccgctgcagcgtggggaagtccggcccccgcaggctcggggctgcgtccccaccagaaggcgcttggagtgaggctggcggtcccgcggtcccgggccggtcgccgagcgctcccagcggggacaggcccctccaccgctcccttcgccgcagccccctccccgccccgagggtggctgggcccggaggaggggcgccccgccccgtccgtgcatccggctccgccccttgctggaaaggctacgtattcagccctggaggtgccatcccgggccgcgactccgctccaggcaggacccccaacccgcccagcccgctccgccttgcgccccggacccgcggccgaccccagacccgctgcccgcttcgcgcccgaggcctgcgccccgacggacgcccgtgcccagcttgccacgcccacgcccggcgccccgaccgcggaggac

SEQ ID NO: 28848 - DNA, 2300 bp, Homo sapien
cgtctggggcctgcctgtggtcagggccaagtgttccctcctccaggaaagcctttaccctcctcatgccctgtagtcaggaggccgcctgctgtaaccctccgtgtcgcctcgggtgcgaaatcagacccacctgacaccatcacgcggaggcccagcagcacctgcacccacttccagctgctctggccaaaatctccgctcggccaggccccgtggctcacacctgtaatcctagcacattgggaggccaaggcaggcacatcacctgagttcaggagttcaagaccagcctggccaacatggtgaaatcccgtctctactaaaaacagaaaattatccgggcgtggtggcacatgactgtaatcccagctactcaggaggctgaggcaggaggatcacttgaacctgggaggcggaggttgcagtgagctgagattgcgccattgcactccagcctgggcaacaagagcaaaattctgcctcaaaaaaaaaaatagtaataatacaaaaattagctgggcgtggtggcacatgccagtaattccatctactcgggaggctgaggcaggagaatcgtctaagcccgggaggtggaggttgcagtgagcccagatggcgctgctgcactcaagcttggatgacagagcaagactccgtttcaaaaaaaaaaaacctcctctcttccttcacaccttcctctgaatcccacccggtcccacctcctgaacctatccagacaccttctcctgacccaggcaccacctgctttcggggcgatggccgtagcctcctcccaggcacctgtctgcatccctctggccagtgcatgctgagcacgtgacctacccgtgttgggacacgtgaggatacagccttgacccccaggggctgacattctagggggagatagaaggagacaaacgtagaaggtagaataagtgggtggtggagtggcagggagtgctgagtgccacaggaagtcagacaaggaaggagagtgtggggcaggtgccgtttaaatggggggcgctggggtctcctcacagttgcttctcagctcagctgtgccaggatcttgttgagtcaggtcagctgcccacagccctcttgcctgacccctgaagcccagaactctgatcttcacagccctaggtatggccccagcaccccactgccctctctcctgccccagccgactgctgttcccagacttccctggccacgctccaagacgccagctctgccgcgggcactttgttctcacggtgtcctccatgcctgcagggcccatgcatgggaagttgcgttggcggcctgggtgttggcggttccgtgcctgctccaactctccgtgaggcccctctcccagagcctgacacactctgtggccgaactctaggcaggtgcccctgagtcctttcctcgacgaggcctgaccccatccccatcctcgctgggcccgccgaccccggtgttagcaagaatcctctaaatcagtttatggagaattacccaccctcgatatctgatcccattcctcatctcccacccttgatctcatcaccctgccggcctcctgcaagatcctcattgagccactccagtgagaatccccctaccctcgaaggccgccctaacaacttcccatccgctgacccctccaacgccatcaatctccagctgtggttgttgaactcggaggtgagctcctctcaccactctcttgaataaagcttttctcaccattttaacaagtcctcagaatcatcttttcttaacaagctcctgccccacccagaatcacggggggcctggggacaagttttcacctcctgagatccagtggggcagccggggaaggggtggtgcagagggggcgtgtgcttgagggtggggtcttgggtctgcccctacttgtgggaccccacagaggggtctaaggccagggcccaagtgggaggctgggcccacagataaccctaggcaggtcagcggctcgggacaggagtgtgaggctgagtcagggccagaggatgtgggactgctgggggctgctgctgtgctgacacattaactccctgaggccgggaggagggtggatggtcatttattactgcggacacttatgtaacctggggtgtatataggagcctggctgaggacacactcgccagcctgtgctttgccacctgagcgccgctccctctcaggatgaaggtgacggtggtgagtacccagaccccatgcagagaggctctgctgactgctctcctggtggccagccactcccgccctct

SEQ ID NO: 28849 - DNA, 2300 bp, Homo sapien
gcttccctctacacgcaaatcccaggtgaaggcacccagggtgggacacccccagcctcggcgcgggaccctatgtcctcttttctctgtgcccggcactcacgcagtccggggttgggagtgagggccaggccttggcgtggggtagggggcggcggttcgtgtcctgcaggccgctgtgggggtaggaaggtgtgcggtgatccatttcccgtaaggctctggactctgacctggggtgggggacagaactctgagagaggtgggagagaggcttcctcccagacctggtgggacaggtaggagatcgggctgagacctggaagagggcagtgggctctgctgggtgggaggccctgactcaggtagttgagcaggcctctagccctgggacggggttttgacaggtcccgacctgggggacgggctctggagggactgcagactctgacctagggatggaggtatccgcatgctctgacctaggctgggggatctgcaggccctgactcagaggtagtctagtctgcaagggctgtccagggcctggccatgacatgccctcccacaggcctgtatggccccgagggcatcctacctgcaaggaggacgctgcggcctcagggcaaggggcgctggcagcagctgtgggagaccccgacgctgctgtgggaagcgccgagactggggctggacacggcccagggcctggagctgctgagcctgctgggtgcactagtggccctgggagccctgctgctgagcccactgcgccaccctgtcatctacttgctgctttgggccgcctacctgtcagcctgccaggcaagtgggacctgtgaccagctcactctatctccaacccccaccacccacccctgcctctaccttacctgagtccacagacacacccgctccctgacagcccctctctccgcaggtgggccaggtgttcctttatttccagtggtgagtgacggctgggcctggggctgtgggaggctgggtagggggtgggggagggctctgcccttcctgggaggactttccgagggaagcagctgtgtggggaggggctcttggtgctatttgctctccccatagggactccctgctgctagagactggcttcctggccgtgctggtggccccgctgaggccagcctcccaccgcaaggaggccccccagggcaggcaggcaggggccctgccccacgaagacctccccttctggctggtgcgatggctgctgttccgcctcatgttcgcctcaggcgtggtcaagctgaccagccgctgccctgcgtggtgggggctcactggtgaggggcccggtctggacctggggtagtctgggggctcggccagccctgactcctgccctcgcctgcagccctcacctaccactacgagacccagtgcctgcccacgcccgccgcctggttcgcacaccacctgccggtctggctgcacaagctcagcgtggtggccaccttcctaattgagatcgctgtgccgcccctgttcttcgcccccattcgacgcctgcgcttggctgctttctactcgcaggtgggtgagggccgcagctgtcagagagaggcagacagggctcggccttcagcgctgctcagcgtgccctgttggggacagcgtggctcccggggacagctggcaaccgctgttgggaaggccttgtagcagagggatgcaccctgcagggtggaggtgggtgcctgccacggggccaggcgtcagtctccgggagcactgagagcgggccgcccccaggtgctgctgcaggtcctgattatcatcaccggcaactacaacttcttcaacctgatgacgctggtgcttaccactgcgctgctggacgaccagcacctggctgctgagcctggccacggcagccgcaagaagacggccacctgtgcgtgtcacttgtccagccccctgccctcccaggggttctcccctccaacacccccacaggactcccactctagctgcaccccagccccctggctggggaccctctgctgacccatgactgtcctgccccacagcctggcccaaggccctgctggccaccctgtcgctgctgctggaactagccgtctacgggcttctggcctatggcactgtgcactactttggcctggaggttgactggcagcagcgcaccatccactccagaaccagtgagtgccgacctgggggggccagagggcaggggcggaccagtcctcacacccccctcctccaccagctttcaccttccaccagttttctcagtg

SEQ ID NO: 28850 - DNA, 2300 bp, Homo sapien
agcttgtgcagccagaccggcaggtggtgtgcgaaccaggcggcgggcgtgggcaggcactgggtctcgtagtggtaggtgagggctgcaggcgagggcaggagtcagggctggccgagcccccagactaccccaggtccagaccgggcccctcaccagtgagcccccaccacgcagggcagcggctggtcagcttgaccacgcctgaggcgaacatgaggcggaacagcagccatcgcaccagccagaaggggaggtcttcgtggggcagggcccctgcctgcctgccctggggggcctccttgcggtgggaggctggcctcagcggggccaccagcacggccaggaagccagtctctagcagcagggagtccctatggggagagcaaatagcaccaagagcccctccccacacagctgcttccctcggaaagtcctcccaggaagggcagagccctcccccaccccctacccagcctcccacagccccaggcccagccgtcactcaccactggaaataaaggaacacctggcccacctgcggagagaggggctgtcagggagcgggtgtgtctgtggactcaggtaaggtagaggcaggggtgggtggtgggggttggagatagagtgagctggtcacaggtcccacttgcctggcaggctgacaggtaggcggcccaaagcagcaagtagatgacagggtggcgcagtgggctcagcagcagggctcccagggccactagtgcacccagcaggctcagcagctccaggccctgggccgtgtccagccccagtctcggcgcttcccacagcagcgtcggggtctcccacagctgctgccagcgccccttgccctgaggccgcagcgtcctccttgcaggtaggatgccctcggggccatacaggcctgtgggagggcatgtcatggccaggccctggacagcccttgcagactagactacctctgagtcagggcctgcagatcccccagcctaggtcagagcatgcggatacctccatccctaggtcagagtctgcagtccctccagagcccgtcccccaggtcgggacctgtcaaaaccccgtcccagggctagaggcctgctcaactacctgagtcagggcctcccacccagcagagcccactgccctcttccaggtctcagcccgatctcctacctgtcccaccaggtctgggaggaagcctctctcccacctctctcagagttctgtcccccaccccaggtcagagtccagagccttacgggaaatggatcaccgcacaccttcctacccccacagcggcctgcaggacacgaaccgccgccccctaccccacgccaaggcctggccctcactcccaaccccggactgcgtgagtgccgggcacagagaaaagaggacatagggtcccgcgccgaggctgggggtgtcccaccctgggtgccttcacctgggatttgcgtgtagagggaagcgaaagcaaacatgaagacggccgccacgccctggaggaagagctgccgcgggagccgggagcccgccatgtccgctacgcggcccgctagagcagggcccgccctccgcgtccgcccgcccgcggcagccccaggccccgcctcctcaccgccccgcccgcccaatccgtggcagccccaagccccgcctcctcggcccgcccgcccgcccgcggcagtcccaggccccgcctcctcaccgccccgcccgcccaacccgtggcagccccaagccccgcctcctcggcccgtccgcccgcccgcggctgccccaggccccgcctcctcaccgccccgcccccccaacccgtggcagcccccaagccccgcctcctcggcccgctcgcccgcggcagctccaggccccgccccaccccgccccgcccgacccacggcggccccaaaagccctcccgtccaaactggtggcagcccaaagctccgcccacccccccctcccggaggcttcgaccccgccccgcgactcttccggtgagctcccgctgcgcggcgccggggttcgcctctctggcttttgcccacgttacgtcatagacatgcgcgcgacgccgcgcctacgcattttcctgggcgggaacagcaaaatggcgccagaactagtggcgggctgaggacgccgtacccctcggaaggcagccctgcggtccctttgccgcccgttccctcccggacatggaggacgtggaggcgcgcttcgcccacctcttgcagcccatccgcgacctcaccaagaactgggaggtggacgtggcggcccagctgg

SEQ ID NO: 28851 - DNA, 2300 bp, Homo sapien
agagcagagccaggttcagagaaggaaatttgggttttattctgggcataatggaaagccactgaggggttgattttaggcagaaaacagtgctgtggccagattttaatttttaagagtcacacttgctgctggttggagcacgaattggacgggacaaaaacagggataagggaacccaaataggaaggttttacacaaatccaggccagagacaatggtggcctagaccaaataaaatggacaacagatgaattcaagtgatattccggtggtataactgatggaattcatggatgaactgagtgttaagcatggggcttcactatagccacatttagcttttgcttttggttgaacagcggtgtcattttccgagatgggaaaagctggggtttaagcagaaaaatgaagagttccactttaaatatgttaaatgagatgtttgcgtgacacccactagatgtcaagagagcagctggatatgtaaagtagatttggaggaaagatctaggatggagctgcagatctggtagttgtcctaatacaggcaatatttaaaatcatagaaataaatgacacttcagggtaaatgcatcagaagatgacctaggccccatcctgaggaactcaacacttagagactggatagaaaagaaaaatcaggcaatgaaatagggaaaaaaaatcctaccaccatgtttcaaaaagaaaggagtggccagtccaacaaatgctgacttatgtcccttggatttggtagaatggagatcactgctgatcaagacaagaaacatttaagtgtcgtggacgccagactgagctgggctgaggagtaaaaatgaagcgcaaatatggagcagacagcttaacacaggtctagacagggctgtcaaacatggaagaaacactaatcgctaacaggatagagcatggcaatagcttgaaattggtttgaaaatccaagataaaaaattcctctgacatcgtgatccagacctctcaaacacacaagcatgctcgcaataactgcaataaaagcaataatgctttctagtctattccactacgttagagaaacggctggtcaccacccactcaatcattcacggctcgctgacgggtagaaacctgcaatgacaggtccacgctaatccaacaagggatgatttggggaggcagagatggagtttgaaaagaagcagggagcccgaggacctgcgcggccagagcgccagatagccataggcgtggagacggtggggcgcccacagccccgggcccggagcccccgccccgcagccccacccgccggcccaccccgcgtcactcccccgccgcccttacctcctccagatactcgcccagctgggccgccacgtccacctcccagttcttggtgaggtcgcggatgggctgcaagaggtgggcgaagcgcgcctccacgtcctccatgtccgggagggaacgggcggcaaagggaccgcagggctgccttccgaggggtacggcgtcctcagcccgccactagttctggcgccattttgctgttcccgcccaggaaaatgcgtaggcgcggcgtcgcgcgcatgtctatgacgtaacgtgggcaaaagccagagaggcgaaccccggcgccgcgcagcgggagctcaccggaagagtcgcggggcggggtcgaagcctccgggaggggggggtgggcggagctttgggctgccaccagtttggacgggagggcttttggggccgccgtgggtcgggcggggcggggtggggcggggcctggagctgccgcgggcgagcgggccgaggaggcggggcttgggggctgccacgggttgggggggcggggcggtgaggaggcggggcctggggcagccgcgggcgggcggacgggccgaggaggcggggcttggggctgccacgggttgggcgggcggggcggtgaggaggcggggcctgggactgccgcgggcgggcgggcgggccgaggaggcggggcttggggctgccacggattgggcgggcggggcggtgaggaggcggggcctggggctgccgcgggcgggcggacgcggagggcgggccctgctctagcgggccgcgtagcggacatggcgggctcccggctcccgcggcagctcttcctccagggcgtggcggccgtcttcatgtttgctttcgcttccctctacacgcaaatcccaggtgaaggcacccagggtgggacacccccagcctcggcgcgggaccctatgtcctcttttctctgtgcccggcactcacgcagtccgggg

SEQ ID NO: 28852 - DNA, 2300 bp, Homo sapien
aggatcactggaggccaggagtttgagaccaacctgggcaacatagagaaaccctgtctctacaaaaacattttttttttgagacggagtctcgctctgtcgcccaggctggagtgcagtggcgcgatctcggctcactgcaagctccgcctcccaggttcatgccattctcctgcctcagcctcccgagtagctgggactacaggcgcccgccaccacgcccagctaattttttgtatttttagtagagacgaggtttcaccgtgttagccaggatggtctcgatctcctgacctcatgatctgcccgcctcggcctcccaaagtgctgggattacaggtgtgagccaccgcacccggccttttttttttttttttttttaaagtgtcatttgctgagaaggaatacaggagatgagccagcgttggggaagatgttgggtaaagtatggaagtaaagtgtttggggacatttgaatgtactctgtggacagctatgaatgcagccccagagctaaggagagagagctggtcgggttgggtttggggctcattggcttatggttggcagcttgggcatgggatgaaggaatgtgcatggcggggggtggagcgcctggcgcactgacgtttaaggggtgacagaggagctggggctccgggaggctgaggggagcagaggaaggatggcgactcacctgtaactgtttcctgagttctctgctcagaggatggagacctcagcattttatctctgcctttcctacccctgaggttcccttttcttctctgtgtcggggatcttcctgctggagtctgtcagcctctggcgccttgtggagggagccgctgtgctgccctggttgtttgtagacagtgtgccctgggggccttccacttccaaaacaggtttttgttataggaagtagggggaaacacagagacctgtctctgccccgaaataccagggacaaccggtgagcccacagcatagctagagctgcccgtctcgggaggtgctgggcagagaccaaagatgggtggggctgccctggaagaagcgagtgcagactgggccttggattccccctgtctttgtgttgtttcttgcagctggatcagatctgcatttcttttgacgaaggcaagaccacaatgaacttcattgaggcagcgttgttgatccagggctctgcctgcgtctacagtaagaaggtgggccctgcttgacgctggtcttggcattttggtggccagtgggaccacagtcggctctccttctggggcaggtgcagtggtcgtcccgtctgtgacctacctccctctctcctcaggtctcagccaattcctcagcaccttccaacaccaagaacaatttttaatttaaaatcgcacagccaggcagggagggtcttttgtgctgttgggctctgttgtcttgggggaatgacacctgctgtgtgcacttggacacagcccagggtgccacctgcacccaccttccccttccccgtcccctacttgtgggtgcctcattgtcagcacctagaaagtccacaaccaccaccctcacggtggggcctctgttctgtggaggagaaggacaggaagtgagtgacgggctctgtcctgcaggccccgtggcggcaggagctgggacagggcagggccaggacaggaggaggggctggggtgatgctggcgggagcacacgggcggaggagcagcagggctgcaggccgtcggcagagtgggtgccaagcacgaggggcctcaccaccaaggaccgtgtgatgaggcacactgtgggaaccacagtgctgtcagggtcacacgttgagaaggccacgctcgcggctgcgtggaccatagagggcagaggagagatgtgggtggcctcagctggtaaagtaattctcatgagattcctggtttgatttgagaattatttttggaaccaaaattggtggtttcttgtactggaggtttggtggtggtggccaggcctcgtgggggcaccgatggatagctgggaaggccttgggggtgggcccctcctttctgggtcctcactgcctgcatctggtcaccaggtggaatacctctactcactcgtctaccaggcccttgatttcatctctggaaagaggtgagttctgcagccactcactgtgctgccctgcatgtggccagggaggcccctgcagctcctgggatgcccacgggatgtgcttctctctcaggcgggccaagcagctctcttcggtgcaggaggacagggccaatggggttgccagctcc

SEQ ID NO: 28853 - DNA, 2300 bp, Homo sapien
tggaccaggcgggctgctgtatcgtgggtcagagtgagcagctggttcctgcggacggaatcctatatgcagccagagatgtgacagccaccgtggacagcctgccactcatcacaggtgacctgactccatggcctgcttctgcatgttcacaggctcctgacctccaaactcaagtcaagggcctctcgttaggagttacccgtcacctgaccgtgtgcccccctacccccatcacaagatgcctgaccaccaccatgtggggtggcctgatactcaacccaccaggtgctgccacccccataataagggacttgaccctcaatgctcagggcccctgaccccaaagtcggcatccccgaactctcccaagaagctccaggttctccattgtctccaacctcctctgcctcccccaaagcctccattctcagtaagaaactcgtggaggggctgtccgctctggtggtggacgttaagttcggaggggccgccgtcttccccaaccaggagcaggcccgggagctggcaaagacgctggtgagcggtgtggcctttccctgggcaagcgtcttgatgcgggcccagcctacccttcacccctcccgtccccactgcctccctccactcagcagtcctgcctaaccccagtcccaccctcttctgcccgaagtccctccctccttcacggcttcctaacctgctgtgactttagaggtcaaggctggcccggcctggacctggggaagccctctgtggcgttcctgccccagaccaagtacaagttcctcctggccccatggcgaggtgtcgcacttcactcgtgtctcttccccaccccaatccttccctgacttcatgctggggggctggcaacccagggtgcagcaggggctggagttcgaccaagaaccggctgcagaaggccccgccatggggggtccacgctgagcctcctctccgcaggttggcgtgggagccagcctagggcttcgggtcgcggcagcgctgaccgccatggacaagcccctgggtcgctgcgtgggccacgccctggaggtggaggaggcgctgctctgcatggacggcgcaggcccgccagacttaagggacctggtcaccacgctcggtgagggggacggggtgtaggggagcggaggcggcggggggtgcttcccgctggggccgccccgacccggccgcgcctaagacccgtccccgcccgcagggggcgccctgctctggctcagcggacacgcggggactcaggcccagggcgctgcccgggtggccgcggcgctggacgacggctcggcccttggccgcttcgagcggatgctggcggcgcagggcgtggatcccggtctggcccgagccctgtgctcgggaagtcccgcagaacgccggcagctgctgcctcgcgcccgggagcaggaggagctgctggcgcccgcagatggtgagcgtcgggggagtccccgtccttccgcctccgccatccccttcccttcccgaggccccgccccttcccgagcccgcgcctctcagcccctctccccgcaggcaccgtggagctggtccgggcgctgccgctggcgctggtgctgcacgagctcggggccgggcgcagccgcgctggggagccgctccgcctgggggtgggcgcagagctgctggtcgacgtgggtcagaggctgcgccgtggtgagcgccgcccccgccctgctggccccgcacccccgcccagctccggccgcgcggcctctaacagcccctcgctctgcagggaccccctggctccgcgtgcaccgggacggccccgcgctcagcggcccgcagagccgcgccctgcaggaggcgctcgtactctccgaccgcgcgccattcgccgccccctcgcccttcgcagagctcgttctgccgccgcagcaataaagctcctttgccgcgaaaccttgtcagtgcttgggcgggagcggaaggatccagggctgcggaggcgggggccgtctcgatgaacacgtgacccccggcgggctccgccttccgcgcacgcgctgagagcctgtcagcggctgcgcccgtgtgcgcatgcgcagctccggggacgcctgcgccctgcctgtgagcgtgtggcgcccgctttccctgagccggcggggcagagcgcagggagctggaggtcggcgcttcctctcgtgcttggtccactgacgcgcggccccgccgcgaggtgcggacgccggggctgggaggggaggaggtagccctgaggactcgctggactccggggtagtttc

SEQ ID NO: 28854 - DNA, 2300 bp, Homo sapien
gccttctgtccgcaggtgctgcgagccgtaagcgccccccacccgcgctatgggctcggacgcctgggtgggcctttggcggccacaccggccccgcggccccatcgcggcgcactacggaggccccgggcccaaatacaagctgccgcccaacaccggtagaaggggcaggccccgggattgaggggtgggacggcgcctgggggagggaaggggaagagaccagggaggcctgcgctcggggctgaaccgtgcctgctagaggggagagggggtctgtgccgggggagggtccgtgttgcagatggggcttggggctgggcccggccagacgctaactcggatgctcccaggctacgccctgcatgacccgtcgcggccgcgcgcccccgccttcaccttcggcgcgcgcttccccacgcagcagacgacgtgcggccccgggccaggccacctggtgcccgctcgcatgaccgtgcgcggcaccgacggcgcccccgcctactccatctacggccgcccacgccgctcagcgcccttcctcactccgggacctggtcaggacccccgggcccctggccaccccaacgccgaactgcctccagggaggcccacctgggaacccccgacctgaaccccgagtccccctcggataccctaacaccgcatattcggtacccccatatccggatctcaaatcccaaaccccgaaccccacggggctttgataaatcgtggctcagactccccactagtcccaggaccccatctcgggtacccaccaggctcccacgcagttctagccccccacacccttgatccgccccgcaggcaggtacttcccggagcgagcggggaacgcgacgtaccccagtgcgcctcggcacaccattgctccccgaaactggggtgtccaggcggaacagcagagcccaggtgaggtcagaacggcccatcccagaactgtgggccttcccactcgagaccggggaccgccctccgggagctgggaccaccctgcgcctgtccgcggagacccactacccccgagccctgcctcctccccaggtcccgcggcctatacggtgccctcgctcttgggtccgcgcgtcatcggcaaagtctccgccccaacttgctccatctacggccgcagagcggctggcagtttcttcgaggacctcagcaaggtgggggaggggccggggcggacgcagggggtccctggtccgcggcagtggaggcggcagccagcaccctctgccctctcgcagaccccgggcccctgcgcctatcaggtcgtgagtccaggggtctacaagtcccgggccccccagttcacgattctggcgcggacttcgctcccccaagacaacactcggaagccagggcccgcggcctacaacgtggatcaggtggcctggagcccagggtcaagggtcagagtcaggagagtggggagggcctgaggtcggagtgatgggatcagagtccccgggggtccaggggtcccggcgcggagaggatgccggccccgcgaggtcagcggtgtctccgggcccgcagcaccggaagccccgcggctggagtttcgggatccggcactcggactacctggccccgctggtgaccgacgcggacaactgacccgccaggcgggagcggccccacacgtgtttgcttaaagtctgcgagtccgcatcgtgtccgcctctctctctctctctctgcgcgtcctggcgcaaggcctggggtggagccacggctggggccgtgtcccaactccgaacccagcggggcggggcccgagcgtcgggcgaggccgggaccccagcgctgcgccgcgtccgaacgtcgagaccccaccgagggcgggagggggactctcgggagccacagacgcccgagacccacgccgggcgggaccggccagggatcacccccgccgacggccccgggccccgacggcccggaagttccgcgtgtccgggggcaccgggggattggccggggcgcggcgtgcaaggcttcccgggggcggcgactgccgagctccgccctccaggcggccccacccgcctgccgtcctggggcgccgccgccccgccgccggcagtggaccgctgtgcgcgaaccctgaaccctacggtcccgacccgcgggcgaggccgggtacctgggctgggatccggagcaagcgggcgagggcagcgccctaagcaggtacgggcggggctcaagtcgcgaggcggggaagcgggaggcagacacggacgagggcgacacagacacgggaccga

SEQ ID NO: 28855 - DNA, 2300 bp, Homo sapien
aacagtttgtgccttcagtctcttgcctcggcacctgggtaatcctccgcccacaagaacacagctttagctgcctcctgtaggagttcagtaggaagggaatctacctttgtagtgtttgatatgtagttttaaggaaggagaccacccctcatatatatgtcttatgcccaatttctgcctccaaagaaagaaaaagtaaaacctaaaagacagaaataaaatccacaggcagacagcccagtgccgcgccctgggcctggtagttaaagagggacccctgacctaaccggttatgttatctgtagattccagacattgcatggaaaagcactgtgaaaatccctgtcctgttctgttccgttctgattacccggtgcacgcagaccccagtcacgtaccccctgcttgctcaatcgatcatgacctctcacgcagacccccttagagttgtgagcccttaaaagggacaggaattgctcactcagggagctcggctcttgagacaggagtcttgccgatgcccccggccgaataaatcccttccttctttaacctggtgtctgaggagttttgtctgcggctcttcctgctacagtttgtaaccagattatttctgacaagttttgatccagggtttttttttaaagatttgtcaatttcaaaatatttgtttgctcctgcttcctgttctctctctccctttttttttctttttttaagacaaggtctcactctgtcacccaggccggagtctagtggtgggatcactgctcactgcaggatccaactcccagactcaacagatcctgccgactcagccaccgaccccatagctgggaatacagatgtacatcatcacacccagctaatttttaaagttttttgtcgagatgggtctcactgtattgcccaggctgagttttcttcttcttttttttacattttgtttgcctagaattgtatttgattgtaatcaaatcatgtgtcacatctttttttcaatttgtgtgattattttgtggcccaatacatgattttttttgcgaatatttcatggacttaaatagataagtcctctctctacacataattaaatggagtgtgtgctttgcattattcagttcctttattcccatccttgcttttgtctgcagatttgtcctattccagaatgggtatactgaaacttgggtaagggtgaggccagcgttctgggtggcccaggctactatcccacccgtgccacagaatccacacagaggcccagcggcggcactgggtggtggggaagggggaggcggacccaggttgggggggcaggcagtcagtgcggttgccaggaagcgggaaagggccacaatggggtctgggaggtgggcggggcggagcggggatgtccagccacgtcgctttgttttcccacgctaggagctaccacaacaggtcagtgcacctcggggcaccgggtcccccacgcaggcccttcccggggcaccctttcccaacagcacgaaaatctcctgcccccaccccacccccaggtgattcccttcaccaagtctgggtctagacttggcccccgcgagttcacgtccctgcctaatgcgcctggagtccgggtgatggccctggatccgctcccggccccaagctccacacagccgggaaggaagctcgcgtttgttttgctggcgccagggatacggtccaggccccgccccgccccgcgctgatcccagggtagtgggaaagtgcgctccccaagaatttgcggtgcaggggccgcggccaccgccttctgtccgcaggtgctgcgagccgtaagcgccccccacccgcgctatgggctcggacgcctgggtgggcctttggcggccacaccggccccgcggccccatcgcggcgcactacggaggccccgggcccaaatacaagctgccgcccaacaccggtagaaggggcaggccccgggattgaggggtgggacggcgcctgggggagggaaggggaagagaccagggaggcctgcgctcggggctgaaccgtgcctgctagaggggagagggggtctgtgccgggggagggtccgtgttgcagatggggcttggggctgggcccggccagacgctaactcggatgctcccaggctacgccctgcatgacccgtcgcggccgcgcgcccccgccttcaccttcggcgcgcgcttccccacgcagcagacgacgtgcggccccgggccaggccacctggtgcccgctcgcatgaccgtgcgcggcaccgacggcgcccccgccta

SEQ ID NO: 28856 - DNA, 2300 bp, Homo sapien
caggaacgctgcctgaggaccctggggcctacgaggaggagaagagggcaggagctggtggggtgcttgcagagaccctgggctcctatcctgccataagcctcgctgtctcctgatatctgcagccaggccctactgacacccccaggcctgagtgcaagcagagaccccaccattcccaggccctggaggactggtccaccttaactgggcagcccttggggcaggcgctggccggtgcctcagcccaggcctctgtgctctgcatgcactgccagcctgccatcaggcctctattgcagccctgaaccatgatccagggcaccttggagccagatggtcccctctggggctgggactgggacagtgacaatgactgggatagtgctgtgctggccctcctggcgctggctgtggtggctgccacagcgctggccttacactggtttggctccgggcacgatcaagaggcggcagaaccggtgtccacagccctcggggctcaacctcatcaggcaggaggagctgagctggccctgcaaccgaagtctaaggtcagtgatggcagcgaggggcagagcccagggcaggggaaaccagagcccccaggacgcggccagcagagccctgtccctgctgcagcgccgggcgggggcctggccgccatggcccggcttccactcaagacggctgtcgaggaggcccgcagagaggcattaggacagcaacggggcagtgccacccccgcggccccccgagcggaaggaaaggagcctcccaggccaggcactgccctcctgggcaggagcgaagcaggggggatgtccgcccccctcctgatccacttcactcctcggagccctggcagcgaagcggaggcggagacaggtggtgtcagggcgtcctctcgccaggccgcaggccccgcggggcaacaggacactggcccctggcaggcgggcgcggggccctcgggctcgatggggagaggccggggccggcggcggcggatggacgctggctcgggagacagagcccgccgcccccggaaactggacccgctccgcctgggcgccgcggggagcgtgtgggacgcggtggacggggccgccgccctggacgcccacgcgcgcggcctccccacaggacccccactcgcccaggagcccgcactcccggcgctgcccgctccccgcgccctgcagcctgggtctcagacggaaggctctggggccaagggtggctggagcagggaggcctcgggggtccctgcccccggaggaggctggccctgggtcagcagggaggtcccgggcacccggagctttggcccagccccagactccacgcgcccctggctagagagtccgcctcaaggtcgcccactctcgtcccaagggccgggtgccacaggggcctacgatgccggcgaggccggggctgacagctcccgagataacagtcctgccgctgacctggggcccacccggcccccggagcaagcaaagccggctgcagccggccacagccgcgcgccctcccggagccgtgagcctcgcccgcgctccgcctccccgcccgcagctcccggcccggggttcccacctgaagccctgactctcccctctccttcagactttttgcccctggaggttacccaggatccttccgtgggcgaaaatctcagagcggcgccagccccaagttcagcctcagcccaagtcttaacttcagctccagcctcagtcctagccccagccctggcttcatcccccagctcagcaccaacctcagccaccacctcaacctcatcccccacctcagccccagccccagctccaacctcagctccaacttcaaccccagccccagccccaagtccagctgcagccgcaactccagccccagccccagtcccagtcccaaccctcacacccccatccccagccctaaccccagtcccaaccccagccctaagcccagctccaactccagccctaaccccagccgcatccccagccctaaccccagtcccaaccccagccctaagcccagctccaactccagccccaaccccagccgcatcccctgccccagcccccacctcagccccaaccccaaccccagccgcatcccctgccccagctgacgggtcaaagcctcaggagagtgtggctctccccaggcgctaccaggaggggcaggtctcagccagctggggaaaccttattgccatggttcttagaagccaccccttccccaggcaagacaggccccaagggagtgtcccgagggcggtt

SEQ ID NO: 28857 - DNA, 2300 bp, Homo sapien
gtgggcgtggacagctatctcagagcctacgtcactcagcagagtcacacatttcaaagcaggtcacacaagtccctcatgaacagtcttccagcttcagcccttctcttgccacctctgtggtctgagctgggggagggggagggcctccgagttcccaaacaaaacacaggtacctaagggctgagagaaaattacacagccttatttttattagtatctatcaagaaaaaaaaaaatcaaaattcccttcctgctccaaccccacctccaccacctgggccctcagggagcagcatctgcccagcgaggacctgctgccggagctgtccttggagcctgggcacctgtgcacggccacccctcatgcctgtgagctgccacaggtcccttcctccacagtgtggggacgaaagggcagctggcatttctccaaccttcagctgtaggccttgggaacttggaaaagatcagcaatgtccagcagggctttgcggatgtggtttccaaagcgctgggcgttctgtgggagccaagagttcagatgcaccttcagatatgtacccacccctctgttcccacaagcaaggatgcctccccagccaaagacacctgtgttcctgggcagccccaggtggcaccccttcctcaggcctgagctgtggcaggagactcaccgtctctgagcttgagaacttgctggagatgtggaagaagatcgtgttctcgcctgcaatcatgtaggaaactccatagccatcatctgctacctgagggcaacaagaagggtgaagaaggcataaatcaaaccttgaagatctgaaagccaagctgatattgtacttgttcttcccacaagagttgcaggaacgggccccagccctagacactgcatttttcctgaggaccacccccaggaaactgtgaaaaccaaagaatgctgcccagaccccgccaagggatctgggacctcccagtttccctcagggggcttattctctagatcactccgtctctctccagagggttctctagccttctgacaagctagcccatgtgaaggtttctgtgggagacagctgcactctcttggataagtagacttcagaagcacccagtgcactgcccagtaccctggaaaccagccccacagtcatgcttcagtaccccggaaaccacggtcatgcttcagcagggaggtatttgggatgggtgggtcccaggtgcttggctgcctgagtccatagctaacattctgcttccatgcaggtctggggttatgctctcctctaagcaaggtgctcctgcctctcgtctgacctcagggcctgcactcgccactgaaaccctcagggccctggtgctgcccacccacccccttcaggagcactcacagggccaaagccacctccagcgcccaggtgattggggtgctgctctgggtcgaacatgcggatctgggattgggggatctggctggtggagagacgccagggttccgagagcacctgcaatggaggccacagctggtcagaggccacatacccaaagcacctgtccaacacgtggtgtctgcgacctactctgagccagacacggttctgctgagggtgcaggagctccctggccaccaccccgtggtcccctgtgcatcatgccacataaggcttgtgtgagctgcccagccctccctctgctctgcctctcccccacatagcctcactagtctcagtagtgctgtcaccacctgacagatcatatatttgtctgttccctgtcacaaggacaccaacaccacaaagaggatgttgctcctgctcagtcccaggaccacaggcccaggtggggtgtgggcgggaaagctggcccagcactccagggagcttcaggggagcaagccaggaaaacaggccgtgctccatcatgagatggcccaagccctgcgtgtaggagggcagtgggacaaaggacacacccaacaacggtgctgacctcagcaaggaaaggagagctgactcctaggtacttggagaccaagtaaaggcagaagaggtgcctgtcgatccctgccccggtcatggccaggcggtacatattctggtgcttcttagcagccttctggaagagatctcgcaggtctgctttctgcggggcagaagtaaaggggtgaagagtagccctggccctccaggcagacaggaggcagagggggcacctcacccgacgactgtgacccccacatgggcagaggacacttactgtgtgggacccctccatcatggcctgcacaaaggctgtgg

SEQ ID NO: 28858 - DNA, 2300 bp, Homo sapien
acaaggctaatggtaatggtgtccgcccttccagtagttgctgagggctggtgtcagggcctggcctgttagggtggctctgatcctcctctagtcactcctgctcaggacccatgctcccatacccctgtaggaagttactagagtctaccccatcgccagtcgtcttctgccacaatgacatccaggaaggtaggagaaggcatctgagtctcctaacccaagatggaagagccagagggctctggagtgagcagaacctcaccccattcccccagggaacatcttgctgctctcagagccagaaaatgctgacagcctcatgctggtggacttcgagtacagcagttataactataggtgaggctggaaagatggcttcccatagatctgttcccatagggctcttgaaaacaggccagctgcccagggcatttggggactgaatgtccaccttattctcccaggggctttgacattgggaaccatttttgtgagtgggtttatgattatactcacgaggaatggcctttctacaaagcaaggcccacagactaccccactcaagaacagcaggtatgtgggccagaggctggggagcaggacccatcctgtgaggaaggagggaggtggagtctggaaggaatggccggaaaggatgttacctgggaaatactccacagtctccccaattcctgactcttggccattgatcgtagttgcattttattcgtcattacctggcagaggcaaagaaaggtgagaccctctcccaagaggagcagagaaaactggaagaagatttgctggtagaagtcagtcggtgaggaaggaggggcagggtggggtagggcagagcagaggaaagagggattggggaagaggcagatttatcaagctgcagggaaggtggctgtggagagtggagttaggacagtgggggagaagttaaaactgtagggattggccaacctgggtgaggggatccaagcagtgctagacatgctcttgaatgcccctccttttcctgccctccccccaggtatgctctggcatcccatttcttctggggtctgtggtccatcctccaggcatccatgtccaccatagaatttggttacttggtaagtgaccctggggatgggaatgctagctggggggctggggagcagcagcagccacactcttccaggaggcctggggagtcccgggtggctgtgggcagcctgaggtggatgtagaatgctggtcccacgtcttctcaccactgtgtggggtgggtttccttccctaggactatgcccagtctcggttccagttctacttccagcagaaggggcagctgaccagtgtccactcctcatcctgactccaccctcccactccttggatttctcctggagcctccagggcaggaccttggagggaggaacaacgagcagaaggccctggcgactgggctgagcccccaagtgaaactgaggttcaggagaccggcctgttcctgagtttgagtaggtccccatggctggcaggccagagccccgtgctgtgtatgtaacacaataaacaagcttcttcttcccaccctgtcctggccctgctgagcagcagcagaaagtaccaaaccgagcagtacacacaaagggactcttcagtgctctgggattgaaagtggttagcgttcatgctgccagttggggtcccccatccctccccagtcccctggctgcagcttagaataataaatactaggacttggggaggaggagagtgatgggggtatgaagacgaccctgaggtggggatgccgcccggagcaccagcgatcccagaacaggcagcagctgacacatcggtgaccttttccctacatttggctatttttagctctaaagccaccatcctcacgagactctggggccccccaggctcccagacctttgagcaaccttcaccgcacagaaacccagccgcgccctgcaattcccaccgcggaaggtgggtgggttctggttctcgccccacgtttttccccgaccccgatttgggagtaggtgtcaggttcctggtgagggcggggcgggggtggctaggcctgaaggacgtggggacacgggccagagtggctggccccacgcacggacaggagtgaacccgagctgtgagtaggggccggcacagggcggcccgcgggggtctgggccctcagccctgcacaggggcgaggacggcgctggggcccgcgcgctcgggtggggaagggcgggctcccgaaccctgcctctgtccaggccggc

SEQ ID NO: 28859 - DNA, 2300 bp, Homo sapien
gcttcaggtacctaaaacagatccaggacctgcccccaactggcctccctgagatgaacctgctggagatgtacagcctgaaggatgagatgggcaacctcaggtgagggcaggcaggacaaggctaatggtaatggtgtccgcccttccagtagttgctgagggctggtgtcagggcctggcctgttagggtggctctgatcctcctctagtcactcctgctcaggacccatgctcccatacccctgtaggaagttactagagtctaccccatcgccagtcgtcttctgccacaatgacatccaggaaggtaggagaaggcatctgagtctcctaacccaagatggaagagccagagggctctggagtgagcagaacctcaccccattcccccagggaacatcttgctgctctcagagccagaaaatgctgacagcctcatgctggtggacttcgagtacagcagttataactataggtgaggctggaaagatggcttcccatagatctgttcccatagggctcttgaaaacaggccagctgcccagggcatttggggactgaatgtccaccttattctcccaggggctttgacattgggaaccatttttgtgagtgggtttatgattatactcacgaggaatggcctttctacaaagcaaggcccacagactaccccactcaagaacagcaggtatgtgggccagaggctggggagcaggacccatcctgtgaggaaggagggaggtggagtctggaaggaatggccggaaaggatgttacctgggaaatactccacagtctccccaattcctgactcttggccattgatcgtagttgcattttattcgtcattacctggcagaggcaaagaaaggtgagaccctctcccaagaggagcagagaaaactggaagaagatttgctggtagaagtcagtcggtgaggaaggaggggcagggtggggtagggcagagcagaggaaagagggattggggaagaggcagatttatcaagctgcagggaaggtggctgtggagagtggagttaggacagtgggggagaagttaaaactgtagggattggccaacctgggtgaggggatccaagcagtgctagacatgctcttgaatgcccctccttttcctgccctccccccaggtatgctctggcatcccatttcttctggggtctgtggtccatcctccaggcatccatgtccaccatagaatttggttacttggtaagtgaccctggggatgggaatgctagctggggggctggggagcagcagcagccacactcttccaggaggcctggggagtcccgggtggctgtgggcagcctgaggtggatgtagaatgctggtcccacgtcttctcaccactgtgtggggtgggtttccttccctaggactatgcccagtctcggttccagttctacttccagcagaaggggcagctgaccagtgtccactcctcatcctgactccaccctcccactccttggatttctcctggagcctccagggcaggaccttggagggaggaacaacgagcagaaggccctggcgactgggctgagcccccaagtgaaactgaggttcaggagaccggcctgttcctgagtttgagtaggtccccatggctggcaggccagagccccgtgctgtgtatgtaacacaataaacaagcttcttcttcccaccctgtcctggccctgctgagcagcagcagaaagtaccaaaccgagcagtacacacaaagggactcttcagtgctctgggattgaaagtggttagcgttcatgctgccagttggggtcccccatccctccccagtcccctggctgcagcttagaataataaatactaggacttggggaggaggagagtgatgggggtatgaagacgaccctgaggtggggatgccgcccggagcaccagcgatcccagaacaggcagcagctgacacatcggtgaccttttccctacatttggctatttttagctctaaagccaccatcctcacgagactctggggccccccaggctcccagacctttgagcaaccttcaccgcacagaaacccagccgcgccctgcaattcccaccgcggaaggtgggtgggttctggttctcgccccacgtttttccccgaccccgatttgggagtaggtgtcaggttcctggtgagggcggggcgggggtggctaggcctgaaggacgtggggacacgggccagagtggctggccccacgcacggacaggagtgaacccgagctgtgagtaggggccggcac

SEQ ID NO: 28860 - DNA, 2300 bp, Homo sapien
catgctgccatgcctggctaatttttttgtattttaatagagacagggtttcactgtgttgtccaggctggttttgaactcctgagctcaggcaatctgctcacctcagcctcccgaagtgctaggattacaggcatgagccaccgtgcctggccttggcaatcatttcttttttctttttttgtttggtgttttgagacagagtcttgctctcacccaggctgaagtgcaatggcatgagctcagctcactgcaacctccgcctcctgggctcaagtgatcctcccacctcacccacctcggctcccaaagttctgggattacaggcatgaggcactgcatgtggcctctggcaagcatttaaaagcctgttctgtgacagcccatgacatcagatccactcaagtggagggctggatagagcccccgacacatccgctggcatggaggttcagctcaggagtacaggagccctgaggaggctcctgactcaccgctccatggtcccaaacagccagtggggctccttggtgaaaggcatctccatgccatgaaattgcgccatcttcgtggcaatggctgctgacaacactggctctcgaagctcttgagttttcaatggccgactctgcacccaggaagctatcagggtggtgatggggctggggcaggagtgggaagggctggggcaatgaggggaagtcagggttttgggggaaattccctacttggggtgagggatgtggaggcagacattgggcactggggtagggttagggggtggaggtgccttggggaggagagggtaggactgggcccgtactgggatgtactgttccagccggccctctgggaagactccgtacagctggggccccagcgaccgctccgcaagtatggcgaacatcacgctttctagcaccagggagtccacgccctgaaaaaggatggacagcaaaggggccaaggcaaagtggcacagggacacacatgagggctcgccttcctcccaccagagctgcgacttctgatccaattgcctggaggctctggagcacaggctttagcgttggtctatttttatttagagatgggggtctcactatgttgtccaggctggtctcgaactcctgtgctcaagtgatcctctcgcctcagcctcccaaagctctgggaatacaggcccaggcttcggtgtaatgaggtgttactcagaccgtgaacctcggtgtcctcaactgcgcaacgggaacaatactacccgcatcgcgtaagcgacaggccctaaagccactggtgctgcggcgctcacacccccctcacctgcaagatggctccgtacagccgcagaagcacctcccggggctcctcgccaacgctgggcaggtggtccgggagcgagcagcggaagagcaggttgctgaggcctccgctgcagacccacaccaggcgcgctcagcccgcggccggccctacctgccgcggccccggccccctcccggccaggccggccccgccccgccccaggcgcgggcgcaagaggggggcgaaaacatggagcatcctgagggccccgcggctgacccctgaccccgatccgcgcaccggagaggctgacccctgacctcccacctcacggggtaaaccctcagctcctcgggctgcactcggcgccaggccccgcccaagtactcccggcaccattggtaggctcggcgctcggcgtcacgcgacagcgacgaggcgcgccgccgttttggggtagtgtccgggcacttagactgctgcaagccgtctttggccaggcagccgccaacagccccgcttccggccacagctgtcgcctcggccgccatggcgcgggctcgaccgggccccaggccaggctgcgctccgctcccttcggacgggctcggttccttccggccgcgctcggctcctcttccggccggcctgggcttctccggtcatactcgggtctctccggctctattcggctcacggctgcggcgctcggctctctccgtgccccggcccgggggctctttccgaaggccgaattccgcagatctctgccgggccccgcccctatgggcaaggaccaatggtctctctctgggcggggctgctgttggacggcctgggccaatccgaggcgccggaggccaatcagttggcggagcggcgcgtgcgcgggcgaggaactgcccgggcgcggtagcgtacgggaagaccggagaggagctgcgtctctgccccgtgggagccggcggggcggcggggcggcggctgcagctgca

SEQ ID NO: 28861 - DNA, 2300 bp, Homo sapien
agtctttgagggcgaaatacctctgcaattacacctggaatgcagcattgtttctgacttactatcttggaaaggtttcagtagggtgaggagtttcaaaggtttctactttgcgcttccttacatatggtaccaaaggcctgggatcaatgtatacgctccgccctctgctaggtaaaaacatcccaagtatgcattgagaccagagaagtaaccacaggactcgggttgggaattctgcttatcatctgatttccataagcctgcaccctaatgagagggccatgatgcttcagggctcctggaaacagtgtcagctcagatcctgtatcagcccttcaaagacctagacagtcccttttccgaagtaaactagtttttttggtgtgtttgttgttgctgttcagacagtcttgctgtgttgctcaggctggagtgcagtggcgtgaacacaggtcactgcagccttgacctcctgggcttaagtgattctctcacctcagcatccagagtagctggaaccacaggcacctgccaccacgcccagctaatcttttaatttttgtaaagacaggttcttgctatgttgcccaggctggtctcaaactcctgggctcaaacgatcctcctacttcggcttcccaaagtgcagggattaaaagcgtgacccactgcccccagccagaatcagttttcttttttttttttttttttttgagactgagtctgactctgtcgctcaggctggagtgcagtggctcgcggcaacaaggcctgggttcaagggattgtcacgcctcagcctcccgtgtagctgggattacaggcacaagccaccaaacccggctaatttttgtatttttagtagcgacggggtttcgctatgttggccagggtggtctcaaactcctgacctcaagtgatctgcccgcctcggcctcccaaaatgctgggagtacaggcgtgagccaccacgcccggaccagttactttttaaagtggctctaggtccctttagggaaggattggaggaatatttcttggtatatgctcagatgctggtattgtaagatccttcctgagaggaaccaagcctccttgtcaattaatgggctctaggtctcaaaactgactcagatttaaacagaatgatcatgattttccactgcagcaaaagtgacattagccttgtgatcaccaatttttgatttctttctggttatcaaacaatactctagtcagatgccccaaagaacaccatggttcgacagacattgccacagatctctgtgggtccagcgttcctggtcgccgctctagcctggggcagaagcagaaatgcaggaggcacgcgtttaaatcaggacgccctcaatgggaggtgcgcaggccgaggagggggctgcggcaagctgcgagtcttcactttcttcggctcttgggtttgactctgtaattggttctaggcctggaggagacgaggaggatagggggagaggggaatgaatgaagacgcgcatctcaagcggggcagcaaaagactcctcattcagaggtgcggctctaccggccagggagtccccgtgtagactgggcatttatgcaactggagtcatcggaactgtcccaagggtcacattccttcagcaaatgtttactgcgtacccaccgggtgcccgcatcccgcactctgcccgcgctgtgcggccctgcctagcgcgcgcgcctcctccaggcctcacccacgctcaggacggacgcgcgctggacggctcttccttgtcggagcgccccaggggtcggggaagagggcccggcaagggagccctcgcgccggagctgcagctgcagccgccgccccgccgccccgccggctcccacggggcagagacgcagctcctctccggtcttcccgtacgctaccgcgcccgggcagttcctcgcccgcgcacgcgccgctccgccaactgattggcctccggcgcctcggattggcccaggccgtccaacagcagccccgcccagagagagaccattggtccttgcccataggggcggggcccggcagagatctgcggaattcggccttcggaaagagcccccgggccggggcacggagagagccgagcgccgcagccgtgagccgaatagagccggagagacccgagtatgaccggagaagcccaggccggccggaagaggagccgagcgcggccggaaggaaccgagcccgtccgaagggagcggagcgcagcctggcctggggcccggtcgagcccgcgccatggcggccgaggcga

SEQ ID NO: 28862 - DNA, 2300 bp, Homo sapien
cagtggtgtgatctcagctcactgcaacctttgcctcctgggctcggccaattttttttatttttggtagagacatgtttccaggctggtttcaaactcttgagctcaagtgacgcacccaccttggcctcccaaagtactgggattacaggtgtaagtcactgtgcccagccaagtaaatgccattcttagaaaaatactgtaattggcataaaatataaattgtgatgggacaccaaagagtgcaggttcaatcaggccctggccacaggcctctctctgagctggaatggtgataccccccttcccgacttgcatgagctccttctgccatgtcgtttctggtgtttgtcactcaagtgccttgtcctttcctaaggaataattttccaggccaggggcggtggctcacgcctgtaatcccagcactttgggaggccaaggagggcagatcacctgaggtcaggagtttgggaccagcctggccaacatggcaaaaacccatctctactaaaaacacaaaaattagccggacatggtggtgattgcctgtaatcccagctactcgggaggctgaggcacgagaatcggttgaacccgggaggtggaggttacagtgagctgagatcgtgccactacactccagcctgggcaacagagcaagttctgtctcaaaaaaaaaaaaaaaaaaaaaaaaaaaaaaaaaaaaaagaattttccgcagaactaagacataaagaaatcttagggcacataactttcatcaagggggaaaagggattgcgcttttgttgaaatgccagcctccttctttagccaatatttagccaggtgctgtggttcacacctgtaatcccagcactttgggaggctgaggccagaggatagctgagcccaggagtttgagaccaacctgggcaatacagagagagccggtctctctctctctctttttttttttttgagacggagtcttgctcttgccaggctggagtgcagtggcgcaatctcgtctcactgcaacctccgcttcccgggttcaaatgattctcctggctcagcctcccaagtcgccgggactacaggcgcccgccaccacgcccggctaatttttttgtatttttagtaaagacggggtttcaccatgttggccaggatggtctctggtctcgatctcttgacgtcgtgatccacccgccttggcctctcaaagtggtgggattgcaggcgtgagccaccgcgcccagccaccggtctctattttagaaagaaaaaaagtgtcctgcagtctctccctagttctgcgccctcaaccctgatctcccgcctcctcccacagccaccgtctcgagctcagcttcaaccatggccctccccacagggctccatcccaagccagagcgggtcagttccctacacagggcccagcaacacggtgcccaagaaaaagtgtttccagtgggacgcatgtcgcctccgtgggtgctaacttctcccagtgcccgtcggtacgtccgtccggctgtgcagtctctactgagtgctcaaagtccacttttagccccagccagcatcctctgagtaccttgtgctcgattctgaatccagccctgctcggcgaccctcgtgcagacgtccccgtgcagccccggtcagcaccccgtggggacagctccgatcagcacccgacggcggacagctcctcccgcgcctcccgcctcgcccgccaccccgctccgggccgcacccgggttagggttcctggggggatcctgggcgcggcggcgcagctcccggggccgccccggcctctcgcccagaggaaacagcccacggcgaacccgaggcccgcggaccccggcgctgcctcctcggcctcccgccccgcgcgggtcctccagggcggggcccgacgcccacccgcccgccccttccctcccgcccctccccgggaaaaatcctcatcgcacgcccggcccttccccaaccagcgcccggcagtgaagccgccgcctctcctccaaccagcgtccccggccgcgtccctcccccgcctcccccgccgccctccccgcgccgccgcggagtccgggcgaggtgcgcggggcggacgccgcagggcgtgtcacgaggtgagcggggcgggccgagcgccggcgcggggcgcggcgaggctcccgcaccccccgccgcagtcgcgggcctctcccggagaagatggcggatcgcgcggagatgttttctctctccaccttccactcgctgtcgccgccgggctgcaggtacccccctcggcgccc

SEQ ID NO: 28863 - DNA, 2300 bp, Homo sapien
tcgggcgccccacccccaccccgctcccactccctccatcttcaccgcgcgtccccagcctcagtgacccccgggccccgccgggattctgagccgcgcccggcctggacggctgacctgtcaagggtggaggccctgggccgaccctctgcgggggaggatgcgggcgggatgcgggcacaccctcccggcgcggcgtgtcccggtggccttggcctctttcagtggacgccagacctggccgatagggcccggccgggagagagtggaaatcaagcccggagccctgcgggaagggactggggttgggaggacgctgggcctctgggtttaggcctcactccgccggagagggggagacaaacaggccagactctcttcccagagcaggagcgacccctccccatctgccgctgccgcgttgcagctccccctcccctgctctgcaagaccctgaccccaggggcctggagctgcgagtggagggaggagaggctgctggctctccagggaggcggggtgggaggggtgggggcagggttggctcctccgggcaggcctggctcagatgggggaggggatccacaggcgagcagagcttgggggtcaagatgatggcaggatgtgttccgagagctgggggctgtggaaaccactgggtgtaggagctgacgcctccctctgcccctcctcagggccagttgccaggcagggagtccagggttggtggctctctgaccctggtctcctttccaggcctccccaggacataagcctggaagaatttgacgacgaagatctgtctgagatcactgatgactgtggcctgggcctcagctacgactcagaccactgtgagaaggtgggagaagagttggggacacagatccagctcaagggagggcctcattaggttcttcttagcgttcacttggggttttagggtgggtgtgagctcagccttgaaccggggactcctctgatggctcctccccacttaacccttgaggtttccttggtatcaactctctcttattccaacacattgcaggcctccacgcagggccttccccagcattctccccgaccccatcggtggccagcccggggcagggaggtgctcctttgctttgggtgccctctgtcctcagatcactcccagaaagatctaatccctggcagctgccatcacaaccttgtcccctctgcagccctgtgccctcgtctgcagctcccatctgtctgtttcatgtctccccctgctgaaatcttttctcgtccatctcttgcttctcctcctccctgtctctccacatttctgctttcatttattgaagaacatttctgagcaactgccatgtggcaagtactgggggcttctgggtgctgggagtggaacaggacagctgctctctggagctgcaacttagtaggggagaaagacttgtaagggacaatggctgcccacgtgtcaagggctgcattccaacagggacataagttccacgagggggaagggaacccaatccacactgaaggaatcagggagaatttccagaggaaatgtcaaccatgccctgaggttagcagagccaggcagatggggtaggtaggagggaatggaggagaggaagtgccagcatggggaataactgtgccaatggccctggggttggcgcaaagttggtgaatcctcagagtgcagaggctgtctctccatttctgcatctgtttgatgtttactgaacatccgctgagccccaggtcttgttcttgggggcgggtgcaacagtgcataacatggacatgaccctgccctggtggggcttgcaacagaccaaaaaccatgtccagtaactgtaagttgtgttaaaacgctgcgaagggaacacagtgctggtgtcaaatgtgatggggttctgcagttagatgagtctgaaagtggggctggggctgctctgagaatccctgtcattcagctgtagagtttaggcccttcccaagaactggagtgatcccaatgtgtgttaggcagattttgaaaacatcgccctgtagacagaggggcagagtgagctggaaggggctctcctttgactgatgctccccgatttcccttctcctagcacctgggcccctgggctactgctgccctctggcccagccctgctatctccctccgtcctgcaggacagcctctccctggggcgctcggagcagccgcaccccatctgctccttccaggatgacttccaggagtttgagatgatcgatgacaatgaagaggaggacgatgagga

SEQ ID NO: 28864 - DNA, 2300 bp, Homo sapien
gtctgcctggcctgcatcattcccactcgctcacaactcaagctttcaaggacatcaaaagagaggagaatctcatccagttttcagttcagggacccacagcaaagtctgtctaactagacgcatccgatcagagctgcaaaactgactagcctgcaggacggccccaagacggggtttacaggggttttaggcctgtgttctaccctctttatgacagaaaaacacagaaagacaagaatgaaagacgactatttctggggaaaaaaagcaatcaaacaatatgaatacaaaactaatcacataaatacatttctctcattaaaactttgaagaggaaaacaaggtaaacagacatttttaccgtcggcttgacaagattccagagaggccgggagcctggctgctaagaccttcttacccttctttctgccagcttgtcggctcctgggttcccctgacggaggctcccaggagagtgactttagttatcctaccgactgcaccaaaactgtaggagcctagagaaaaacttttctgcattctgagttcacagaaaatcaactgacaaaagccaggttagtaagaaaaaaggcatacagatttattcatgcacacagggagaaccagagtgatgaccccaacctcccaatggggttcggaagcttatataccatcttgaggttacagaaagaacatgggctcaaagtatggccacagtttatggtggaaaatcaggtgaccagtggcaagaccggttacaggagggagagcagaggaggcctggctagcaaaggtggccttgttctacagatgaaacctcacaggtagcagccctgagagagaacagatggtgaatgttcccttcaggcctttaaaggcgtcagactgttactcttcccagatcaggcaaggagggcctcagaggaggcctggccgcatcagtgtagattctctccacagatgcaaatctcccccacaaaagacagcttttcagctattcttctatttccagtccttctgagtaactgtcttgaaccgtgtcaaggaaatatatttggaggtgacatattgtgttttccttcaagatcaaaaaggttaagtccaaggctgcccaacgagggagcgaggacccaatcacgttgtcctcagatgagtttttccccagcagcgtaaccctgcaacaggccagactggaccccagacacacattccacaccacaccacgcctccaccaccacacgcacacaacagacacaccctaaacaccagacacacacacacacctcaaccaccgcaaacacacatacgccacacctctaacaccacacacacccaacaccacacacatacgtgcctcaaacactacacacacctcaaccaccatacacctcaaccacacacacccctcaaacaccaaacacacccctcaaccacacacacacacccctcaaacaccacacacccacctcaaacaccacacacacatatccctcaaacactacaaaaacacacacacacacctcaaacaccacacatgcacacacacctgaaacaccacacacctgcctcaaacactccacacacaccacacacagacacgtacacagccccccgcacccagccacagcttacacgcacacagacacgcgtacgcaggagaaagggtgtcaaagcttttgctagtcgtgaaggaagagcccgcagtccatggggctgcacggttttccctgccatttgctcattcaccgggtgcccataacgctccgcgctcaggtctcttacaggagggcccgagtctcccagtaccggaggtctgggggcgcacgagccgctcctcctctggagaagctccggaccgagaggacaccggacactgcgcagcgccgagccccgcgcgcagcccgggacgcctcagccagggccgaccgcgcagaggaagctcccagagcccgtttcaagaccgcagccaacagcctcaggcgcacacggcggcctcggagcgagcacgcgcagcaacgcccctcgccccggcccgcccccggccccgcccccggccccgcccccggccccgccccgcaagggtcacaggtcacggggcggggccgaggcggaagcgcccgcagcccggtaccggctcctcctgggctccctctagcgccttccccccggcccgactccgctggtcagcgccaagtgacttacgcccccgaccctgagcccggaccgctaggcgaggaggatcagatctccgctcgagaatctgaaggtgccctggtcctggaggagttccgtcccag

SEQ ID NO: 28865 - DNA, 2300 bp, Homo sapien
agcctcgccttctcgtttcttttttgtttcttttttttcgtgagatggagtttcactcttggtgcccaggcggtagtgcaatggcgcaatcttggctcaccaccacctccgcctcctgggttcaagcaattctcatgcctcagcctcctgagtagctgggattacaggcatgcactgccacacccggccaatttttgtattattagtagagacggggtttctccatgttggtcaggctggtttcgaactcccgacctcaagtgatctacctgccttggcctcccaaagtgctaggattacaggcgtgagccactgaacccggccttctcttgtttcttaagatgtataattaggttattgatttgagattgttttcctttttaaaagtaagtgtttacagcgttgtttccctttaagtactgcttttgctccatatgttgtatttttgttcttgtttgtcttaaagtgttttctaattttccttatgattgatttcttttttctctttctttcttttttttttttaagagatgggatctcactctatggcccaggctggagtgccctggcttgattttggctcactgcagcctcaacctcctagtctcaagccatcctcccacctcagcttcctgagtagctgtaactacagggtgcagcaccacacctggctttttctattttttatagagatgggggtgtcactatgttgtccaggctggtctcaaactcctgacttcaagtgatcctcctgccttgacctcccaaagtgctgggattataggcttgagccaccatttcttttttgagcctggtttcttttttgacacattggttgcttaggagtatggtgtttaatttccacatatttgtgaattttccagttttctttcacttctcgatttctagctttgtttcgttgtggttgaaaaagatactttgtatgatttcagtcttttaaaactttatcaagacttgttttgcggccaaacatacagtctgtctgggagaatgttccatgtgtactcgagaagaattcttgaatatattctgctcttgttgggtggcatgttctgtacgtatcgttgagtctaattggtttaagtcttctatgtccttattgatctctccagatgttctacccattattgaaagtaaggtattaaagtttcttactattattgtggaactgtctatttctctcttaaattgtgttgtttgtatcatattttgatgttctgttgttcggtgtgtatatgttagtaattgttaatcaacatataatgtccttctctgtctcttgttacagtttttatcttaaagtttattttgtatgatgttaatataaccacccagctctcttttggttactatttacattagattgctttttttatcctttcactttgaacctatttgtgtctttggatttaaagtgattattttgtaagtagcatatagttggataatactttttaatcactatctgctttttaagtaaaattctattggaacacaaacacacctatctgcttgtatgttgtttgtggtggttttcatgctgcggtggcagagttgagtcattgcaacacagactatatagcttgcaaagccttaagtagttactgtccaattctttccagaaaaggtttgctgatccctggtctagaatgtcttttatagtttccctggttatagttaactgcaaatggtcctgttcagcagtagtctggtgagattcgtcacatgtagcctgttttgtctctcctgaagcttgtgaaatgcagttcttagagcatatctgagcaccctcaaggcccctttcggctgagaggagaagcaggcttctacctctgaagctagggtgagaggcagtttgactgggatgtggccccttaatggtagcttcatttgtagggtggccaactcttttggtttgcctggaaccaaggcagttcctggaacataggatttagttttaacatctggaaagcctgggcaaactggacaagttggtcacccagctggctgttcagagtcttacctatgcccccttaccccagtaccattcagggaaacccccagctatgcgaagcggcggcgactggctggccccagtggcttggcatcccctcggcctctgcagcgctcagccagcgatatcaacctgaagggggaggcacagccagcagcttctcctggaccctcgctgagaagcctcccccaccagctgctgctccagcggctgcaagaggagaaagatcgtgaccgggatgccgaccaggagagcaacatcagtg

SEQ ID NO: 28866 - DNA, 2300 bp, Homo sapien
tgtgggtgttcactgcgtgttcatacacagtgcagggaatgcagcaggagacccaggacgaactgggcacaatttctctgtccagcggttggggatggggggaaggcagacctaaaaatcacgatgatgatgacctcggcccccttcccccattcccaggatactgctgcagttcagccctgcactgtaaaggtgaaatcgccccacaatagttgcaggctgtcctcttgacatgaggaaactgaagttcctagaggcttctgaagttcctggcagatctaaaattcaagcctaggtctgtacacaaaagcccacccttggtaccttggctacaaagagatattatgcccagcaagaagcagtgtagtactggaggcctcattagcactgcggtggctggaggaggatgcgatcaggaacaggcagtctgtattttagcgagttcataaaaatgttgaccaatctcagagtgaggctgggaacaggagcaccacgagacctgggtgtgtgggtgtggggccgtccgccccctgcagcctcactgaacacacctgcagcacgtgtgtccgcatcatgatgtccacaggggtgttcaggaggttgtgtcaggttctgctggacagcaggagcatgagggccctgagcactccagcccctgcacaggaccctaacaatgatgtctgagcaaggcatgcagaggggggttactgaagctcaaaggggctcagggcctggcctggggtcacgctgccagtaggggttaaaatgaaacatgctgggtgctcagcctgcagttccattttgattgatccgtccgttcttcccttcacccactcacccatgcgggtctctgggaggagcctctcaaggcttcctccacagggcacctccttacctgggtgggcattaggtctttctctgctggaggcctggctccagtggccacagccctgctgcccctcaccctgccagtgtgtcactcctgctcatttccgactatcttcctctcacctctggttgcctccagggctggtacttctgcgtcggccttgttgattctggggtggggagccctgtactggcccctccaagcccctcagcagttctgtccccatgtcttgcggggctgtccctgcctttctgggatatcttctcagggcctgcttgatgaccctgggtttgggcaggtcttggccccaacccaggccgtcagagtttgtgtcctttctcaggggtccccggtggggccctcctccatcctgtaactgaacgcacacctctctcctgtcctcttcacaagagccctccccgtgcagccctgggcctggggcacagagcttgggcatccagggaccagcccagaccagggtcttgctcggagcccgggctctgggctccctgtttctcccctgccctccattccccgcccaccacgggtcccaaccccatcttcccgagcattctagctcctcgcgccgggttctgccgcgggcgtccattgtgtccggacggtggcttccccggggtggagtcgggtcaaggctggcctctgtgggagggggttgccggggtccccaggaacctctccgaaggcagcaccaccccccgcccagcgccctggctggtctcaccggcccttccgtccgcaggggaggacgagaagctggcgtccctgctggaagggcgcttcccgcggagcacctcgatgcaagacccggtgcgcgagggtcgcggcatcccgcccccgccgcagaccgcgccgcctcccccgcccgcgccctactacttcgactcggggccgcccccggccttctcgccgccgcccccgccgggccgcgcctacgacacggtgcgctccagcttcaagcccggcctggaggcgcgcctgggcgcgggcgctgccggcctgtacgagccgggcgcggccctcggcccgctgccgtatcccgagcggcagaagcgcgcgcgctccatgatcatcctgcaggactcggcgcccgagtcgggcgacgcccctcgacccccgcccgcggccaccccgcccgagcgacccaagcgccggccgcggccgcccggccccgacagcccctacgccaacctgggcgccttcagcgccagcctcttcgctccgtccaagccgcagcgccgcaagagccccctggtgaagcagctgcaggtggaggacgcgcaggagcgcgcggccctggccgtgggcagccccggtcccggcggcggcagcttcgcccgcgagccctccccgacccaccgcggtccgcgcccgggtggcctcgactacggcg

SEQ ID NO: 28867 - DNA, 2300 bp, Homo sapien
gtgctcagcctgcagttccattttgattgatccgtccgttcttcccttcacccactcacccatgcgggtctctgggaggagcctctcaaggcttcctccacagggcacctccttacctgggtgggcattaggtctttctctgctggaggcctggctccagtggccacagccctgctgcccctcaccctgccagtgtgtcactcctgctcatttccgactatcttcctctcacctctggttgcctccagggctggtacttctgcgtcggccttgttgattctggggtggggagccctgtactggcccctccaagcccctcagcagttctgtccccatgtcttgcggggctgtccctgcctttctgggatatcttctcagggcctgcttgatgaccctgggtttgggcaggtcttggccccaacccaggccgtcagagtttgtgtcctttctcaggggtccccggtggggccctcctccatcctgtaactgaacgcacacctctctcctgtcctcttcacaagagccctccccgtgcagccctgggcctggggcacagagcttgggcatccagggaccagcccagaccagggtcttgctcggagcccgggctctgggctccctgtttctcccctgccctccattccccgcccaccacgggtcccaaccccatcttcccgagcattctagctcctcgcgccgggttctgccgcgggcgtccattgtgtccggacggtggcttccccggggtggagtcgggtcaaggctggcctctgtgggagggggttgccggggtccccaggaacctctccgaaggcagcaccaccccccgcccagcgccctggctggtctcaccggcccttccgtccgcaggggaggacgagaagctggcgtccctgctggaagggcgcttcccgcggagcacctcgatgcaagacccggtgcgcgagggtcgcggcatcccgcccccgccgcagaccgcgccgcctcccccgcccgcgccctactacttcgactcggggccgcccccggccttctcgccgccgcccccgccgggccgcgcctacgacacggtgcgctccagcttcaagcccggcctggaggcgcgcctgggcgcgggcgctgccggcctgtacgagccgggcgcggccctcggcccgctgccgtatcccgagcggcagaagcgcgcgcgctccatgatcatcctgcaggactcggcgcccgagtcgggcgacgcccctcgacccccgcccgcggccaccccgcccgagcgacccaagcgccggccgcggccgcccggccccgacagcccctacgccaacctgggcgccttcagcgccagcctcttcgctccgtccaagccgcagcgccgcaagagccccctggtgaagcagctgcaggtggaggacgcgcaggagcgcgcggccctggccgtgggcagccccggtcccggcggcggcagcttcgcccgcgagccctccccgacccaccgcggtccgcgcccgggtggcctcgactacggcgcgggcgatggcccggggctcgcgttcggcggcccgggcccggccaaggaccggcggctggaggagcggcgccgctccactgtgttcctgtccgtgggggccatcgagggcagcgcccccggcgcggatctgccatccctacagccctcccgctccatcgacgagcgcctcctggggaccggccccaccgccggccgcgacctgctgctgccctccccggtgtctgccctgaagccgttggtcagcggcccgagcctggggccctcgggttccaccttcatccacccactcaccggcaaacccctggaccccagctcacccctggcccttgccctggctgcccgagagcgagctctggcctcccaggcgccctcccggtcccccacacccgtgcacagtcccgacgccgaccgccccggacccctgtttgtggatgtacaggcccgggacccagagcgagggtccctggcttccccggctttctccccacggagcccagcctggattcctgtgcctgctcgcagggaggcagagaaggtcccccgggaggagcggaagtcacccgaggacaagaagtccatgatcctcagcgtcctggacacatccctgcagcggccagctggcctcatcgttgtgcacgccaccagcaacgggcaggagcccagcaggctggggggggccgaagaggagcgcccgggcaccccggagttggccccggcccccatgcagtcagcggctgtggcagagcccctgcccagcccccgggcccagccccctggt

SEQ ID NO: 28868 - DNA, 2300 bp, Homo sapien
catgtgtggataccccagtagaggtgttggactcatcagaggctgtctgggtctcacatgtagcattcctgggcacactggccatagcaaagggtgtgagtggataatgttgcccaggagaaactgcaaactaagaggggagctctccgaaaatccatctaggaaggaagaggcctgggaaagaatgtctcgaagggaaacatgaacaggtcagcagcggggtcttgctgaccgcctggccaactgtggggcagagggcggagtggggagggtgtggcaaggccagacctctctcactggctgagagtcactgggaaacagtgagacggtgcaggattcaaatgtaggtggaaagacgtggggccgtgggggcctcagtgtgatctggactcagcctcttcagcgtggctgctggaggtgttcgtgggtgacggtgcctggtgaagtatcatgtgttagagggtgggtggcccagaagctctctgggaggctggcaggtgctgtgatgtggctgtttggcggccggagcctggccagggaggtggccagacggctgagagtgacagtgggtgtgcagagaggccatggaaacatggaagtcagacatggacactgctcgggtttgtgccctggggatggtgtgggcagtaccctcttccccaagagaaagaggagaagcagacacctgggccatgggtgaccccaggcccctccctcctgtgccctggggcctttggcaggcacagccttccttgggcgttttctcttggcctcctgacatctccagcatgctctgggaggcgggagcaatgtgaatggctctcctcacatctcttgccctcgggcccctggctccgtgggtgcctctggagccagcctgccctctgcccaggtctccagctcagcccctgccagtactacccagacaggcacaactctgctctgcccagctcggacctcctggagcccagaccctgctctgggctccggccgagcctcctggctgcgctgcccgcgcctgccctgtgcctctgccttcactgctgtggtcctgcaactcatcagtgtgcttcagtcacacctgagactccaggtacacctgccatcacaactccactgaaagctaagccttggggcaggggcagggccagggtaggtgtccatcctgtgatacaggtccccaggccagggccactttgttggggctggtgggtggaggccaggtgcatattcctggtcctgcccctctctgggtgtccacagtcaggtccctctgagtgattctctcggagtctcctctggcaagcccctccagcagtcaccaccacctgggcacccacccccaggggaccccccgacccaacaccacctggcacctccccttgggaatccccccaaccttggctgcctccccactttggcccactgtgcaggtggatccatggaggccaggtccaatgggagcaaagacagcttattctggtggttggtgcctgtgctgaggcccacctcaggtgttcttgaagcccctttctgtttgggggcacagtgtggcctcttcaggaagttctgctctggatctgagcagctgggaggaggcagtagggacagaggctgaggagaggacagaaatgaggtcccatgggagagacagagctcagatctccacagagggctgacctctcacaggtgggagacaaaagacgaaacctgctttaaggggagccccatgcgtgtgtggggcaggcactggtgatgctgtgtggtgaggacagcctttaaggggagccccatgcctgtatggggcagggactggtgatgctgtgtggtgaggacagcacagaggttggggtggggggactcagcctgggcaggggcagggagagggggtgggagggccactggagaggggcccggccaaagaggatgtcaggggctcagcacccccaggcggccaggcacctgccgagcactgcagccacgcttgtggttcacctgcacttggagactctcgcacaggcgcctctcctccaccagcagctccagctttgtccctcccacagcagctgggccctctgcacctgagttcctccctccacacctggctgcccattgtgtggttgcagctgtgggtcgcgtgggcctggccggctaactctctctctcattgctctctcctgcccatctgcatgtggctgctctgtcgagctgcgccgtggtcccgagcgccggctgtgtaagtgagcatgcccatcccatgcctcttgccgtccacacgctgtgcctgtctgcctgggtct

SEQ ID NO: 28869 - DNA, 2300 bp, Homo sapien
ttttttttttgagacagggtttcactcccattgcccaagcttgagtgcaatggtgcgatctcggctcactgcaacttctgccttctgggttcaaatgattctcctgcctcagctttctgagtagctgggatgcaggtgccactgcacctggctaatttttgtattttttgtacagacggggttttgccgtgttgcccaggctggtctggggctcctgagctcaagtgatctgcctgcctcaccctctcaaagtgctgggattacaggcatgagcctctgcacttgggcccacttcttcaattcttcttgccatttcttgaaccatatttccaaagtctttttctggttatttatgagacacaacttgatgctcagttaaaataagtgaggtccgctaacactcagtagtgcagctgaaacctattcacattcaagtcacgaaatagaacttgtatgcccttcagctagaggaagtggggctacctgacataaaggtagaaaaatcccctgacactcggaggagataaagtgtcatgacttagatagggcatataggagataggaggtttcatgactctcaggtaagggagatgagacctccagacaaccaggaagaggtgagaatacctccagacctcagggggttgagatgagaactttggacacccagaatagaggagatctcatgatactctagcagaggagatgaaagctccatgccatttagacagggatatgagactatattcaagtagagggtaggacatgccctggcacccagatgggggcaatgagatctcccaacactctggtataccggtggagacttcagaacattcatataggtaaaatacaacctcttgacattcagctggaagatgtaagacctcttgattttcaggtagagaaagtgcgacagggtgacacttgggtggtggaggtgagaattcttaacctgtaggtggaggcgatgagggcctctggcactgaagtggaaaaacagagttgttatttctttcaaagaaggaggtgatcactccctgatactgggtaagatatacgagacctattgaacattcatttgaggatgtcataagtacgacattcagttagagaaaatagataaatcaagatcatctgataatctgaaaactcaacactcaggaataggagatgagatgtcctgacactcaggttggaggcatgggaccttctgacacccacttagatgatgtgcaacctattgaccctcgggctggttgagatcttacattcaggtagaagaggtaaggctgccctcatgcaggtaagagtgtgacctcctgacacttgcaggcgatgggaaatgttttaacattcaggtgtttgcaataagcatttgtcacactctggtaggtgagatgctagttcctgatgatcagatgggaaaaatgatgcttcatgatattcaggtagctgtatgaaaactcttgacattcaagtataggagaaaacaccttgctccacctcagtcacagaaagccgatctggagacattcaggataataggagaccttgtgatattcagcaacggacaggaaggtgggctttgcagttgtaaattaggaaaattcaaaatgactcttggaaaagtgtgttgatagcattcacttggaagaggaaaagaaaacttccccaacaacaattaaggatcaattaatctgctgaccctgactcctctgatccacaaacatgttgcaccgtctcatcactgaagggctgagccgctcctcagtctgtgagtctgcagtggtcacagcacgcatgagaggcagactctgaacctgcacaaagccagagccttgggtgatgtggggacctcgcaagagttactgggaatggagatcctggccttgggacagagggagtggggctgcacaggagtcccccatcatcctggtggtgggggagcctatgcaggaagtcaagaagtctcttcagcacaaaccagttaaggcgaggggctcttacctggcctgactgctgggggtggggtgggggtcacccctgctgattggccaggcagccacggagctttgtgaggtcactaggcttgcaggccaggcagtgccaggagtatggttgagatgctaccaactgccattctgctggtcttggcagtgtccgtggttgctaaagataacgccacgtgtgagtaagtgtcggggcaccttggtgggggaaggatcttctgaggagcaggtaccaccccgactccctctgtccagggctagggaaaaggaggctgcatccctaacctg

SEQ ID NO: 28870 - DNA, 2300 bp, Homo sapien
cagacacagcctcaaccccattctaagcaacgctgcgctctgcctgcacctgctgtcagcccccccgtagacagccagacgagtcacccatcacgtgacctggcacaggggactgtggaaggccacagtgatggctctacgtgtagcgccgtgaggaggatgaaagcagcctggctgggtgtcaacaagtgaccgctgcacctcaaagaccaccaggagaatggccagcagcgtccccccttggaggcgctcccatactcacctttctcttctatatatccccagccggccacccagcagctctgggagcctctggggaggcctgccttaaagtggggcaggcagcccggcccaatgaagcgcccacacgaaatgggaggggtgatctccacgagggcaatgtcatttccctctgtcgcagagttgtatttttcatgaatgatgattttctccacatatctctcttgcagaggcgcctttactggtttattgttcccatatgtaatttcctttgctccgaaaaccagtctccagtcatgcacattactgtgggcacaaaggtaagccaggtcacaaccggctggacaaaagcctggtgacagcgaccctcagggccttcccctagcaaaggtctggaccagcccccggagtcttgcagccacttggcccagagccccagggagacgctgcacagcatccccggggaacgcccctctctgagaagagccgttctgaagacctccctcagtgcatccctacacgtactttttgccgacgaagcagtgagcagcagtgagcacccatcgtgaattcagcaagctgcctccacatgtgtggtacctgtggctgttgtacgtgaagatctggaggctgaccatccagggccaggccccatgctgtgcagccttcccgccgacgatgcggacaccaccctgtgggttttgcctgaaccgtaacccacaggggccactggggagagaccagagcacagttcaaacctggcatgagcacagcctgtccttgtaactccacaactgaggggaggcagggacatggggttgggaaaagtggggaagagcttccgggttctgggaaagcaggggcagcctgcgctatgtaggaagccgcaggctctaggaaatggttctggggccacgacttctcaggtcttgtgggtgcagtcacagatggagaaagaggaggccataggaagccaggacaggctgcatgggccctgagggatggcccgtccctgggcagaacaggagggtagaggtggggatgcggggcctggggacagaggggtgtaatggcctgaggtccttataaccaatcttgggtgggagactcagggaagtcaggtgatgaagggggtcgttgacagtgatgggaggagggatagcagccaggggcagatactgtggcccacaggtgtagggggcacactgagagcagtggaggtctagaggtggaggctctgggaactgtgtcacgggtgggaggccacatatagcttgggaggtgttggtatttcggggtaccttggagtgagagagcctactggggggtaggggtgcaagcggtgtgaagcgatgatatcctggggctgttgggggcaaccacgggttgggacagctgtctgtggggggataagggctcccaaaatcaggacttcatgtcttcaagacagtggggtcagtccctgggggagtgggagaggcacaaggagcctgaggtgctgaggggtccatctctggaggaaaccacgaaagctgagggtctgggggctccaggctgctgattctgggagcagggggggtccaggttagggatgcagcctccttttccctagccctggacagagggagtcggggtggtacctgctcctcagaagatccttcccccaccaaggtgccccgacacttactcacacgtggcgttatctttagcaaccacggacactgccaagaccagcagaatggcagttggtagcatctcaaccatactcctggcactgcctggcctgcaagcctagtgacctcacaaagctccgtggctgcctggccaatcagcaggggtgacccccaccccacccccagcagtcaggccaggtaagagcccctcgccttaactggtttgtgctgaagagacttcttgacttcctgcataggctcccccaccaccaggatgatgggggactcctgtgcagccccactccctctgtcccaaggccaggatctccattcccagtaactcttgcgaggtccccacatcacccaaggctctggctttgtgcaggt

SEQ ID NO: 28871 - DNA, 2300 bp, Homo sapien
tggcccacctttctttttgtcagttggcaaaccagcacctggattaaaagttttgcttctcctggcaatatcctttgcaagctgtgcaccccgtttgcccttgaacattttctctgcttcctgacgctctttagtttcactttctggaaatccagtactctgatttgcggaactttataaatcacatacaatctgtaatgcttcttattggttactggatttcttaggatacttaggtaagtcagcgatttgagagatgccagagggtccagatcacccagttccacgagcctattattggtgagaatgagttctgtcagacagggcagagcctgatcaagtccctcacctatacggcatattctgttttgttcactaacaacgttttcagtcttctcaacaaaggaaaaccatccagtttcctgatctcattgtcagaaaaatcaatagcatcaaactggtctaacgtagcacctagattttcaatgacgggaattttatacccccggaggtccagctcccggtcgcgcaccgcgctggtgtactgcgccgcctgctcgatcagctccgccgtcagcttgaccatcctgcggcctcccgttcccccgcgctgtggaaagctgaaaattcttttaagaatgttgaatattggcccccactctcttctggcttgtagagtttctgacgagagatccgctgttagtctgatgggcttccctttgtggggaacccgacctttctctctggctgcccttaacattttttccttcatttccactttggtgattctgacaattatgtgtcttggagttgctcttctcgaggagtatctttgtggcgttctctgtatttcctgaatctgaatgttggcctgccttgctagattggggaagttctcctggataatatcctgcagagtgttttccaacttggttccattctccccgtcactttcaggtacaccaatcagatgtagatttggtcttttcacatagtcccatatttcttgaaggctttgttcgtttctttttattcttttttctctaaacttcccttctcgcttcatttcattcatttcattttccatcactgataccctttcttccagttgatcgcatcggctcctgaggcttctgcattcttcacgtagttctcgagccttggctttcagctccatcagctcctttaaggacttctctgcgttggttattctagttatccatttgtctaattttttttcacagttttaaacttctttgctattggtttgaatttcctcctgtagcttggagtagtttgatcatctgaagccttcttctctcagctcgtcaaagtcattctctgtccagctttgttccattgctggtgaggagctgcgttcctttggaggaggagaggcgctctgctttttagagtttccagtttttctgctctgttttttccccatctttgtggttttatctacttttggtctttgatgatggtgatgtacagatgggttttcggtgtggatgtcctttctgtttgttagtttccttctaacacacaggaccctcagctgcaggtctgttggagtttgctagaggtccactccagactctgtttgcctgggtatccacagcggtgtttgcagaacagtggtttttcatgaaccgcgaatgctgctgtctgatcgttcctctggaagttttgtctcagaggagtacccggccgtgtgaagtgtcagtctgcccctactggggggtgcctcccagttaggctgctcaggggtcaggggtcagtgacacacttgaggaggcagtctgccggttctcagatctccagctgcgtgctgggagaaccactgctctcttcgaagctgtcagacagggacatttaagtctgcagaggttactgctgtctttttgtctgtctgtgccctgcccccagaggtggagcctacagaggcaggcaggcctccttgagctgtggtgggctccacccagttcgagcttcccggctgctttgtttacctaatcaagcctgggcaatggcgggcgcccctcccccagcctcgctgccgccttgcagtttgatctcagactgctgtgctagcaatcagcgagactccgtgggcgtaggaccctccgagccacatgcaggatataatctcccggtgtgccgttttttaagcccgttggaaaagcgcagtattagggtgggagtgacccgattttccaggtgccgtctgtcgcccctttctttgactcggaaagggaactccctgaccccttgcgcttcccgagtgaggcaatgcctcg

SEQ ID NO: 28872 - DNA, 2300 bp, Homo sapien
agccctgagcttgaaccgtgttgcttgcacaaatagctgggtgatttagaagtgaggtcagctgtgccagcggttacagggtggtggttgtctgtaactttaatccactgactgttgtactagggcagtttgggctagacactttggaggagctcctgtgaagggcatgaaggctcactgtagcagcagctcagttgtctttcagagttctgcccttaagagctggtttgcagtgctcatccttcttgctgatattttaaaataggtagaaacaggctgggcgcggtgactcatgcctttaatcccagtactttgggaggcctaggcgggcagatcacctgaggtcaggagttcgagaccagcctgaccaacatgttgaaaccccgtctctactagaaatacaaaaattagccaggcgtggtggtgcgcacctgtaatccagctactcaggaggctgagacaggagaatcatttgaagacaggagaatcgtttgaacccaggaggtggaggttgcagtggcagtgagccaagataccgccactgcactctagcctgggcaacagagcaagactccatctcaaaataaatacataaataaataaaaataaaataggtaaaaacaaattataaagtaatacaattatgaactgcaaataataaaacataaaaattactttaaaaaaatttaaagaggccgggcacagtggcttatgcctgtaatcccagaaatttgggaggccgaggcaggaggatcacttgagaccgggagtccaagaccagcctcgttaatataatgagagcttatctctacaaaaaataaacaaaattagccaggcatggtggcatgtgcctgtagttccagctactcaggaggctgaggtaggatcaccggagcccagggggtggaggagcagtaagccaagattctgccactgcactccagcctggctgacagagtaagaccctatctcaaaaaacaaaaagcagaaagaacaaagaagtaaacagaagcttaaaagtaaatcagccaggtgcagtagctcatgcctgtaatcccagtactttgggaggcctaggcaggcagatcactgcaggtcaagagtttgagaccagcctggccaacatgatgaaaccctgtctctactaaaactacaaaaattagccaggcatggtggtgcgcacctgtaatcccagctactccggaggctgagacaagagaatcacttgaacctaggaagtggaggttgcagtggcagtgagccaagatagcgccactgcactccagcctgggcaacagagcaagactccatatatggagatcccttgagatcaagagttcgagaccagcctggccaacatggcaaaaccctgtctctactaaaaataaaaaaattagccaggcatggtggcgcacacctgtagtcccagctactgaggaggccgagacaagagaatcacttgaacacagaaggcaaaggttgcagtgagctgagattatgccaccacactccagcctgggtaacagagtgagactccgtctaaaaaaaaaaaaaaaatcaggggcagttgtgatggctaacacttgtaaccccagcacctttagaggcccaggtgggaggatcccttgaggccaagagtttgagatgagcctgggtaacatagggagagcctgcctctacaaaaaaaaaaaaataaaaaaataaaaattaatgcgtgcgtgctacttgggaggctgaggtaggaggattccttgagcccaggagttttgaggttacagtgagctgtgattgagccactgcattctagcctgggtgacagtgaaaccctgtctctaaaaagtaaataaataaataaaagtaaatagtaactaaagtaaaactctagaaacatttacggttactacagaggaactttaaaacagtttaagcaataaatacaagaggactaaaaaacacaaaagtttttacaatttctaacagactgcatcaattggcaaattgattccatttatgattgttaaaataggtgaataagattagatgacaagataacaaaaaaggaatacgttatttatttgtttatttcagacagagttttgctcttgttgcccaggctggagtgcaatggcatgatctgggctcgctgcaacctctgtctccctagttcaagcaattctcctgcctcagcctcccaagtagctgagattacaggcatgcgccaccaggcccagctaattttttgcatttttagtagagacggaatttcaccatgttggccaggctggtctcaaactcctgac

SEQ ID NO: 28873 - DNA, 2300 bp, Homo sapien
ccttcacctctccgggtggcacgtaggcaccgaaattcattacaagaagaagccagtcttcacaatgattatagtcaatcgtcagttctacccagttttctctatttcagagagtccctccaagaaagcatctttaccacctttacccaatctgtcacggtggcatagtcacttttgtctttccattcccactccccgcccttgccatccctcagcccacaaaccacatacaatgtcctcagttgctccacacgttctctcagggctcagaggaaacattcaaattcctcagtccttatgacctgccccctccacctgacacacacaacggctcacgtgattcccctcgttcccccatgaacatctgggctccagccaagactgctccttcaccagccccaagaagccatgctcctctgcctctggaggactttttaaatgacctggaccctctctggggctggtatttattccctaatctcccaacatacttggatttgcccactgcgctgtctcccaggcagatgatcttcacgttgtcatcagcatcatacttcccttggtccaactcactcggtttggttttgtcttctgccattggctcctagctgtagagaggggtccagcccaagggaggggagggtattgtcactgtctgggaagatcaacaagaggctgttgtcagagataagtcccctcaaccaaatctccagctgtacctccctccagactgcttccctcagtgccagactgagatatggtatgcaattgactactagacttggagtagcagagtatgacacacaggcatcaataatatgttatacacaaatagttaagtcctgcgcaccccaaatgctgctcctcacgttacccatttgcacaagacattcaccaggcatccagtgccaaaggctgtgtgcaacattatgtctagctctgttttactctcctcacacctaaatatgactttgcaaacattcctgagaatgtaaccacagtccagactcttagctaggggggcacatagaaatgatatgatgatgagacagcagcaataggtgagccttactgggcattcaccatgagcagaccttgcacagggttcagaggatggaagacacaatgatagcagagtctactgtggtgagagctacgacagaagtatgcacacgggtcaggggtagaaaataccaacagggcccccgagttttcctgactgtgccaccacacagctactgcttctgcacagccagggacttcgccttgtttatccagggagacaattcctgggaagtggcagatgcctggaaagcatgatgaggggtctgccccctttcacctgtaccctgtagagagagcgacagaaagccaaatccagcttcatggctccatgcttgaagacgttctttcttttgtttagagatagggtctcactctgtcgcccaggctggagtgcggtggcgcgatcacggctcactgcagcctccaactcctggactcaagcgatcctccctcctcggcatccctggactataggcgtgagccaccgcttacgggcgaagacttgcttgtccgtgtccttgccatctaagtgggtaagctatctttcgataaatgtttttggccaccaaccatgtccaggcatcgccaggctgcccgtcccgccccccacaacagcctcgcgaagccacctttccgtgcttcccccgacccggacgccctctcgcccacaccgctagggaggcctcggaggggctgtccccgcgtgctaagccagccaccggggcggatttgccctcacgtgcggttccgagtgagggctggagagaccagggacgctgcgggtcggcccctcgggccctgccgccagtctggactctgcgcgctctcgaaccacgcccgccggcccagctcgcgccgcagcgcactccacttccggctcggcccgcgtcctcgcagctgctacgcaaccgcacaaggaccccgagggaggctgcccggccgaaggcctgaaggaccccgccggggcgctggctgcccagcgcggcgcctggcgggagggccgcagggagtgcgcatgcggccgagtgcgggactggggctcctggctgtgggtgtggtaccgaggcttcagcgggtgccgcccgcctagagggagtggagcggtgagcacgtcaggggtggggggcgcaggtcaagctttcaccagtttttaattctttgatggggtaaatttgagcaattttctcgacttgtcgacattcgttattaactgagcaggaatcaggagaggaacc

SEQ ID NO: 28874 - DNA, 2300 bp, Homo sapien
gaagccccctccctgcttcgagttgtcccgcctttcccgagggaaccaacgttcatcttacatatattgatgtctcctgtctccctaacatgtataaaagcaagctgtgtcccggccacctttggcacatgtcaagacctcctgaggctgtgtcacgggcgtgcgtcctcaaccttggcaaaataaactttctaaattgactgagaccgtctcacatattcgaggttcacaagcccatgcatggggacgtcccctggggtagcgcccctcctccactgagctcactcgcttcccccttgtgtgttttcttcagaagaaatttcgcagctacttggtccacacctgtctgccccacaggaacctctcttctccacaggcacatgggcggcgtacctgctgggctgtgtggagaggaccgggttcctctcctgattcctgctcagttaataacgaatgtcgacaagtcgagaaaattgctcaaatttaccccatcaaagaattaaaaactggtgaaagcttgacctgcgccccccacccctgacgtgctcaccgctccactccctctaggcgggcggcacccgctgaagcctcggtaccacacccacagccaggagccccagtcccgcactcggccgcatgcgcactccctgcggccctcccgccaggcgccgcgctgggcagccagcgccccggcggggtccttcaggccttcggccgggcagcctccctcggggtccttgtgcggttgcgtagcagctgcgaggacgcgggccgagccggaagtggagtgcgctgcggcgcgagctgggccggcgggcgtggttcgagagcgcgcagagtccagactggcggcagggcccgaggggccgacccgcagcgtccctggtctctccagccctcactcggaaccgcacgtgagggcaaatccgccccggtggctggcttagcacgcggggacagcccctccgaggcctccctagcggtgtgggcgagagggcgtccgggtcgggggaagcacggaaaggtggcttcgcgaggctgttgtggggggcgggacgggcagcctggcgatgcctggacatggttggtggccaaaaacatttatcgaaagatagcttacccacttagatggcaaggacacggacaagcaagtcttcgcccgtaagcggtggctcacgcctatagtccagggatgccgaggagggaggatcgcttgagtccaggagttggaggctgcagtgagccgtgatcgcgccaccgcactccagcctgggcgacagagtgagaccctatctctaaacaaaagaaagaacgtcttcaagcatggagccatgaagctggatttggctttctgtcgctctctctacagggtacaggtgaaagggggcagacccctcatcatgctttccaggcatctgccacttcccaggaattgtctccctggataaacaaggcgaagtccctggctgtgcagaagcagtagctgtgtggtggcacagtcaggaaaactcgggggccctgttggtattttctacccctgacccgtgtgcatacttctgtcgtagctctcaccacagtagactctgctatcattgtgtcttccatcctctgaaccctgtgcaaggtctgctcatggtgaatgcccagtaaggctcacctattgctgctgtctcatcatcatatcatttctatgtgcccccctagctaagagtctggactgtggttacattctcaggaatgtttgcaaagtcatatttaggtgtgaggagagtaaaacagagctagacataatgttgcacacagcctttggcactggatgcctggtgaatgtcttgtgcaaatgggtaacgtgaggagcagcatttggggtgcgcaggacttaactatttgtgtataacatattattgatgcctgtgtgtcatactctgctactccaagtctagtagtcaattgcataccatatctcagtctggcactgagggaagcagtctggagggaggtacagctggagatttggttgaggggacttatctctgacaacagcctcttgttgatcttcccagacagtgacaataccctcccctcccttgggctggacccctctctacagctaggagccaatggcagaagacaaaaccaaaccgagtgagttggaccaagggaagtatgatgctgatgacaacgtgaagatcatctgcctgggagacagcgcagtgggcaaatccaagtatgttgggagattagggaataaataccagccccagagagggtccaggtcatttaaaaagtcctccagaggc

SEQ ID NO: 28875 - DNA, 2300 bp, Homo sapien
acactgcctagcgcaggtgcaccatcaaccttattcactaaatacacctctgtatatattcttcatctttgattgtggaaatgatataatcaacataaaaatgttttatagattggactaaagacctttgaggtctcttcacaggatcctatctggcggacccccaaatctgccaacacagaggtcatccgtaaacacgtgcaggacagaggccagacaaaaccatctctctcagcctcaaagtggcctggcagtcacatgtggggtctggcctgtatgaggaagtcaggctttcggctccaggcaccctactgcaccgcaaaaccaagttctgcctaagaaacaaaaaacagcctgctcactctccctaatatcccaggtggtaacctaagagcattatctgctagacacccctcctcctccaccctccatgtccaagctatcaccaaggtcctagcaatcttacctcctaaatgtctcccaaatccacttctctcccttcactgtccaggccaccagcatgacttctgcatgtgtgtagcagcctccgcgcaggacgtaaagatgcaaatctagtcgtaggctctctgaaaggaaaattttggggacccaaaattactaagctaaaggaaaagtcaagctgggaactgctcagggcaaacctgcctccctttctattccaagtcacctatctcctcactaagataggtgcatatctgattccctgctttggagaggctaatcagaaactcaaaacaatgcaacctttgtctctcacctacctgtgaccttggaagccccctccctgcttccagttgtccccagctttctggatggaagcaacgtacttcttacatatattgattgatgtctcatgtctccctaaaaccaagctgtgccctgaccaccttgggcacatgtcgtcaagacctcctgaggctgtgtcacgggtgcacctctttctaaattacctgaaaccatctcagatagggttcacacatccctttcccaaaccctcccaggagcccctcgtgggcgcccaggtcctgcgtgctgttgtggcccaggctcacctggagcaactcgactcttcgttacagcctcgtgaacctttcagttcctaaagctgtctagcctgtgaaaggaaaatgaatctgggggccccaaaatcactaagctaaagggaaaaaagctgggaactgcttagggcaaacctgcctccccatctattcaaagtcacccctctgctcactgagataggttaatatgtgatagcctcctttgcggaggctattcagaaacccgaaagaatacaacagtttgtctctcacctacctgtgacctggaagccccctccctgcttcgagttgtcccgcctttcccgagggaaccaacgttcatcttacatatattgatgtctcctgtctccctaacatgtataaaagcaagctgtgtcccggccacctttggcacatgtcaagacctcctgaggctgtgtcacgggcgtgcgtcctcaaccttggcaaaataaactttctaaattgactgagaccgtctcacatattcgaggttcacaagcccatgcatggggacgtcccctggggtagcgcccctcctccactgagctcactcgcttcccccttgtgtgttttcttcagaagaaatttcgcagctacttggtccacacctgtctgccccacaggaacctctcttctccacaggcacatgggcggcgtacctgctgggctgtgtggagaggaccgggttcctctcctgattcctgctcagttaataacgaatgtcgacaagtcgagaaaattgctcaaatttaccccatcaaagaattaaaaactggtgaaagcttgacctgcgccccccacccctgacgtgctcaccgctccactccctctaggcgggcggcacccgctgaagcctcggtaccacacccacagccaggagccccagtcccgcactcggccgcatgcgcactccctgcggccctcccgccaggcgccgcgctgggcagccagcgccccggcggggtccttcaggccttcggccgggcagcctccctcggggtccttgtgcggttgcgtagcagctgcgaggacgcgggccgagccggaagtggagtgcgctgcggcgcgagctgggccggcgggcgtggttcgagagcgcgcagagtccagactggcggcagggcccgaggggccgacccgcagcgtccctggtctctccagccctcactcggaaccgcacgtgagggcaaatccgccccggtggctggcttagcacgcggg

SEQ ID NO: 28876 - DNA, 2300 bp, Homo sapien
agggcatccccaataccaaatcctccagtgaccacttcttcaccttctaccccaccaccaaagtctgcaggagacttgagacaggtttgttctgggcgtgtgactgatgcctctataggggtctcagtgctctaagccgtctggtatttgcctggggtgtgtgaagacctggattaaggttcccagccttactactaatgggctgtgcacttggagcccttagagccttaggtttctaacctataaaatggacttaacgtctacttcacagggttctatttgcattttaacagaaaacaaagtcttaagtcaaaggaatgaatctctctctctctctctctctctctcttttttagaccaagtctagctctgtcactggagtgcaatggtgcgatctctgctcactgcaacctccacctccggggttcaagcaattctcgtgcctcagcctcctgagtagctgggactacaggcgtgcatcaccatgctcggctaattttttgtatttttagtagagactgggtttcgccatgttgcccaggctggtctcgaactcctggcctcagatatccgtccgtcccagcctcccaaagtgctgggattacaggcatgagccactgtgcccagccaggaatggatcgctaatagaggaattccaagtctcacccaccgataaagaattctgagggcagagccgggccactttctcaggcctctgatttcatactgtggtgttagttacttctgagaggacagcttgctgccagagctctattttttatgttagaggctccttctgcctgcagactctgctgtctgggaagggcacagcgttaggagggagagggaggtgtgagtccctccgtggacccgctgctttgtacttctctatctcatttccttttcagcaccactctgggaaatcagtattccagccccattttatcctcagaaaattgaggctctgagatgttatctctgtgacctgggtcctattacgtgccaaaggcatcatttaagcctaagatgtcctggctccaaggtgtcagcatctggaagacaggcgccctcatcctgccatccctgctgcggcttcactgtgggcccaggggacatctcagccccgagaagggtcagcggcccctcctggaccaccgactccccgcagaactcctctgtgccctctcctcaccagaccttgttcctcccagttgctcccacagccagggggcagtgagggctgctcttcccccagccccactgaggaacccaggaaggtgaacgagagaatcagtcctggtgggggctggggagggccccagacatgagaccagctcctcccccaggggatgttatcagtgggtccagagggcaaaatagggagcctggtggagggaggggcaaaggcctcgggctctgagcggccttggcccttctccaccaacccctgccctacactcagggggaggcggcggtggggcacacagggtgggggcgggtggggggctgctgggtgagcagcactcgcctgcctggattgaaacccagagatggaggtgctgggaggggctgtgagagctcagccctgtaaccaggccttgccggagccactgatgcccggtcttctgtgcctttactccaaacatcccccagcccaagccacccacttgttctcaagtctgaagaagcccctcacccctctactccaggctgtgttcagggcttggggctggtggagggaggggcctgaaattccagtgtgaaaggctgagatgggcccgaggcccctggcctatgtccaagccatttcccctctcaccagcctctccctggggagccagtcagctaggaaggaatgagggctccccaggcccacccccagttcctgagctcatctgggctgcagggctggcgggacagcagcgtggactcagtctcctagggatttcccaactctcccgcccgcttgctgcatctggacaccctgcctcaggccctcatctccactggtcagcaggtgacctttgcccagcgccctgggtcctcagtgcctgctgccctggagatgatataaaacaggtcagaaccctcctgcctgtctgctcagttcatccctagaggcagctgctccaggtaatgccctctggggaggggaaagaggaggggaggaggatgaagaggggcaagaggagctccctgcccagcccagccagcaagcctggagaagcacttgctagagctaaggaagcctcggagctggacgggtgccccccacccctcatcataacctgaagaacatg

SEQ ID NO: 28877 - DNA, 2300 bp, Homo sapien
atgggatttgttattgtgtgcagataaaatgtgctgatgcctccattatttatgggatgagataaaagtcatgcagccttatgagacaaaaggcaggtatatgttttatatgtatgtttttaatgtgttctgtcatagacattataccttctatagcccagggattacctaatgtaaatttcaggtggagtaaaactgtcaacatttaatattttttatgacttacatttatgcagctaggggacaaacatctcactttagaaaactgtgtgtattaggtagagtgaaattggttttctcattttattttcttaaagtatctagtgtttatgttagagaaaaacaatacccctaagcttaggggtggtttctaaattttaagggcctttatgtgaaagaaaaaaaatgttcccaatgattaaaatgctttagaaatattttaacgtataaaatctgatttcataaatttagaaaataaaaatatttgtctttattttaaagtaaatagaggccaggcgcagtcccttacacctgtaatctcagcactttgggaggctgaggcaggaggatcgcctgagcctgggagatgaggctgcagtgagctatgacagcaccactgcactccagcctgggcaacagagagagacgctgtctcaaacattaataaataaataaataaataaataaataaataaagcacatgggatatgctgtcagctaacaacaagggcaatagtctcgatcaattctcagcagaatcttattcctactttttgttattgtttttcttgtggtaaattagggttcaagtgtggccgtgaagcagagaaaggtcatctagttacaaataacacaatacatctaattcacagctaatgctggcaaggttacgtgagtcaaggcactgtcaggaactattgatgatggtataaaatgttgtaattttctgcagagaaatttcataatatattccaaaaagctttaaaatatttataccgtttgaataattcaacatctagaaatgtatgctaaagcaatggcttatatttagtggtaaaattaagaatcagtctctttgaaatcaggaagaaaatatgcccattaaaacagcttggagtaggggaggtatagagacattggttaattgatacaaaatacagttagatctaaggaataagcaaggtggctacaattaacaataatacgttgtatatttcaaaatcgctagaagagaagatttgaaatgtacccaacacaaagaaatggtgaatgtttgagcttatagatatcctaaataccctgatttgatcattatgcattgtatgtttatcaaaatagcacctgtgccccataaagatgtacaatttaacttaaaataaaacagtataatcaacatgttactaaatttcccagacaatgcaataagatatgaaacataaatggaaagtagatatattagaaagaaagatgcaaaattttaattacagctgataggattgtctccataaaaattcaggaaattctacagctaaactattacagcaaattagattttagcaatgtaggtgaatgtaagagatccatactaaaaaaaagtcagagtctctgcgtagcagcaattagaaaatataattaagaaataagtagagacaaccatcagaattatatattagtatctaattatagcaatgtttagatttaaaataatcaagagaatcctaaatgtaaagcactaggaaaatagtgacatacattatgatatatttctacaatggaatattgctccagtcagagaccctaaagaaaagacataattgtcacaaatttaagctatttgaagaggatctaagtgtgtgacaagaaatcataaggaatgcaatgtccgggctggaatggataaggagtaattaacaaaatctggatgaaaagtgactctccttgagagcagcagccaatcagagttaatccagtaagaaggaacaaggtgaatacaaatgcctgacttcaggcctcctcctttctctgctattttaccctagttccccattgtccaaacccacctgaaaccagagatctaaggagctgttttatttcatatacacagattagctccagaaagaaagcagtgtgaaaaagatgaaacacagatttgaaaggtaaaatgggaaatactgtgcagttatttaaaattatatattcataagtgatttagtgaatgggaatatgtttactctgaatacagtaaaaaaaagtaagatgtataaaataaataattatatactcaatgaaattcccattct

SEQ ID NO: 28878 - DNA, 2300 bp, Homo sapien
ttactggaagctcaggctgtagagttgtgaattcctggggccaggcaagcctagatgtgttgcctgcttttgataatgtatcaaaaatatgaactcatccttggaagcgacagctatgaggtgtttcttggatgtagaaatttaggtcatctgtcttccttttgcattgccttaaaaagtacgatttcctttcttggtttatcatttgctggccttctttctttccatccttcctcccttccttccttccttcctcccttttttccttccctagactttccctatctccctcttttctttcgtaaaatttggttgcctgggataacgtgtattgcatacaagctgacttccttactgtccctagtaagctatgtgtggctattatttcttcatttatatgcaatgccagaagcttagaagaatgttatctccctttcagttaaaaactcatagttaagaactggccatcttcttgttttgggtattgtggcttggtactgtctaatatatttggagggtatttgattttttaaaaagctactggccatgcctattgagtttcctactgagcccagcacccagaccagtgattgattaaatagtagctgctcaataaatatttgttttgtaaataatgattctattgtcaagaaacaaatcaccaagaaagaaggagctatatatttaagagtactctgttcatctggccaaaatggagttccgagtcccttgctcagctgatgtttgttcacccagaagatggtaaactcctgagaccaacttcgctttgttgttctcttgtggttccttgaccttggaaatgtttttctacaggcagagtatttccccctgttggaattttatttaatattctatctttgtttctactttagaaaacatgccacgtgaataatgatgcctcaggcaaaagaaatcactccagcagtacaatttaaacttaggacaaatcctgccctcacttgcattcacaatttgccaaggcagttggtaagaactgtgcccacacacaaattgacagaatcgaggccccaaggttagcgatgattaaaatttaaaagtccattcattcattttcaaaatattttattcgattgcttctgaggcagaatcatgagttgccttcgcttttgctgctcccggtggtggcatccaactctgaggatagctcatccaactctgagggtagctctgaggggagctaaatatcctcattgttcaatgagctagatgaaaacaaaacgaggctgtaaggtcaatctcacagccttagtggagtaaaaattagaagtcaataattctcttaccaacaaagaggacttgcattcaacaggattttcaaaagtggtatcctgtaaaaattttggaaaataccaccataatggaaaaaaaataaagtggcatataaatcaaatgtagtgctaaaaattataatttttccatatgaattttggaatcctaaaatatttttatgtgtttgtggattcataaggcatcagaactggctttttgcactgaatatgagtacagaaggctttcctctccaatagtgaattaataaaggataagtaggaaaaacgttacgaaacgatgtggtaacattatagactctgtattagggcaaaaattgtgagatagtagaagatctgtaaatttaagcatgcacaatttgacagcggatggtcgtagcatattttgtaaattcaatagcaagccccaccacgcccttaaatgaaggaaagcaagaagacaatttttaatacgtacatggcaccacacccctctaagacgcagcaatgggagaaaagcagattggcgacctgtgtgtgcaacatgaaccgagtgaaaccatcggggagggggtggggggcgtttcttttaaatgtcgcttttgcagataaacgagcagggatcctacctcttttgaccggagatgttgaaaagcacgaccaaagtttttggcttggtctcttgctttccacaacgagataaagtctgaagcctgtaactctccctgtcccgcgggagcgtgcaaagggagggaagataagcggcgtgggtgaggggtggcggcgcagaacccaggaagggagcagaggcgagagccagcctccggcaggagggcgtagaccccggtgccagccagaacggctccagccttcccgcggccagagagccagcggcgggaggggacgggcgggacctccgcggacagccccgggtgcggaccagcgggcagcggccggcgagaccctccctggatccgcccagagcttaccgga

SEQ ID NO: 28879 - DNA, 2300 bp, Homo sapien
tatctttgtttctactttagaaaacatgccacgtgaataatgatgcctcaggcaaaagaaatcactccagcagtacaatttaaacttaggacaaatcctgccctcacttgcattcacaatttgccaaggcagttggtaagaactgtgcccacacacaaattgacagaatcgaggccccaaggttagcgatgattaaaatttaaaagtccattcattcattttcaaaatattttattcgattgcttctgaggcagaatcatgagttgccttcgcttttgctgctcccggtggtggcatccaactctgaggatagctcatccaactctgagggtagctctgaggggagctaaatatcctcattgttcaatgagctagatgaaaacaaaacgaggctgtaaggtcaatctcacagccttagtggagtaaaaattagaagtcaataattctcttaccaacaaagaggacttgcattcaacaggattttcaaaagtggtatcctgtaaaaattttggaaaataccaccataatggaaaaaaaataaagtggcatataaatcaaatgtagtgctaaaaattataatttttccatatgaattttggaatcctaaaatatttttatgtgtttgtggattcataaggcatcagaactggctttttgcactgaatatgagtacagaaggctttcctctccaatagtgaattaataaaggataagtaggaaaaacgttacgaaacgatgtggtaacattatagactctgtattagggcaaaaattgtgagatagtagaagatctgtaaatttaagcatgcacaatttgacagcggatggtcgtagcatattttgtaaattcaatagcaagccccaccacgcccttaaatgaaggaaagcaagaagacaatttttaatacgtacatggcaccacacccctctaagacgcagcaatgggagaaaagcagattggcgacctgtgtgtgcaacatgaaccgagtgaaaccatcggggagggggtggggggcgtttcttttaaatgtcgcttttgcagataaacgagcagggatcctacctcttttgaccggagatgttgaaaagcacgaccaaagtttttggcttggtctcttgctttccacaacgagataaagtctgaagcctgtaactctccctgtcccgcgggagcgtgcaaagggagggaagataagcggcgtgggtgaggggtggcggcgcagaacccaggaagggagcagaggcgagagccagcctccggcaggagggcgtagaccccggtgccagccagaacggctccagccttcccgcggccagagagccagcggcgggaggggacgggcgggacctccgcggacagccccgggtgcggaccagcgggcagcggccggcgagaccctccctggatccgcccagagcttaccggaccctgcgcgcccccgtcccggctcccggccggctcgggggagaaggcgcccgaggggaggcgccggacagatcgcgtttcggaggcggcgcaggtgtgtcaggggtgggggtccgctggcatctctcgtgccggcgctgggggggtctcccgtggaggaagggctgaaggtgctccgggaggggtccactcgttatggaaaggaagcggggcgcggtcagggtccctcgtccgcagtgggggtggtccgggcccctcagcctgcacccgggaggagacgcccccttttcacgccccgcccccggtggccgaggccggattcggacagctcggggtcagtcgacggagcacaccgggcgcccgaatccgccgggtcccactcacgcccgccggccgccggtaggttggccctcccgcttccagcctccgccaccccatccctcgctgctctctgaggaggattccagacccccccgtagatctccgccctctctcgggtggggctccgaggtctagctggtctgggggtcagtcccggcctctgtctcccaccgcgcccctcgctcccctggacaccgcctggtgtgtggggctcagacccccccagtccactgcccctgtgtggctcctcctctcaggagaggattctagatcccagcccggggggggttccgaaaatgccgccagcctggagcggggaatccatggaccgtggggttgtggggttggggagcacgaaaacccagagaggggctagagctccacctccccagaccgccgaggggcgagagggcgcgccgggggccgtggttgccatggctcctggtagcggagcccggggggctggagatgccggtcgcggatggtcccttct

SEQ ID NO: 28880 - DNA, 2300 bp, Homo sapien
gtgtattcctattccaaggtgaataaactaaactaactgagggaaaaaaaaaatcaaaacaaaatgaaaactttctgagattttctgcagaccttgttaatacttggattcattggaaagttttgctccaagatattttagagtgtgaaatggatataaattcaccaggggctttagcattgtcccagtgaattaggccatgggcttgtagtgccgtactgcaatctggaatgatagttttcttcagtctctgctgacaataagtgtgtgcaaataatattattcattttacacattttgctccaaagaaaggagttaaatttaataaagttctctgacaaattttaaataaataaataataaaccataacactttaaacaaaaatattttagctatattagcggcctttttagtacctgggaacccaaataaacagcctgaatgctttgtatttgacttgaaggcaatgcctactgagcctcagacatttcccaaataatctcttcaagaaagaacaaaaggagccagggcagagtaagcaggaagaggccaccagccttcccttccctctgcctctcgtgaaggagcccacgaggaaggagtctttagaaaagaggttcttaacgtggggtgtaggaatctctagatggggtacatgtgtatcctttagaggatctgagaaaccaatgatattgttagtatgactttttgtgtgtaattttctagaaaaagagcttgcacgtccaacatagtttcaaagagatctatgacccaagcaaggttataactattaatctagaaaacagaaagactgccgtcctgccttgattccattttttaaaaaattgttgaacatttttatttattcttgagaaacaaaaattgtatctacttattatgtacaacatgttttgaaatatgtatacattgtggagtggctaaattgagctactcaaaatatatgttacttcatatacttattttttatgatgagaacacttaaaacctagtctctcaacaattttcaagaatacaatacattgttatctactatagtcattatgttatacaatatttcatttaattccacttattttcattttaaagccagtaggtcttcttattatacttgtattataaataataaaacctagatccattaggagttaactatcttggatgcgattatataaccaggtaattaaagatgttcctgcttcccaacattagtggggttttgggcttttggttttgcttttggtgtcctttaagtttgaaatgtgttattttgctgagcaaagttaaaaattcacatacatatgcttaagaacaatggaaactctcaagcaaaaattatcctgatacaggtatttaactgataaggttgcagtagactcttttgtcctgttttgcaagtagaacattatgatgttcgaacactcaaaatatatgagtgagtcatgaccgacttaatatatgagaagtgaatgtctgaaggtaatgctaactaaaaagcctagttctaccattaagttaaattgtaatgttactttaaattgaatcatgtttaatgttaaatgtaaaacataaacaaataaacaaaaattagggatgtccagtctgttcctactgctcatcttcattgttaattcttttgggaaagatcagctttttttttttttttttcaaattatgtccctctgaccattatcatgtagataggaattatttctagtacatctctggagggggtctggtaattcattcacaatactatctgattgtgaaactgggaaaaacctggagtctaactcctttccgcaggatgatccatacagaaccatactcagtgaatgaatgttcttaaacttcactggctgtgtcagtagtgattagatctctgacacatcaagataataggagacaccatgggacatattgggaatgtaactgtcagcctagatccaaatcctgtgactacttccttcctctagtcaattaattactaaatgacatgtcgtttgctcctcaaagaccaattttaaatgcttttttttttttttttttgagacagagtctcgctctgtcacccaggctggagcgtagtggcatgatctcaactcactgtaacctccacctcccgggttcaagatatttttctgcctcagcctcccaagtagcagggattacaggtatgtgccaccacacctggctaatttttatatttttagtagagatgcagtttcaccatattgtccaggctggtctcaaactcctgatcttgtgatctgcccgcctt

SEQ ID NO: 28881 - DNA, 2300 bp, Homo sapien
atctataaacattagcaaatagtcctttgtctgacatataaacctttaaagcagaaaatttcatcattatctggtgactcaggataaggtggagctggtctgagggaggaactgctattggtagactgtttttttagtaacaatttgtctcactcattttggtcatgcaaacctataatttgcatttcattgagaccatgctgtgatttcaaaatgaccttccaaaatcaaacattctatatttttggacactgaagtcccagtaaagcttgtaaaattttattttttcataaattacattcgtaatgttgtgtttgccttgtattctgggaggcttttcattcctcaaaggtgttacaaaaataaatgagttgattcataaaaatgcaattcatattttattatttttgttcccataatgcttacttcatcttgattcgtgagtgagtgatgtattggattaattcttggcatataccagtttgattttaatttgttgaacagcattattcagaaatagtaaaataaataatttcatgttagaaggcctgattctaaaacgactctaattttcagcatggcttggtgtttatcatgtaggatacttgattccacaaaacactcacatatattttgaaaactttataacatttctattcttatgcctggaaataatataatagagaacttaaagtattttagaaaccactaatctatctccaccaaacacatttaaattaacacatttaaaccctcacaatttaaattaaaatttagctgctattaattacaatacaaaaaactagttgtgatggtttagcataaaactaatgtttcaaactgcaaataatttaaacatttcaaaatggaccaaaagctgttgtttcacctttggattaacagccaattactatttaatatttagtagtaacaaatggttactttgaagagtttctatctttccacttcaaaggaagcctgtgggagcccacatgattcctgatatgaaagttgaaaatgaatcatgtatataacactcaatattgaatatataattgtgtccggaattggtgggttcttgaacccttgtggtgttacagttcttaaaggtggcgtgtctggaattgttcgttcccccccggtaggttcatggcctcactggcttcaggagtgaagctgcacacctggaaagtcgaaattagacaacataatcttgaagcaatcttaatgtccattgatggatgaatgaataaagaaaatgtggcatacacatacaattgaatattattcagtcataaagttcataaaggtggcacgtctggagttgttccttcctcccatctggagttattctttcctgccagtgggttggtagtctcgctggcttcaggagtcaagctgtagaccttcgccgtgactgttacatctcttaaaggaggggcagatccaaagagtgagcagcagcaagatttattgcaaagagcagaagaacaaagtttccacagcctggaaggtgacctgagccggctgcctggctggctcgggtggcctgcttttattgccttttctggccccacccacatcctactgattggtccattttgccaagagctgattggtccattttacagagagctgactggtccgttttgacagagtgctgattggtccgtttacaaacctttagttagacacagagtgctgattggtgcatttacaaacctttagctagacacagagtgctgattcgcgcttttacaaacctttagctagacagaaaagttctctaagtcccgccggacccagaagcccagccggcttcgcttctcaatggcagtcgcagcgggactttgtggcacctagcccgggcactctggcagcccacagggagctcatcccccgatcaagcccagcaggcgcctgccggctgcggggcccgccaagcccgcgctcacccggaacccacgccggcccgctagcgccgggcgcgcagcctcggcgggcgggcgcctcgccttccacacctccccgccagcagagggagctggctccggcctcggccagccccagagaggggccccctcagcgcagcggcgggctgaagggctgctggagcgcggccagagcggacgccgaggccgaggaggcgccgagagcgagtgagagctgctagccagttgtcacctctcacagagaggtaagtgtataatatgaagagtccggagacccagaggttcttctcagtttttcctctggctcagtgtgagaacggggttaacgttctttgcttttttggcctc

SEQ ID NO: 28882 - DNA, 2300 bp, Homo sapien
tatatagacacacacaccatggacataaaaatgaatgaaatcatatcttctgcagcaacatggatggaactggaggccattatcttaagtaaaataacttagaaacaaagagttaaatactgcatgttcttacttgtaagtgggagctaaatactgtgtacacatggatatagagagtagaataatagacactggagactcaggaaagtgggaggaggggagggagtgaggaatgagacattacctatttgatacaatgtactctattcaggtaacggttacattaacagcccagatttcaccagtaggcaatgtactcatgtaacaaaactgtacttgcatccattaaatctataaaaataaataagtcataaagtgaggatattataactatattataaagttgttgtaaaaattaaacaagttattgcatgccacgtgagggaaacagtgcttgccattttgtaagtgttccataaatgttagcttttatttcaagtgagaatatcagatagtgtttaagaagaacaccagctggctgtggaaccttcctgccaggaatttaatactagctttctcagttacttaacctctctgtgcttcagtttcctcatctgtaaaatttgtgtttcaataatagcatttcccaaacaaactacttgggaggattaagtgggctaatacatataataaactcagaatagcacctggcacatgtaaatgcatgataaatggttttgtgcttttgtatgtgagtatatgctattttttccaaaaaacaaaatagagaaaattataaagactcatataacaagcatccatatgctcagtactaaaaagtaacaagtgctaacatgttgtatcattctaacaatataaaaatatttcaatagcctttttattctgaagtgaaatattgagagttttttcctttttttctgtaacgctgccacactgaattttaaaatgcaaagtactagatattagtaaagaccatgcgtcctcgaaatcagatttcttaagtttgaattagtaaagaccatgtgtccttgaaatcagatttcttaagtttgaattctagttccactacttagtacctatgaaatcctagctgtttcctaaacttcttttatcatgctttctcaccggtaaagtgctggtgatacgttctttgcaggtttgttacaaatgaaaataaaagtaggaaaaattctcagcacagagctttgccatgtagtaagtgctcatttcactggaaaataaattcctgaaatattttcataaagtcataggagtaaaatgggatttgaaaagccagctaatctactccctttttaatgcaatttttacatctttaaatttatgaagatctcactggtatatttaatctccttgaatagtgattttttttggactattggttttaacattttcataggatgtaaagttattttaattagttgcgatcagaattaaaagatactctatttcaatttaagctctacaagggcagggttttgcttatttcgttatgtatatatgtatacgcacacacacacacacacacacacacacacacacacacacacacaatctcaagtgccacatggtagatgctcaaatattttctgagtgttaaatgaataaatgaataagaataggattgattcaaatggttatttttaactacataaatttcaaatatttgtttgaataaatatataaatgttgtatttccttctgacctgaaccccatcatatagtctatatgatttacgcatatagactataatagctaacatttatttagcatttactacatgctaagtactatcctcagcactttgccagtattagctcatttactcctcatcccagtcctgtgaggaggccattattagcctattttaaaaatggaagctgagatacaaagaactaagtaattctctcaggactaaatagccaataaatgtgaaagcatttcacaaattcagctgcaaaccttggcagtaaagcatttgcttctggctagagtccatgtcagcccctgtttgtatttaacagacaaagaagaagatactttaacaatgaatcattcttgtgagaaaaaaaaaaaaatggtggtggtagattcagttctaaaatctcaccagatgacacaatcttctacctcgtgaaatactgcagaacttaaaaagagaaaagaaaagaagacctctttcctcctacagggtaagaggattggaaaatcacttgcacttttctctttatcacttctgttgacttggaatgcaaacttt

SEQ ID NO: 28883 - DNA, 2300 bp, Homo sapien
caggtagtaaacgagaagaaaatttaagaaattaagcaaaagcaatgcttaaaggaggagtacttggtaaactgtattacttgtgagtgatacatcaagtaaaattaggactaagttgaccattgcattattctatgcgtaatttaatattgactatgaccagaaacacttatgtggaacagtggggacaaaagactaatcaaagcagattcaagataaaatgagaaaagatgaatggagacagtaagtacagagaattccttcaaggtgttttactataaacagaagcaaggaaatgcagtagtagacagaggaagacggtatgttaaaggggtgctgatttttaaaatgggccaactagcagcaaatctctttgttgtgatgctacagaaggtagggagagttgatgattccacagagagagacaagtgggtagaatggtcccttgagtagaagactatctaaagcacaggtggatggcttggtctaaggagggagcacggttcacctcaagtaacaagatgaagggagagtctgtggtcacaggggccaagtatgtgactagatgtagtgacaggagcttattgaagttttcttctggttcttattcctttttgggtaaaatagaaagcaaagcaatcagctgtccttgaatatgagtcagactgttggagatttgagtaaagggatattctttaagcttgaatgaatttctttccacaaaaaaaaaataaagcctactacataatgattatttttcttaaaactctgcagaaaaagtcatcttggcatttttacaaataaaatatatttttattcctacagagcaagaaatacttctattttttttaaaaaaaaaaaaaagaggcaataaaaacagatattctttctataaaattattagtctagtttgccttcttatgaattgggagaaacaatagggtagcccattttgagtttaccttgtgttaggaagcatcatctcctttctaaagcctcttataatgttggttagaccctgtgaagaaatccataggacatagtcataaaatgtagtcatagaaaccttcttgctcatcagatgaaagtaaactgaggccaagaaatatcttttgacttatttccatttgatttggggatttcattttctcagtatccacttactttaagatgctaagagtataatttctttgtatgccaacatgaaaataagtccaaactatcattcttttctcatgttatagttatgtttgtatgcactagagtctcagtgtgcatgtatgtgtaattcctattccttagttttcatccttcaagcagttagtcccttcaaaacccgatgacaagacccaaacatattaaaaagtttagttggagggcccagggtgaaacacaaaaacaattcttcttcttacagagctcttaggcaaacacatagacacttgttctctgcctctggaattacaaatatgttactcggaaagcagcaatactcttttggacttgtttgacttcactttctttacctgtctttaagaagcctcatacacacatttaaaaaatacaacttataaaggttttagtgatagtgcatacaatcatttgattttatttcccttttctcttcaccttcactaataggagttactggcatgcttcaaaaagcttacatttgaatactgtctaaatcagtgcagacccttgaccagcttaatctttgcttgcaaatgacaatgcagtgaaaccagaggaagaaaaaaattacttcctttcctgttggaaacctaataagtagttagtctgacccagttttcaataagagagattttctgatgacccgacaggagtgactatctccagtcaaagaaagaggagggtgaatttaatctttcatggccctggaatggcagctgctctcagctctctctgattctgtgaaggttgatgaagatagagctggctttcaatgtagaaagaattttccttttgaatattccaaacgagagctttgcacatgtgcctcaagaactgattgtctggctccgacaggaatgcagcaggagaggagcgtatttcatgcttaagaccagagaagagccacgcaatactcagtggataaaaggcttgcagtcccagctgggaaaaagagtcccattatctcccagctgcatagacattccatacggcttggttctgcctggacgcacagcatgcctggctgagagcttgaaacagagttctgcagaaaaactgtaaagatcccgagacatttccctggtaagatctgtaagtacaaaatt

SEQ ID NO: 28884 - DNA, 2300 bp, Homo sapien
aaaggggagaatggaaacaaaatatgtacatttgaaatttagaaacacagttaagggactttgcctgaaattgtcataaaactttgaaaattgcttcaatgtatagtcccagtgggagaatgtgacagcatattttattctttgttcttttctgaaattctgtgtccagtctaaaacacgacatttccctttaatgtgttaggagtatgcatgactacacaggaatattttctggagaacttctggtgaagcatattttgataaacagtcttactaaaagttatatatatgtacttttaattgactagttgcagagaaataatcaatgtaaaaaaaaatcatacatagtacaggtagtaaaagtcacagttccggcagaagcacaaaagccttcaaagtgagtgggaacctgggaaccattgatcctcagtggctgtttaccatggaaaacacctgcatcaccaacattccagttttgcaaaagtacctctattacagacacataccaggcaaggagggaggaaaaagcctgaaaatttctctccaagtttaagtaatcaggaaactttggtggggaggttggggtggggtgggggcgggggggtaacttctttatttagcattaatctcagcaatcatgaaagtcatggaatttcaagtgatgaaaaatttgaccacaacaatacctatcactagcctggttttgcccacttctcgaacaggaattataaagataataattaattctaaaaagcagaagacaaaacaaacaaaccaaaccaacactgaatgaactaataaggctgctgcatatatatgttggagttggatgtttatttgcttactgcagtagtttaaaaatagttttccagttaacatcttttccacatagtggagatgtcagggtaggtttacatgattgcgtaaatggtcagaagttgtttatgtagctctgaactgctgagagatgagcaggaagacctgggttcagcaaaacccttggggctttttcccagagagagaaacagaggctcctctctgggttgctggaatgctttccagacgaattcgactgggttggcttttctctgcctgtcaaagtcactttgcacagtgctggtgaggggctggggcattgctgccaatctctacggttaccccgaggtgtggagttgcggcgaagggagccacttctgcaaggaaacagtagattcataatgtagaatgaccgtggcaacgtcgttcaaagcacattctttcgaataacaaggctttcgacatgccccacccccgcgcacaacacaccacaaattgatccttgtacctaatttacagcaactgttccctctgacctccccccgcccccgccccacattccaacctgaaagcactttgcgtggatgagacttcaggtgtgtaacgcagcctgtccagccagtgtcctccgcctaaggacaggcaggtaaaaacctaccaaagccccctcttctggcctaagttcaatgccacccgcccacccacattccccggttcagcaattttcagcccagacgcagaagcatctgtttccctggccagggcgccttaacgatcccccgaattccgcgtctcccggaggccagaggtttgggtacccaggaaggtcgcgcctcctcgtgccccgatactcgggttgtaaagggaggagacatcgcctcggcgcatccctggccgctgaacaacgcaacccctacgtccccgcacgggaatccggctgataatctcctcttgcctgagaatcgggccaggcgccctttactaatttcgcgcgctggggacctggggctgccgcctctcggccgcgcggggcaggtgctgcgtccccagcgctcgcctcctccggccgcgcactgagcatgcgcgggctccgggcctccggcgcgtctccccgtccccgctcgtctcccgcccgttcccacccgcccgcgcctctccccttccccgagcgtctcccccgccccgcggctaaggagccggcagcccgaactccggcgcgccaggtttttccagccgccgcgagcgccgggagggagggcagcgccgcgccagacggagcccggggttcgacgccaggattggctgcaagtagggagctttcgccgccgccccgggcccctcggactgtgccggcgccgcacccgaggctctcgccagcccggcgccccggtgctgaggtaagtgaggcggcagctgtgcgggtccggctcctgcgtgggcgcgcgatgccccggggacgcggtcgcgggtgtgggggggaaagg

SEQ ID NO: 28885 - DNA, 2300 bp, Homo sapien
ggcgcatccctggccgctgaacaacgcaacccctacgtccccgcacgggaatccggctgataatctcctcttgcctgagaatcgggccaggcgccctttactaatttcgcgcgctggggacctggggctgccgcctctcggccgcgcggggcaggtgctgcgtccccagcgctcgcctcctccggccgcgcactgagcatgcgcgggctccgggcctccggcgcgtctccccgtccccgctcgtctcccgcccgttcccacccgcccgcgcctctccccttccccgagcgtctcccccgccccgcggctaaggagccggcagcccgaactccggcgcgccaggtttttccagccgccgcgagcgccgggagggagggcagcgccgcgccagacggagcccggggttcgacgccaggattggctgcaagtagggagctttcgccgccgccccgggcccctcggactgtgccggcgccgcacccgaggctctcgccagcccggcgccccggtgctgaggtaagtgaggcggcagctgtgcgggtccggctcctgcgtgggcgcgcgatgccccggggacgcggtcgcgggtgtgggggggaaagggcagggtccgcgcgggttgcccgaaggacaggggcgcttcccggggctctgactcccgcggggccgggcagcgtctgcggggccgtccagctcagagcccggaagccctgcagggtcggggagcgggagctgaacgcctgagcgcggaggactcagggccccgacgacgccaccgtcaccccacagcgacccttcttctccttctcagccggaaaataagtttgttgcgctgcgaggcagccacaaaacaaggaaccgagagcccggaatgctgcgggaagccttcaagtcagctcctccgactggttcgggctactgccccctctccgtgcgccctggcctctggcgccgggttcccggcggggcttttcttctgacagcccagtcacagcccgcagcagagggacgcgaacctggggagtggagggacctgggactaaaggaacaggagcccgtagccgtggtggaaggagccgcgtggagacggaggctgatgtctgtggcgcccgctgggtgccgggctggctgctgagcgctgaggctgcggcggcgagcgacaggccaggtgcctgctcttagggaaggtacctggcttccccagtctctgccgcgggagcctgttgggtggcattcgtttccagcaacttctggggggtttccagtttctttcgagaggcaagacaaccgccccgtcccctccccgggcccagacggcggcgaactgtgcgccgggcgccccacagaccccaatccactcactctccttctggaacgcggggctcaaaatcttcgtgcattttctctcttgtgcttcgtgtatatgttttactatttatgaagggtgtggaggtgagggtaggaggacgtgggctcctgaatccctctgaaccagccagagagtcggctgcatggaaacatttcgcagcgaagctcctgcgaggaggcggcttcgcgcgtcgggaagatcaggcggttgcttgctggccagggtctgcagattcggtgcgaagaagctggcggaggttgtgtagggcgagtcagtgtgactgagcaccctgggtgtgtggtctgcgtggaggagagtgggccggatcttgaggtgtgttggaggtttatttgtaagaggagttcctgaaaggaatgtcgtggaactttttctagttttcctgctggaatcaacataggggcgggcacatgtttgtcagaataacagtggcatttaactgcatgggaagctctttcaattttctgtagtgggagctggatagttcaaggagtaactccacataactgagtcgtttggatacccacacaagataatttggaacgcgcttgtatttttttgttttttgagatttctggtttatgtcctttagagagtggggtaggagcgtaaagactgtataggttgcctatgagcaggtccatacaatagcgttcccaagtctgcctaatagcaagtttgttctctctttctctctctctacccaagtgggtgaaaaagaacagtgtgtcatgaagacaggcacctggaggtgatttgggtggcattcatgagaaaattcacgttacccgtaagtttattcttgctatttttatcttgatttctttaaagattttgtgggaatatctgcagtgggtcgcaggagtaggtaagattgctaaggatcaaaaacaagtttcatgagaatattatt

SEQ ID NO: 28886 - DNA, 2300 bp, Homo sapien
gctgtggtgtatcttcccatgctgaccctactctcatgtttctgaactgacatctcgcaagattaattgagatgctgtagttttctagcgctacactggctgtaattagtcgctgacatatgatgatttattataggggattcctttagaaatttactttgtgttttgggactaagaaatgatcgttagagtttcagacttacagctcttgtcctgcaccacttaactgatcaaaactatgtttgggatgaccaggcagcttgacatcatagcactggtcatcctgactctctaagtaaaactgaaatgtgtggcaaattaaaagcagtgaagatggtgcatggctaaattaattcatcttgattaggccctggtgaatttttaaatatataatcagatgtgagaatttaagatgtgggatagtcaaagccaagaatccaggaagacttctagcaattccacaaagacaaaaagcaaagatgccagaagactgtggccaggcttgcttgtggaatgaaaataaggggaaaaaaatcacttacaatagattaacagtataccctgtcaaagagtgtgccagaagtcacgtaaaattcccaacccactgacagagattttggagaggtgatgagagtgaggggaagggattatctgaaaaatatgaacaaggcagtagtgaggaataagatgccagcatcaacttccgctgtcacttgttttctcaacggttagccatgccactaaggtcaactcagtatgttattaaaatgggcggttttaggtaatgattactttcttggcagatagaggattcttttatctttggggtcatgcatttttaaaagcctttgtctgcatagatttatttaaaacacacacacacacacacacacacacacacacacacacacccccttaagcaaggtatgctggctcacacctataatcccacactttgggaggctgaggcgggaggaccacttgagcccaggagttcaagaccagctggagcaacaaagtgagctccttgtctcaacaacaacaatgacaacaacaacaacaacatctgggcatggtggtgcatgactgtgatcccagctacatgggaggctgaggcaggaggttcccttgtgccaggaggttgaggctgcagtaagctatgttcatgctactctactccagcctggaagagagagtgaaaaacaaccaaccaaccaacaaaaaagcagcttgattgaagtgtagttgatgtacaaaaatctacacagatttaatgtatacaatttgcggattttaatatatgcaaagatgcatgagacaatcagtacaattaaggtaataaatatatctattatctccagaagtttcttcctgcccccgctccatgtttttactggtaagatcacttgacatctacttgcttgacagatttttaagtgcataaaacagtgttgttaactataggcactatgtcgtgtagcagatctctagcacttattcatcttgcagaattgaaattttataccctttgtacccttgaacaataactctccatttttccttcctctacaggctctggaagccaccattctactctttgtttctatgagtttgactattttagataccttatataagtagaatcacccagtatttaaccttctgtaactgccttatttcacttagcatactgtcttccaggtacatgtatgttgtcacatatggcaggatttccttctttttcaaggctgagtaacattctattctctgtgtgtgtgtgtgtgtgtgtgtgtgtgtgtgtgtataacatgccacgttttctttattcatttattgatagatatttaggttgtttccatatcttgactaccgtgaattaagtaaactccaatgatcatgggagtgcagatatcacttctagatctaaatctttgacatcttgacttcaattcctttgggcacagatttctatgaagatttcttttttctttttctttttctttttttttttttttgagacgagtctcacactggcacccaggctggagttcagtggcaccatcttggatcactgcaagctctgcctcctgggttcaccctttctactgcctcagcctcctgagtagctgggactacaggcgcctgccaccatgcccggcaaattttctgtatttttagtagagacgggttttaccgtgttaagcaggatggtctcgatctcctgacctcgtgatccgcccgcctcagcctcccaaagtgctgggattacaggcgtgagccacagcaccaggccttctatg

SEQ ID NO: 28887 - DNA, 2300 bp, Homo sapien
ttgtaccccactttgcatatcattaccattaactattggtaataaatctattcgagggcatggatctgttttggggatacttgagttgataatgggcacagaagggtttggtagtggacatcttttacccaatcatgtatcctttgggagagaatacttttctagctattgagtaaggcatcacgaaagtgttgatccattttgcttttattccctaagacaatcaaaacgctaacacagtttgggtggtcttggcctcaatgatacacattttttcacaaaagataacataactaaccatgtgaagaaagcctcacctttctctacctttggatagtagggatgaaagaaagtaagatggagaaatccacattaaatataaagactctttccccacaaaatcccagagctcttctgattggcaccatgaagacaaaacattctgattggatttttggttcttcacccaggtgttttactatcaggtagacacagtttgtgtacaactaaataagaccatttcctgcccaagctgtcttttttccccacacatttaaaatttactcacacttactgagcatgatgtttcaagttttctgaaacagctggttagtagccagttgatcactggcccctaaaggtaacaaagaccctccatccccaaatttttgccagtcaaaaaagcatgactttatttcactcccgtcaccccagtgctattacgaggtgtaagcacctttctagtgaaggtctattttctagatcttaggacaagaatagaatgtcacattgtaagcgttctcagaggtctgcagcaaagcccttattgtacagaaaagaaaactaagactcacaaaggtgtagatcacctgtttgtttgtttggggtttttttttgttgtttatttgtttgtttttgcagcaagatgaggattagaactcagatttctgactccctcaatgttctcccttctttatcatacaggctccttaactactggctgctttgcgtgtggtggactttaaatgatcacacgggtgccttaatcacagcctttttatgagtgacacaggcgctgagtctccctttttctaaaatggaatgttttatatccataacccagacttgcttaactaaggtcaaatttacataaacaaatgtcttccggggccagcaggtagcatgtctgggcaaaagcgtgtgtggcaaggttttgataaagcgcagaacacatgttctgtttaaaaatgttcacattcagattctcaaatctctctcttgccagaccaagcatgtccacaggctactggtttataacccctgactgcatcacgatgcagacagagtaaggaggagtgttcttacagttatgcaaatggaatccatatcaccagttccttttagaatactagatgtcccaagtgtgccatgccaaacccttttgctttgaatgccctggacttctagtattcaatgaagaggcacgacttggggaacatgaaacacccccataaacaccagctttagttcagccagtgtccccaaagactgactctgaaaagaacatacacgtgtatgtcgcataaaatccgtagaagagatgatgctgctacccacaaccttcttgggagctgctgagaatccctaacagacaaaccgaatcatagggcaaacccaccctatgtaccaaacaaccagtgtaattatattctgtagttgaggaattacataaattgcccattgggaaagaagccttaatctccatccctcccccgaaatctatcaacagctgtgtgagcctctgtgtatttttgaaaggttgaacacatttgatcggagaacaaacttgatttcctaatcaggttcgatgcgaggagagccagttagagatgtgtgtgattctcccagtgtgcgtctttgattcgtgtgctaattatgtcgatcctttggggaacacagccaggaagctgggtcctccttgatgaatgctggcggagagccatgcagcgcgcagcggagagcagttcagcatctctagtcccagctgagaatatggtcccattatctcccagctgcctaagcaatccataagggcctgttctgcgtggatgatcagtgtagtggaagcagggacttgctgagagctgaaatctctgtttgatttgctgtaacatgtaaagcgaaactgggacattttactttacagtctgtaagtaccaggttttacccccctctttctccctacagctccatgtgaatgtgactttgcaagctgcatttgattttctgttccattgctc

SEQ ID NO: 28888 - DNA, 2300 bp, Homo sapien
ggtagggtttatcatctggaatctatttcaattaatgactaataaacgtttctgattattttctcaaataccagattaatgagatacacttcaaatgcctaaaacttgtagaagtgaatgaattcataaactaagaaggaaaaaacatgaatacagttttttaaagctcaggaaggatagttaaaaatcattgcccatatttctcattttctttctcatttcttaatactatttctctaatcagaaaccatgattggttttacctagatgatacgtgatctctactacctatcagctcttaatttttcatgcaactctggaaattgaatgggatatctgtgcacaaatgtagatgacttactctaagaacctatatgcagaagtgacaattcagactgattcagtgttatttttagggataatggtttaaaatattaactccataacacagtttttaaaatcctggtttaattccttttgaaggaatctcagaccatttccataaagacaagaaaaataccatgttctaccctcacctggtgtccattgaataaaaagaagtttattacatcagaaatgtaattcaaatcatagcactgatttgttttgtgcagagtatgtgtgtgtccttcatgttcacttttcacagcccaaacctggcagtctttggtttgctctgattaggtgttatgtgtcagacctgcctgcttgagccccaacaggacggaagctgtgttctcacaatgcttgccttctgagttggcaaaatcagatggtacttaatggagtttttatgaatatataagtgatgaagacaataatgtacaaacttaaaatgtccctaattccagaagaatctggtaattaagacatgtctatatgtaactttttaaatatccttagcactccttgaaactaagcctgagtgtagaaacattccaatttgtaactgcagccttcccaattgttgttaggagtacatgagataatcatcataaaatacttaccaaaatggccagcatggaggaaatcatccacaaatgttactctgctctagtgtgcacagccagatggtttgcaaccctgcacaacatacttgaattggaagtccccgaatccaataaaatgttattaaatcaaatgtaatagacaacaaaaaacgaaatggcacttaacacactccttattgagaggatttacatctgggagggtggaagaaaaaaacgtttcttgaacaataatatgtctcactttattagacatatttcttatattaactcatttgtatttgtaactgcctatttacttatactgtgatctttgggtttataaatgtcttatctctctaaccagacttgacctttttgaggtaataaaacattcttctaaaaagaaccatgaacagtaccttctaaatatttcaaactacaccacaagaactttaaaacaattgtgtgtctgtatatatgtctatttatacattttatatagagttgtgtttgtatataaagagagacagtcacactctgggtatatatggagagacaagtataattatatatgatagaatggtttgtgaagtgaacagaattgtatcagaaaacaagagtttgcattctgataatgatatttaaatacagagaggtcttgggcaggtcacttaacatctttaaacctcagtttcttcacctagacctgcactatccaatgtgatgtcctggcatgatggaagtcttctgtgtctgtgctggccaaggtgataatcactaagtgcatgtggctactgagcacttgaaatgtgactagtgtctgaggaactgaattataaattgtatttaattttaattattttaaatctaaataggcacgtgtggtaagtagatattttagtggacagtataaccataaaatcaaggaggatgggacaatgtcatatgaaaagaagctctcctgaattcccccggtatgggtgctaccaacgcagttttgagcagaatgattctcttttgaaatagtggtactctcccttgatatcttaggactttaaagtttaaatgctttttcccatatttctcccaacagatcttgacaactttaaaacaagaacaagaagcactgtgtctgtccgtcgaggtcaaggaatggtgctactgtgtggcccgccaccccattctggaggtacatataaatgaactgacatatgcatgcttcactctctgttatttttcttcctcaatgttctccctcctgacaccagctgagtgcacagtgtcatttatagagattcccaaagcccctcc

SEQ ID NO: 28889 - DNA, 2300 bp, Homo sapien
atgaagcagatgccattttcccaatatcgactttctggttgctaaatgagcctcccgcagaattcagagagccttgcagccagtagctactactgagagttctgaaaaatattgcagggaaaaaaaaatcatttcctagccaggcgcggtggctcacacctgtaatcccagcactttgtggggccgaggagggcagatcacctgaggtcaggagttcgagaccagcctggccaacatggtgaaaccctgtctctactaaaaatacaaaaattagccaagcgtcgtggtgggcacctgtagtcccagctacttgggaggctgagacaggagaattgcttgaacccaggaggcagaggttgcagtgagccaagatcgtgccactgcactccagcctgggcaacaaaaagcaaaactccatctcaaaaaaaaaaaaaaagtttccggtatttgattccaactctccttggagaaatgtgagttgattagtattgtgctggtaaattacattctaacttccatcatgtgactttggaggtgctaatttatacttaaaactctcttataaataattaggggataggtaatcttctcattttgcataggagaaagcttaggtgctgatagattactaggtttgcttgaaactcacctgttgagtatgtaaggactgcattgcgatgctgtttgttgaaagcctgccatacgggatagtacttcttcacaatgtattataggggcttttcctcccccagattttagtttcttgaggaagctttctggaaagcacttgtatatttacactgagtatcctcttgacaccagcatggggttacttgtaatgacatgcacatgcgtaaataaaatgattagccattctcatataaacataattatatctttctaaaataatacatgtggaaatgttataatccagtgataaagggaaagcaatgtgcatgacccctcctttgtgcgtaaacagtggatttaaggcagaatatgtttcctgttgcacattcagttgttaaggtcaagtacaattgggacacattgaaggattacagtacaaaaaatgccttttacagtaattagcgttctctctacaaaactgaagtgacctttctgctattttccaaggacactttatacatttagactttagctcaggatcatatgaaaaagtgacatataagaactcagtcaactagttctgaaaccagaggccccattgcatttagttgttcccttaccctcccctcaacaaagtaatttttgaagataaagtgggacatgttggctactcagtgccagtagctagtatatcacttctccagctttggacaaatctggaaattacactttaaagagaggaatcgtggaatgcctggagctgaagcagtttgatttccttggagcacaatagttcactgcagcaaatcatttatactcactgtcatttagtggtcttctctgaaatggaaagcatgggctcatgtggtccttcataaaacatttacctaattcttataaaagttagaactttcaaaggaacatttttgatacaactgcctatgaaattcatcccactggtcttatgggataagggtgtgtgaaaatgttgctgttttatcactatctcatatccactccctcgtggatctaattttttttaatatggatgtatatttgtggaatcagtcaactagtcagtcagtgtatacttaatgagtgtttgccacagtgttaaactgctctcttactaaaatgatggaaaagtattcaacctcacaagtgagaagaaaaaatttgagttgatagtaggaggcattgggagaagactgcattgacactcaggaattattctgtttctaactagagctaagaatttgaataagttactctgttcctaggtgcccgtttctcagttaatggaaataaaactatcaaatatattggaaagcataaagtgctatgcaagtatggggcattatgatgtaatataatgattattatctataaaacaaaagaaatgatctaaatagtttccagggtggcttccagcattactatatcaagattataggcaccctgggtctgtaatttgagcattactcaatacatgttacatagtgcctgacacctgattagcaaactataaatgcttagcccttgacttaaagaggttggacatcgcttaatcagctatcagtgtatcttttacttctctggaaataaaaccttattgactgatagtagaaaggctggtaaaatgccacgggggactgtgattacttcctatc

SEQ ID NO: 28890 - DNA, 2300 bp, Homo sapien
ctattgcatttatgtttattcttttgtttttcctcatctagcacatcagtgacaaaaattatctaattgttttcattgtcacagccacaggagagcttaattatacataagcacttggctgtcatcttttttcctctcacttttttctggtctgggtcttcccagtgctgtgttcctaatatccagctgcataggtctccaatttaaatgaattatgataattaaaatcaccatgtagatgataaaaggtgagaaagtaccccagtcacttatccatgaacattctgtctttgttgacaagaatttcttacaacctaggaattataaaccatgggtttgagcttagaaacctgcttctttgggttccaggttgtttattgcattcatcagctctccacttcagcaaccagaagtgtgctaactcctattcagggttggcaaaatggcaatttttttccttcttgcattaaaaccattttgcattaaaaccattttgccttctttcaaaagcctactaggcatgatgattgttcccagtgtctgaataatggaagccctattgccctttggtttgtccctactgtagccatgtctttaagttaccctgtgctactcatgtttggtatgtatgaagaactgaagcaagttcagagatagaacatttttaccctaccccatcttcccaatttgtttttgctataacctgtacggtctagttgaatctacttttctcagtctgtttttggcattaaaaacttcctaaaaatagatttattttcagtggtaaaatgctatggatctctgttactaaagataaacattttccaaaatgactttaatacattatttacttgtttaacaaatttttttttattgcctaccatgtgggagacattatcaggcactatggctgcaagacaaaatccctgccctcaaggacctaatattttactggaagttaaccaaaatgcactattaagcaaataaattaactaggaaattttattttttggtaagagtgataaagaaaataatgaggttgattggccaggtgcagtggcttatgcctgtaatcccagcactttgggaggccgaagtgggtgagtcacttgaggccaggaattcgaaaccagctccgtctctactaaaatataaaaattagctgggtgtggtggtggtgcatgccggtagtcccaactacacgggaggctgaggcaggagaatcacttgaacccaggaggcggaggttccagtgagccgaggttgtgccactgcactccagcctgggcaacagagcaagactccatctcaaataaataaataaataaataatttgatatgatagaaagtagctgagagcaagagaaagatttcataagatgaagtagtcaggaaagacttgtctgggaattgccctctgacccaaaacctaaaggatgaaaatgagctaggctttcaaggggaagtgcattgctggcagaaggtgaggaagtgcaaagactctgaggcagaaaactacttgactttcttgatatgcagcagggaagtcagtgttaactaaatcatagtgagcaaggggcaaaggtttgaaacttgggaaggtgacagactgcagtactttgtaagccaggcacagagtttgggttttattctctgagtaaaatgggaagccattacagcatttcaaggcaggagggtgactcgatttgattaatgttttgaaaagaccgctcaggttgttttgtggtgaatggatgattggaaaccaagagcaaaagccggaccattgccaatatccaggtgagagacattgttggttaggacgtaagagaggaagagaaatggagagacttgagatatattttggagttagagccaataggatatgctcatttcattcctacatctgtctagtttatagatatggaaattgagtcccaaagagattaaagtaattgatttaagtttatacagtaaaaaacagagctagatttcgaatgctttgctagaggttctgaaacttcagtgtgcatcacaatcacttggaagtcttattacaacacagaattctgggtctcgttctatgttcccagtgggaacataccagatggaggctttgatttggtaagtccagggtagaaccaagcatttgcatttctagtaagttcccaagtaatgctgatgctgcttgtctgggaaccacatagtgagaatgctctatgtttaggttgtccacccatggtattgtgaagctgaagattaaatgacatgcaagagaaggtgttcctgctactctggaa

SEQ ID NO: 28891 - DNA, 2300 bp, Homo sapien
tttcttcattaggtccacttgtacagcaagagacacacggtgcttagtcctctcaaaagccagccctttcttcattggttcatttgtcaccaagattctaacagaatttcaaaaaaaaatcccacatttcaaataaaattatctcacataagtaactaatggcaaagaataatttgtgactgctctggacacagccaccatggggtaatcctgtttagaatagaaataaaaaataatttcttcagaaatgttcacttagattatctttcttagggtataaaccattcccagaaacgaagattcagaacatcgtgctcattcgaacaagaccagtcagcaattcagtatggccctctgcatatgcagcttgaatgagcacggggagagaagaacaagttcatcagggtcagccgtacttttacttagctggtgtaaagcaagaggcctacatgtgccgtcttttatagagttcccgcctgtagagaggccagtgtgttgaaggaataataaggtccctacacaaataggagttctgaccctactctcagaaaagcaaaaactcatctagatctatttgattggctttaaccaaggagacatacccagtcaccagccacataccccagtgagacctttttaaatgtggcccggagcctttcagttacgtgatgacaatatagctagtcccctgctttcttttccccttccaaaaccataattgaattaattcccctcagcaatcctgaggtggaagctcgcataatttcctctcttttatagagaaaactggtgatcaaagaggttaagctcagtgagccgggggtcaacttctgtctgccacttccttcaacactcagatcaaaactcttcctcccagaagccattcgcccaccccagctctgagcagggcgctactccggaacgccccccgcttctccatgctgactgttccttaccctggttgtcgaccttgctctaactggtgcaggcgctcctccactccaaccagcttgtaagctctgcctgggcagagcttgtactcttccctttgtgtatctccacgtggctcataaacgcataaccaaacattaggaccagacttcagtcctttcctcccttcgggaacccctcggcctctagggatggagctgaacaattggtcagacgtgtcagataacacgtgtgccttgttgaatgggaaacaggtaattaatagcagtctccttggtacatttcacttcctcgagcggtcgccgtgggccccttgacaatgctgttgctgatctccagagacaaaggggcgtgcctcagagtactcactgaaagtgagtcacctctgccaggcaaccttcctggccctcattcgcctttgccgcctgacataacttgttttttgtctccttgtgcagtccccgaagtcacaccagcgaatgtcagtggtggcggaggcagcaaatctgaactggttataacctgggaggtaaatgaatcacagaataaaaggaacgtacacgcatcgaagctattttattattttcctccatgttagacatagctgggaagtttcctcctctgtttttaacagtgaaaattcatttgggttcagacactccctctcacgtagctaatggctagcaggaaggacggcacttgcccatccattgttgaggcaagttttaattcaatccatcacagtaaaaacaattatgaagggaagacaacacacgttacaaaaaaaaataaagaaggctgtttcagagaaaactagtttttcttttcttcctgaattgctgcatggccaattgatttaaaacgtctgccagcaatagattcagtgcaccagcacaatttcctggcaattggctttgcttctagaaggggccctcttttaggaggtattttttaaaacaacctggaggaaagttagtcaccaatttattaaaaattggctttgagagaagaggtgggagctttagaaagggttcttcatgtttttgaaagattctaaacagccccagaaattaaaatctctcatttacccaaagcacagcagtgaaagaaatcactcatccctccagctgaactcttccctctgagagggaggatcttcagccaagatggtttttcttccttcagtgagatcttttgtctatttggcaatggaagaagattagtattagaggatacgtgttggaaatgtggtttttcaggagaccgatgtccagtgtttttttttttacaatcatttccaaccatttcagagctgggtctgccccatcaaagagcaagctctggactgc

SEQ ID NO: 28892 - DNA, 2300 bp, Homo sapien
cgacttttgtgaattcttccagcatgttctatcatactgtctttggacgtttacactttattataaagaattaaattattgccataaaaaaccaaacaggcctcgctcagtggctcacgtctgtaatcccagcactttgggaggccgaggtgggtggatcacctgtcaggagttcaagaccagactgaccagcgtggtgaaaccccatctctactaaaaatacaaaaaaattagctgggtgtggtggcgggggcctgtaatcccagctactcaggaggctgaggcaggagaatcggttgaacccgggaggtggaggttgtggtgagctgagatcgcgccattgcactccagcctaggcaacaagactgaaattccatctcaaaacaaacaaacaacccccccgcaaccccccgccagaaaaaaaaaaagtccctgcctctcattttttcgtttgtgcttatacagaaacatagagacagtgtttctgtatgagcatgtgtttgctttgtttgtttgtttgtttttattggcgtagttaattaaagatcatatacccaggaaggtggtatggaaggagcagccagatctaattttctttatacccttcaccgcgcctagcatagtgcataggtgcattcaatgaatatttgagtaaatgaatgtaagaaatatacagaccattggctgagtgtggtggctcacacctgtaatcccagaactttaagaggccaaggcgggtgcatcacttgaggtcaggaatttgagacaagcctggccaacatggtgaaaccccatctctaccaaaaatacaaaaaattagccaggcgtggtggcgggtgcctgtaatcccaactactcgggaggctgaggcaagagaatcgcttgaacctgggaggcagaggttgcagtgagcagagattgcgccactgcactccagcctgggcgacagagtgagacttcatctcaaaaaatatacatatatatatacggagagaggccattaaagcaggcttttaagccagaaattactgtcttcccaatgattaataagtatttttaaggtttcattagtgacaaatatgttacatgtataaacagatgggcaggacttaaaagagtaggccagatagttgatactatatctaaacttttctgggtgcctcttagcaaataaatggatctctctctgttccttgttttacttcccctttccccgaggaaaatcacatttttcaggtctgacaacaattttcaacctgataacaattgctccggtttcattttggcaactgctaaaatggtcaccttgggaaccccaggcacacacgctgactgtacttgcacagcttctacactgagccttttggaaattgcctccaggaagcctgtctctcatctcacaaacagaaccactgatccaacctgggccaccatctttctgcatctgctctgtctgagactctcccagtcagctcctaaggagacagggaatcctgcatcactcatcgcttaggctagactgaaggtctccttccaaaggcaactacttactactctctgccgtgggtcatacaataagcactactcttatctattcacacgctaagctacttttttaaagccagctttgctagctagccacctcgaaattccccagaaggaatcaaacagaaatggaacaaaggacaggaaaagccaaggaggtttgctgaaattgaagcattctgaagacagctgggtggtaaaatggatgtgacgtgaggaaggtggtcttgggtgcacccacagaccaacactgccattgttacaatttgtgtaggatgatctcaggtgacagacagcagcaatttatcacacccagaaacgcatcccccacacatatttacttgagggtaccagacctgctcacaaagcagagaagagctaaggcggttctctaagggcagagaattgctgctattgcctagtgagtggggagagggtactcctcaggccttacttcctatcaaatcatgtgtcagtgttgcctaggagacagaggcacagtaactactgtagccaaacaaggcacataaacaaaacagaaatgcaacgctttagagtacccacggaaaacttgtttaccttgtcaccatgagtaaaagttaattcccactcctgaagagagcaaaccaactctgaaagagagtgaaaatgcagacaagacagttatcagataatggctatctggacgagagattctttcgtttgacagcagtttggttgttgggagttccagttcagctcctgcacagttgctc

SEQ ID NO: 28893 - DNA, 2300 bp, Homo sapien
cagccacaggtcaaaatattaaataaggctggggcaccatggcgcacgtctgtaatcccagcacttcgggaggcctaggtgggtgggtcacctgaggtcagcagttcaagaccagcctggccaacatggtgaaaccccgtctctactaaaaatacaaaaattagccgggcgtggaggcgggtgcctgtaatcccagctacttgggaggatgaggcaggagaatcgcttgaacctggaaagcagaggttgcagtgagctgagatcgtgccactgcactccagcctgggcgccagagtgaaactccatctcaaaaaaaaaaaaaaaaattaaatagcaattaaaaaacacaaagaagcgatatagcataacaactgtttacacagcatttatatcaggtattataagtaatctagaaatgatttgtactacagaatgtgtatagtctatatgtaaatattatgccattttatgtaaagaacttgaacactggctggggtgatgttctggaaccaataccccatggatacggaaggacaactgtatatacacctgcatatataaactatatatttacaaggccagaaattgttgagggtgcccagcacagtaactggcacgaagtaagtcatcataatagttgtattagcgttgccttcataggtggtgatttggagaatctattctaggtgggtacagcaatggaggctttggtccagtttgtctagggtcatggtggtgagaaatagcagacaagcctgaaaggatgatttggggctttccttgccccaaagagagagagagacagaaaatccttgcaccggatgatatcaatgctgtgcctctgaatgtccatttggaaagccagtcctgtgcttccaaaaacaggatattcaacaccttgaagaggtgtggtaattgcacatcttactttttacgttttaggaagtctacagagagtggggctgaaaagtttgggaagaacaggtaggcatgtggggagggcaaaagaacagaaataacatgcacaagcatttttctaggaaaattttagggaaagctaagtgatgtaaagttacacttaaaagactacacattttcggccgggcgcagtggccgaatcccggcaaaagtaatcccggcacttttgggggccgaggcctggggaacacgaggtcaggagttcgagaccagttggccaacacggcaaaaccccgtctctactaaaaattagccgggcgtggtggcagacacctgtaatcccagctactcgggaggccgaggcaggagcatcgcttgaaaccggaaggcggaggttgcagcgagcccagatcgcgccaccgcactccagcctgggcgacaagagcgaaactccgtctcaaaaacaaaacaaaacaaaaactacacattttcgcactttaagggctcaacggctgtattcccactcctttgccactctctttgctcttttccgctctagaaagaattaatgaactggatcaaatctaagttctccacgttacagatgggaagcctccgggccaaggaggccaatggttacacaaaccaggtaagaaaataaaatatgcccagtaagttcataggaccggcgggcttagatttcgaatgcgcgtgactctgtcaactgtggacttaaccctatgcagagattagaggagagaatagtcaaacacggataagttaacatttaccgaacagtccgtcctaccctggggtaggttttattaacagtctcgttttgcaaaggaagacagctgccagttgtctcagatcgcacgggcatgccgcgcagatgggcttctgagcagctcagggccagccagaggtctggcgagaagggcgtaattaaacgaacccgcgccggtttcctcagggccccccggggctccgcttcgccccagcgggcctcggcggggctgggaaaccggctgaggttcgcctcacggtggggaggagcgacgggaggcggaagcccttcggtccgggccccgcccccgcactcgccctcgccccgccgcgacttcccattcgccgccaacccatgtgcgttggtgacgtcaccgcgttcaccagcccggaagtgcgcgtggcggcggtggcggctgcggcaacagcggggccggtaagcgggcgcgcgccgctcagaggggcagagttggtggcgtgagttgctgccccttccttcctgctgtgggccagaggcgccaccgcgcccggtcctcgaggaagacgggagcgggacgtggcgagaggcctcctcagcagtgggcaaaatagccccg

SEQ ID NO: 28894 - DNA, 2300 bp, Homo sapien
tcaaatactgaaattctacaatttctacaattcacaattcaactgaaatttctacaattcacatttttatatggacttaggcatgctcctgtttggatttcagttacaattagaggtgataaataatcggtttcccctctccttgagttttatgaaatgaggaacttcatcatgaagtctcaagtaaacgaacattttatctttcttgggattctatcacttcttaatgtttgcccttatagtgattcagctgattctcatttaaagtttttacacaaaaacagtttggattatatcttgaggttttcacttcagatactggacaagtaattagtataaaggcaactaacatggtcataatagaagtatggtgtttactctcaacatttatcttcccaaagttgtcttcagcattgaaattttaatgtttgacctttttaaataggaatgaagattctagttacaatatatatttgaaggatataggaagcatgatttcacacttcatagatagtcacgtcatgggattatctacaaaattttttatctttttaaaattagatgttttcctaggccaaaatcatttttcagatgttgctcattccagcattagaatctttattctgtggggttttttaagtgcctttttgttttgttttcagagaaagtttcattgtgcaaatctaacttcatggcctcgctggctgtattccttatatgatgctgtaagtaacttaccttaaatttactttatatatggtaggccatgtcataattaagggtcattaaaaaacaaaggtttagtttttccagtttctagtgccttataacttaagatatcgttaagagtggtggctcacacctgtaatcccagcactttgggaggccaaggcagggggattgcttgaagccaggcattcaagaccagcctgggcaacatggtgaaaccccatctctacaaatacaaaaattagccaggtttggtggcatgtggctgtagtcccagctgcttgagaggctgaggtggaaggattgattgagcctgggaggtcaaggctgccgtgagctgagattgtgtcactgtactccagcctggacaacagagcaagactgtctcaaaagggaaaaaaaaaggtatcacaagactctttagagttttattaagcatgtgaaattttgttgggttgggtgatagttacatttagaacattaaagcatccatattttactgttttggtttttctctaaacaagtatattaacttacgtctcttgatcattagtctattaattaatgcatccaggagggtttttgctccttaaagtttaacactaggcattgccacattttgcaaaactaagggacagtgctgaaatggtttaaagaatctggatttcagatcagagactgacttcagagtctgatttctgtcacttactctgtgggcctggagcaaattacttctccaaggacctatgaaatggatataatggtagctattgtacctggtgtgcatagcgggcattcaataaatgctagccatttcccttaatgaatcactgcccacaaatctggagtcctgggaaaactcaacaacatgcacgacactaaaggaaactgcagttgatctccgctctttagcagcttttcagcaattacaaagacacaatatatgagtttttgcatgttttgcatatgcttgtgaaaattatgtagtaaataggtgccaagtaaggtatgtagatagcaagtgctagtgcaatttataggtgccataatccctatggactgggtcagaaatggcctaatagaaggcagaagagaggccagttccaagcaggggcatagaacagaacaatctgcaagggagttgggagcatataccgctgggttaagacagtgagtgagaaaaggctggaaggcagacagtgctgggcaaaggagctggagcttgatcattgctgcatacgaaaatggaggcatttaaactgggactgagatgggactgagtgattaaattgctaccagtgttagttttaagagttgaaaagcttaatagtaaattttaataagcccatgaacttgattatggctacctttattttaaacaaggagaccttaatggacagaatcaagaaacagctacgtgaatgggatgaaaatctaaaagatgattctcttccttcaaatccaataggtatgaaaagttagtttcctgcctggagcctgggatgtcttgctataaaaaatagctttttcatggatgcgatccaatcatatcttctaggttttaagactga

SEQ ID NO: 28895 - DNA, 2300 bp, Homo sapien
ttctgtactattaaagttaattcttgagctgtaagacagtgatctatgaacatatatatttcttttccctctggcttgcagagctccttatccattgatactgcacgcaagcaagaggaaatgttaggaacaactcagtatgatatcttctttcaggataaagttaccaaattaaacaaatggtaaatgaccatgttttccttttggttttaataaccagtgcttaatccaagaaacctgcttgcttagatatttttgttcaatgatcatctgttatccctactgaaaggtgtagctgtggatgactaggtagactccggagggataaaatgaaggagggagcaggtggtgaatgtgaagagtggagaggagaggaggagaattggggagtaaaagatacacagatgtgagctccggtgatctgtagcaatgcacaaaagaacagagaaagagccagtgcttctccagccacatttgtagactccaccagccttgcagctgtgctttctcgtccggagaagtcttgattgacccagggttcagacaattctggtatcacctctggggagaaagactggaaagtcagagcttacttattcagaagctagatgcttgtgtaaagaaaattctactgcacgtaagcacaggttattgaaattctacaaactgtagtgagacataatgttacagcatcaaacacacacacatattacttagtgcatgctccctgcttgcttgcgttctctctctctttcacgtgggcacacacacacgcacaccaatacaccggccattccctcatcgttctgtgctggcattctggcatagaatcatccttcaattgactggagtgatcaccttaactccgttaaatcattacgtagtatatgtaattgttattaacctcatcgtaaaaggtgatgctatgattcatgttgcagacattattaactggaacaaataggcgacactatttggttcgttcttattttgcaaatgggcgaattgaggcccgcagccataagtgatttgacgaagaccacagactgattcggagacaggaggcaaaatgacacaggaatgattcacaagcctctgtcacaagggagttttctgcttgtaacttatcagggaggcaaattttctgaaatcattttttcaaatctcagatccatgacttttctgttgagcaatgctgctgcttcctctcagcctccgcccaccaccaccactaccatgtttagatgttgtatttcatttaaggatttttcagttttccttcctcgctgaaaaagtgatactgaaatacactacgaaaacttttgtcctccctccaaaacaaatatcttaccagtcacaactccaccattataacagaattatcttcattttttacatagtctttcttttttgccacagtgacttgtttttacatagctgaagtcataatgagtaggctagtttatattcagacaattttatttaccaattataaggcgttttccattctgtgcaatcatcatttcaagtatgtttctgattaatacttgttaattttggaatgtaatgtacatatatggaaactactgaagttattgaagttgtatgtacatacattgaaactactgaagaaaatcagcaataattcaaccaccctcggaataactgatggatttccccagccttcacatatatgcttcttattttaagaattgaaactaatgctgcatgaacaggtttctatttgctccctgcccccttcgtttaaaaacaaggtggagactaaaggctctcagcctcagtttctccatatgcaaaatatcaggattaaataagtcatgctaagggctggaacaaagtgagggctctgcagcgtgtacgccgggcactcagccgtggatggcaggggacggcgttctgtccccgggacggagcgcaggcctgtaattgtccctcccgcctaggccatcactttcaggcttgggtacgcgccgccgtctgctcccctggggccgccagggggcgctgtggccccggtgcgcggcagccgcgcgacacgggccctccctcggagtcttcggcaccgccctgtcccagcctcctttgcgggtaaacagacatggccggcgaaggagatcagcaggacgctgcgcacaacatgggcaaccacctgccgctcctgcctggtaaccgcccggagtagttccctgtagtcgggagtggggcgaggctcggagccgctagcggtgcagctgggcctgggaggcgggcgtgggggcgccaagcctggcgagccagcc

SEQ ID NO: 28896 - DNA, 2300 bp, Homo sapien
aaattcacaccttggtccctgactcacaccattctcatgaagtctcttccaaaacctggaggctgttctagatctggcctcccaagagcaactctcaccatcattaattgctccgactgctcctccaagacctacctctgtaaagctcctccttgaagggcacaacctcatctctcttccactcccaggaaggcaggctggaaacctaatagagactccctaagaaacctgcattctatctttccctgaccattcaatttccgtacttccaccagagcccaacttctatcagacaaactccatgctatctgcatgctaactccatggataatctgcatgaaaaggggggaaagagacaaaatcatgttacaaaacttgggcaagggtctagactcaacttgctttgaaagatcttaaatcttcccattcatttgtagacagcagtgggcctttttcttcctctgctctgcacgaccttctagcccaagtgctagtatcaccttttcctaaagacttttaagacaaactgtgaccatttatgtctacatgacacagtttcaggataacaaagtgtgaagacacacaaagacgtcaaacatttatcagagacctaagcgaaacgccaataaatgttacagggatcaagaatatggttactgacattgaatgtatcctgtggctttgaagaatccaaaggatgattctcgaataatgtatccttccaaattctccagaagttctaagtttagacatcataatgaaatgtcaccacgttcctctgccagaagttgttcagtactgaggggctaatgatgctttcgcttaaagccgattcccccaataaagggtgccaaggcttttctgaagccctgcttccggctggcgactttgaagctgagacgcaggttcacgcgcagtttccgaagacctattccgtccccaccctcctccccttcctcggagacacctccacttaacactgccttctcagtccctcgccgcctgtttaaacacaacttccacccctcacaaatcagaaagctgtaatttcaaagtttcagaaacgttttcggaaagcctcctccaatgggaagcgacttcgccgctgagttaagcgtccgaatcctccttcccgcggcagggacaccggcccgggccaggtctgcggaggacgcccccgggcgcgcacacacagcccgaggacgcgccctgtattttaagacgcagggtcggatttcaccccgaaacttggctcccacagccccaggccgaactgtgtctggttctcagcccccgagcccgagttctacgccgcaaagagatggggccccattgtgcctagctggcctcctagcacggacgtgtattttcttttggtctgtcttttgctaaaaaccggcagtgcgcttcgcctccctgcccagccgcagcctgccgtcccctagacaaaaagcggcgaccgcggcccggccacccgagccccgccgcgctgcgcctttgttgggcggtccacagatggtgcccagcacggggccgcgccgagggcgggggcgggaggccgcgaagagggtcgggcgggaggggaggagacggcggagcagccaatccgcgcgcggcccatcagctgaccgcctttgcttacaccaggtgcacgccggctgcggggagcacaaagcggggcgcaccgcgggcgccggcaacgagccggtgaacgaggcgaggcccgtgcgcccgcggctgcaagcgcccgcctggcggggagaggggccgacggcgtcagcccgggcggcggcatccctaggcgcctggggcgccttcctccggacctggccgctcgctgccccgccctctgcaccccacttctccgaccctccttcccagtcctgcctccccctgccctggcctctgagagccgactgagcccagccccgtgcagcagcggttgcctgtgtcgccgcctagtctccggtcttggtgctctcccgggggtgccccaaggagccagtgcgcgctgcgggctgggaaggaggcgccgctcagctagtcctcctcctcctcctcgtctttctcctcctcctgctgctgctgccgccgccgccgccgtgggtgccgggtccgcgcgcaccccaacacccccaccagctgggcctcggggtaagtccctggccggccgcgccgcggcaggaggtgtgggaggcagcgaggggaagtcgaggcaaacttggtggcgtgggagaccctacggggtctggggaacctcagggtaagatcgcgggcctgagggggacgagggggcgcgg

SEQ ID NO: 28897 - DNA, 2300 bp, Homo sapien
ttatttaccaaggaatgagttctaatctgtcctttcattagacttgcagaataacgattacacaggcaggttaattgccaaagataaggtttcacaaatgtgagggtcatttttaacttaccaggtttcaaaaatatctagataactttacaacaaaatggtttatagtctagaaatgtcaagtttattttaagttacccttcaactctatcaggaagacatcaggcgtgtagagtcaaattaagagtttattagaatgatttgttactttctgacttctatatagctctaagacacaaaatgcaaacttggctataacattttcttacttaaatttgattcaattcatttttccccatcctgtgaaaatattgccttatgtataaaaggcactgaacctgcaaaaataacttaaaggaacatgtaaaatagcagactaacatctgttgtccacccctcccccgaaacactgagccctccaaaacaatgttgtcttttttttctggcgggggttgggggggtgttgtattttaatgtccctttcagtgaatatatagaatactggggcaaatgctgttccgtgaataggttctttttcccttcaacagtgtttgaggttgacaaaagaagaggccactggggctggttagtcgtaggtattaatataatcgcctgcctcacgtgcggcccacactgcctgccttttgttcagctgtcgcacaacgccaagaggtgaacagtgcagtgtggtcacgcagctaatgttagacacggcagaaaggcccttgctccagagtctactgcacgactacctccccgttcactgttatgtgacctgaaaaccactcgggtaactagggttgggacagttgcatcacctgcagttctacagtttggtgccttaagaaccgaaatgactttggctagacagtggacattctcagctagacagtggacattctcaggaaatcttcatgtcggtcaacgacaacgatcttctactataatgaatagctctgaagatgaggaccaaatttgagcaagagtcaaattattaaaagaaaactcgaaaagttgaggggtcaattcagaaatcacttcaagccgccagaagtgggttaaagttactgtctgcttcacacaaaccttttcctaactagcttagaatatccagcttgaatattgcacgaatatatacagccaggtaaagagcaagcagcactttgagctttcaatacaatagcacttaaagaatttggctcctgaataaaggtgtcagcaaaccatggaattcccaaacagaaaaactcacactgcgtctttattctcttttcttaaggtctattgttaactgaagactccttgtcttttcaaattccttcatgtgaatggatgaggccagacatctgccaggatccgctcacatttgcatgcaaatcagagacttcgggacacatatggccctggagccaataacacttttactctagatttatactgatcaaagtgccttcctgaactttccactcctccagccctagcttttaaaaatgaaataatgagcctattccactaacatgatttagattgtcatggcaagacaaaacaaaacatgttgtcttttagaaaatcctccacgcaaaagccagagtcggcagcacctgttccctcacccaattagaattccacttttcctttacgatttaggtttgggaatgaaaatacttacggcgggatgggatttagactcttagcctttgcctgtgagcttcaagtgcttcagaaccatttgtaccccggccagtcgttcactcacggccaggctctgttcttggcgctggggccgcggcggtggacacggcaagcgaggtccccttctcctggatccggcatccgggccgaagcgcctggtccgcgtttccgcgcgggctcccctggaaccgtcccgggacacgcggccctctcgctgctggacttttccccgagccccagcttgccaggcagggactccctgggcgggcggcggggaagcgccgagtcggcggccgcccacacccctctccacgcagcacaaaggacactcgccggcaaactttcctcgcttctgacccgggccgagccgggaactcagcgccagctctgttcctggcggggctgaggcttccctcacattccaggccacctggcaaacgtcctgaggctgccactccttctgggctcaaggctcacgggctgaggtctgtccccgcgtggagctcaaggctcacgggctgaggtctgtccccgcgtggagctcaagg

SEQ ID NO: 28898 - DNA, 2300 bp, Homo sapien
ctttttgagggaatgtcaacagaacaaggggttccaacagagaacagcagcaaaagagaccaaggaaataggtaaagtctgggtcctcaaaggctcataagacagaatatagaaggtaaactttgagagaaaatggagcaaataagaatctaagcagcaaaatataataactggacaaggatcttcaaaggtcattgtagcagcggcagtaagggtgatttggggatatggagaatgacagacttaaagcaaagaacttccaaagtccaagcaagaaatgagagagcctaggactaagtgagaagaggcaaaaatgagaacatgaaggcagaatcaacaagacttacccaccacgtccttagctatatgagtctagtgaagtgaaggaatacagagtaactggtttgttgctttagtggctctgtagatcacaaattattttcccagttaactttaaagaagaaaaagcaagactggcagaagaagtcaattcagattattttgagtttgaggagcctgtaggacagaaaacagaaatgctcaatcattagctgaatatgcgtaactggatttgaggagaaacgtctgatctgggttggagactggtgacctaatcctttatatttgaagccatgggagtggatgttattaatgagaaagttcagggaaggggagcaaagaaaaaggtcaagggcagaaccctgaatcacacccacttttcagaaacagtcaggcaggaaaacaacaagaggatactaacaaggaaaggtctgcaagatggaaacacatttaggccaatgggacctcagaagctgcaaggtcagaagggtttgtgaacccaaaattatctgagacaggtctcaatttagaaagtttattttcccaagcttaagaatgcgcccccaacatagcctcaggcagtcctgatgacatgtgcccaaggtggttgggatacagcttactctcacacattttagggagacataatacatcaatcaatacatgtaagattggttggatctggaaaggcagacaacgagaagcgggtgaggggtggcttccaggtcataggtagatttaaagattttctgattggcaactggttattatctaaagacctaaaatcaatagaaacgaatgtctgggttgcaataagaggttgtggataccaaatttgatcgtggagatgaagcctccaagaggtaaatttcagagaacagattgtaaatgtttcttatcagacttaaggtgtgtgttgatgttgatgctggctggcttttcctgaattccaaaaggaagaagggcataatgaggcatgttggaccccccttcccatcatggcctgaaccactttctcaggttaaccttggcagagaggaggggtcccttcagatggtttggaggattggaattttatttttggtttacagtttcaaggagaagcaggacaatcatgtcagagagcttcagtgaggttgaaaatgctccaccggattcagcagtcttgaggctatcagaatcctttggcagggcaggggtttggaggggtgagggtagagggatggagaggagggaaaaggacaggcaaaggggcacggatacctccatcagggagtgagcatgcccccacacaaattccttaaggcaccctgtgaggctatcgccttggcacaaaccctatcacatgtcagtcaacttcccggcaagccgcagacctttagaaaccttggtgtgcgtttccccgctcggtttagaacgcacccctgcctccactccacaaacgtgcagtgagccctcaaaaacctggacaaatgacctcacctcgaaagccccctctctgatgctcccaggaaaaactaaagcacctcactttgtttcgtccgtaccttacatggttttgtaattatctgtggtgcctctggctgaaatcaaaacgggagccagacccaaaaagtcaaggaagggaagcgccttccaggccactcctgagaagaaacgaactacaattcccatgaggcggtggggccacgggaccacaagtcccagcatccaccgcgcggcccaggactgtcagggtagtgggcgttgcgtgaggcgggtaaatgttcgcggaagcggcaaagacgacacggccttgtgggatggcggagtttaaggagaagcctgaggccccgactgagcagctggatgtcgcgtgcggccaggaaaacttgccggtgggcgcgtggcccccgggggccgcgccggcgcccttccaggtaggggcggggccaggcggcgcgggaggcgggcgcgcggct

SEQ ID NO: 28899 - DNA, 2300 bp, Homo sapien
taggaagttcagctttagggatatagccccttgacaaatgtcaaacatctttcaaagcctcaattggaagccgctgtgctgcaattaggcttcgaggtggaaagtcataggattcctgggtttctcaggtggacttggcttcttagctcccagttaatatctgctttcctgaatttagtaacagaggaaaatgctaagggaggaaggaaaacccaaaaggggaatgtatgttatccatgcagtcaacaccgatggatcttctgagaagagtacctctgttgtctgtgctggaaacagtgactggcacatgataggtactcagtagatgtttgttgaaagaataaatgaaaggcctggtgtaattactgtggggaattcaaaggtgtataaggaatggactaggaatttgtagcccacttttaaaaaagtgagcagggaattcagccaaagccatctagtgctgggtgaatgagtctatcccctttttctcagttttttttccccaaacttccacaccctttataccctcaggaaaaaaagaccggcctcttgtagaggaaaagtagaaagacacagaattgaaagccaagggtcacaggttgggttctctggaaacagaggctgaaacagagtttaggatgcagaatgttagggccccacacctgtagaaagcaggggccagagcaggactgggcagagggagaagtcaaagccacaatgcaggtccaaccaagctccacccaacacaggggcctctagggtgtatatggcccataggttgagccactgtaggctgaaatggctggctctgtatgcccctgctgtggttggttagtcactggtttctctgagatggctgtcagctctgctgaaccccaaaggagctgaaagctcctgctggccctcctagcagctggagtatctccgcatctgccataccaatgacattctgtgggaatccgagcctacaaagtgaagaaatgttttgagtctagttcccagtggaactgtaacccatttgggagcctgggttgtcagaaaccgttggtggagcatgacagatgtagcatggctggggtttgacttaaggaccaggatgacctcagtgtcacagattgaactgagggggattatgggcgctttgctgaagccagctcctgcttcttgttctgattggtgtcacttttcattctacttttgctcttccccaggccggatcatccagttctccatgtgtcctggaatgatgcggttgcctactgcacttgggcagggaagcggctgcccacggaagctgagtgggaatacagctgtcgaggaggcctgcataataggtatttagaggatctcattttgcctgacaatatgttggtcatttgaacaaacaaacaacaacaaaaaactccatggaacttactttggttagaaagttaataacgacaataattctttttcttatttttccacgaaattacttagaagacactggagaatgggtcacaaatcttttatcacccctaaaccaagtgtctggccaagtgggctccctccagccccaaagcaagtcttagcaattcaacccccttgagttacatatcactgcttagaacttcttggcagactgccctgcttttagcattttcttattttaggcatctcctgaagcagcggtatgtctctgcttctagagccatgagacagaaaactcatgttgggttcacatcttctaggaaaggctccttaaaatagcccaggctttataaaaaagtgtggtgtggtggtgcctgatcacactaccatataagtccaaaatgaggtctactctcccagctttctataagtccttcttttagttttgtgatttatttcaggcctcctgagtacctgggcaagactgaggctgttgtggacgtgacatgagaagttataaggaaattgaaaataaatcctgattaaaagctttatttatttatatatatattttaactggctcactcagaacaagcaagcaatgttctctttttcattgcatcccttctcttgactttcatccaaaacctgtgcctgtttgacaggctgatgcctgtgtctcttctgacagacttttcccctggggcaacaaactgcagcccaaaggccagcattatgccaacatttggcagggcgagtttccggtgaccaacactggtgaggatggcttccaaggaactgcgcctgtgagtaatgagacctctgcaggagggtggcagctgctgagaactgaggctcccagtagacatggggtgaaaggcattgctcac

SEQ ID NO: 28900 - DNA, 2300 bp, Homo sapien
gttcactgagtgatcatgtgcaggcttggcctgattttgctgatacagtggcaaacgaataggctcctgccttaccttcatggaggttatagcctaatggtatagctggaccaggaatcaaagaagttcaggtctctgaagcgcagctgacacagcatgtgctgagactgatatttgaaggaggcgaacaaagattaccgttgacctagaccttgactatatattatgcacagtaaatacatacaaccttggttaaggcattgaccttttagcttcatcaattttgaaatgagtatagtaataatacatttcttgccaagtggttgtaatctcaaatgagaaaatgtgtgaaaggccttggcaaactgtaaaatagtcaacaaggagaaaaggccttttttttttttttgagagatggtctcactttgtcacccaggctggagtgcagtggcacaatcatggctcactgcagcctctgcctaccaggctcaagtgatcctcctgcctcagcctccgaagtagccaggaccaccggtgtgcgtcaccatggccagttaattttcttaattttttgtagagacaaggtcttgctgtgttgcccaggctggtctcaagctcctggcctctagcgattctcctgcctcggcctcctaaagtgctgggattacaggcttgagacacggtgcctggctggtcttttctttatgctaaaaaaattcaaacagatgctacattagaatagtgcaataaacacccagatgcccatcaaccagctatgacagttatcaactcatggccaatcatgcttcatctttagccagaccctgattacccattttttgggaagcaaatctttgactgcctatatttttatccatatatatatatgtgtgtgtgtgtgtgtgtgtgtgtgtatacctcagtgagtgtgtgtgtacctcagtgaggggattcttttaaaaaatatagccacaaataccattattactcctaaaagcctaaaaacaaaatttacagcaattccttaattttatcaaatattataatttgacttagtggttaaatttccctgattatctcaaaaattttgaactcagtaggtttgaattagtatttagataaggttcacatattgcagctggctgctatgttttttttttttttttttttttcagatggagtcttgctctgtccccaggctggagtgcggtggcgccatctcggctcactgcaagctccacctcccggattcatgccattctcctgcctcagcctcccgagtagctgggactacaggcgcgtgccaccacgccgggctaattttttgtattttttagtagagatggggtttcaccgtgttagccaggatggtctcgatctcctgacctcgtgatccacccgcctcggcctcccaaagtgctgggattacaggcttgagccaccgcgcccggcctgctatgttgttttttaatctgtaagtttctccttcatcttctttttgttttggttttgcattttgttcgattacggaactgtagaacagtggttcttaaacttaagtgtggattagaatcatctggagagcttgtgaaaccctggattgctgtgtccagtccccacggattctgattccgtattgtatttctcttttttttttgagacggagtcttgctctgtcgccgaggctggagtgcagtggcgggatctgggctcactgaaacctccgcctcccaggttcaaacgattctcctgccttggcctcccgactagctgggactacaagcgcgccattactgggtctttgtgaggattaaatgagattttaaaaagtgaagtgcttagcatagtactctggcacttaccaaatgcccagcaaatttgactgttatttttcaaccaagaaatcataaaggggtgcacggtctgtggaaggccttgagttttgtggagttttgtgttttgctgcgttttgacgttagcacaggcaagcagcagcgccaaagaagtacctgaagaaaggtgaagagcaactctcctggtcacttcgtaagtcagctcaaaattctgcccctttaaggagggctcagccacgtgaccaaccgggtcacatggcccgcgggacaacatggctgcgcccgcactagggctggtgtgtggacgttgccctgagctgggtctcgtcctcttgctgctgctgctctcgctgctgtgtggagcggcagggagccaggaggccgggaccggtgcgggcgcggggtcccttgcgggttcttgcggctgcggcacgccccagcggcctg

SEQ ID NO: 28901 - DNA, 2300 bp, Homo sapien
gtgaccaggggataatgctgacagggaacggagggcaggagtgaatatcgtgaacacaaactttgtctatttcaagagctttgccccttcctggactgacattaaatgcttatctgagcaggcaaatacagtgcacatgtttacattggggaggtagcggagactagtagtttaggaccagggttcaagactcagctatttgtgtgactttggaggaagtaatttaatcgctttgtgccccccctcagttttctcataagtaaaaaatggcttaataggatttaattaggtgctatacagaaagagtttagaccaatgcctgacacatggcattcacccaataagtgtcaataattatgattcgttttggcattattatgtcagtaataactattagctatgattctcctctaatttgttcctaaagtttcatgagactcgattttatattaaggaatcctgctaaaaagtagacatattctaataagaatttccttcagatggcaaaactggggcaaagagatgaaaatgacttgcccaagggctcagaggctgctcctaaatggggagagaggctatttaaggcaatggcggtggatttccccaaagacaagggtttcatacacgtagagtctggaacgggagtccaggctgtaccacttaactcgaggggtcatttgggaagttacctgatttctctgagccctggattgtgcacctgccaaatagatataataaatatacctacagttggtaaaactcaatagcatgacgcatgaaaactgcatgtggtctgggctcaataaaatcagcctccccattgattattatcattattattactattgttataacagatctttaggcggcgtcaggaagtgcctgtctgggatgctataatgcgtttggctcaccactatgccccagcgcctggcacctagtaaacactcaggaaacgtttgaggaatgaatatacgtcatttgaggcaagacagggcagtcggctgactgcctccgggcttagctcttcccctccttgcaaaagccggagccctaagcagcgtgtagcccgggagcccaggcattacttggcagcgggtgaaacccaccttgccccattcggagctcttggagagcgccccgcctggatgcgcatctctgtgtgagcggctctttcctaagcccttatttttctggtttgcggtttatttacttaagcatttacagctcccaggagcagaggggctgctagaggtacggtcaggactgaggtcgcggtttgtatttattttctgcctcccaatctcagagccggcaagtcacaacacggctcctttatttgtgcaccggagaggtctgcctttctttacctcctcacgggcgataaaagacaagcaactcgggctcagaaaagtgctctcacgcgacttgcctgtgtctccgcttgcgtggaccgtcgctcccaggcttggtttctcgtgcaaacccgagcagggcggagcagattaaataaagacacctcgcgcctttaatccttgaccgcaaacactggcgtttttgtgccccggatttctgaaattcttggctcggggaaccaaggcagggggagggtgggcttgtaaaaacttcccaaagcagaaatccgagctcctagcccctccccggccccagtgacacctggattccagggaaggggggcagccggaggagaggcgtccccaagggttgcgggcgcttcccaggggtgactttgaacggctggctccaagccctaccgaccccagccaaggaacaggctcagcagcctgaaagcctcgcaggacgcccctcccctgtccccgcacgcgtctatttagggcccagcccgggcgcccaggggattctgggacttgtagtccctccccgcagcctcaggcgccgccacgacccgctacttggactacattgcccagggagcttcccggcctatataagccacccggagccgctttaaagtgcagtaaccatgtggatgtgctgctgaagcgtttcctcaagctcgctggggtgggaggagaggaggaggaggaggtggtggtggaggaggaggcagggggtggagagagagaaagcgcacgccgagaggaggtgtgggtgttccgcttccatcctaacggaacgagctccctcttcgcggacatgggattacccagcggctgctaacccctctcctcgccctgctcccccaaaccggcgtggctccccgggcaccaaggtagcggctggggccgggcagagggcgcggggagttggcactggct

SEQ ID NO: 28902 - DNA, 2300 bp, Homo sapien
ggcttaggtggcaaagcatcaagcaaagcaagtgcctccttgatgaagactgcagtcacccccagtcaaccctagtccttcccaactcaactgactctcgggtacagccgagtctggtccccagcagaatgctctgggactcttcatgtctccccaccctgcatccccatcttgctgtgtgctggcccaccaggtaacttccacacggccacagagagcatccctggcagctgacagtaagatgtacagatggccaagcggttagagcagggcagggtgaaatcacacagcactcatctgggtaaagctgctttgtatattagggctttggcggcggcagcgcatatccaagcaggggacaggcccaagccaacttggtgccctttagaagcaccgactagggatcggcgggaaccacagagatcacctcatccagccccgacttgatgacaagcccatcaccctggtggagcagatactttccgcagctctgcccctgaccgaccaccatggggtagaccgcgttagcttccttcactcagctcctccaacatcccaagcacaagccaaccctcttctgaaatactcttgccctctgctactcttcacacagctccttctcttcgcatctgttgggtctcagcttgaacggtatctccccagagaagccctccctggccacgcttcgtggcgcctgtttgcttccccatcacacttctctgaagctctgatttagctgatgatgagctgatttcctagctctgtctcccacaagactgtaagctcctggagggcaggggctatgttggtctcatccctgactgtattgacgccaatgtgtatagcacctgacacccagggagtgctcagtaagtaaacatctgctatattaagccggctgtggtgacacaagccagtagttctagctactccggaggctgagacagaaagatctcttcagcccaggagttcaaggccagcttggtcaacacagtaaggcctcttctctctttttaaaaaatttactatattaatgaatgaacaataatcctgaaggaggtgcaattccgaaacactcaagccaagctttgcatccatggcagctgaagtataactttatggccagaagaagcctgcatgtgaaagctcaaagtcctgctaagtgggaatatgcagcacaccgcagaccagccaaaggcagctgatgtggtgttgtcacctctacgggcttatccggtttttgcacgtaactctgtgatgggctcagcctggctgaggatccttaatccatcgagttaactgttaactaccccggccccagtgacacagcagcttgcatgattaactacagcccgggagggatgatcatttgtgcaccttccgtctccaaacctggctccctccccagacttgatagctacaagctctgggctcaacagtttgtgggtttgtgttgcaaggaggctaataaaaacatatttctcaaataccatatggtgagggcaactgcaacacatcctcctcgaagagcaataaaatatatatatttttaaagtcctgaattccaggggaaaaacgaggcttgaagacttcagagggtttacaggactatccccttcagtgtcagagccatcttgatcaaaagtctaaaacccaggaataggaaattggtagaaactttgagagagcctctgacagtttcaaagaggaactcagaggacctcaggaaatgtgagcgggcatagatttctccgtgaaaaggagggtcaaggcagaagaaccagaggcaactgtgaacatcaagtcagttctcagggaagcaggggatccaagtgtgtacatgaggcgccttcactgtccctgcatcaggaatctagctgttggcaccttataatgagaaaacagtctcaaccatgaagttaactctgctggaagatttccaaagggaaagtccctcccgttactcagaggggaaaaaaaaattacctacttggtctggaatccggggatattttatgcagatgtctctaacagaagttaataaagggaagtcagcttgcctctgattattcaaacaggctactgctattaaggattgcacaacttctgggcaaggcagaggtgggtttggctttttaaaaattttttcagcctgtcctcatggaactacatattcttttctaagaacttttcatcctaacctccctactcacatcttctaagtgtctctgctctggtgggaatgtgatggacaacacagagccatctcagaagcctctgtggccaccaccaggccggcc

SEQ ID NO: 28903 - DNA, 2300 bp, Homo sapien
atttgtaagtttgtggcaacagatggacaagaaaaaattagaactcatagaaaatattttgatagatatcagttttatagatttatagtttcttttcctaaactgtactgttcaacaaaaattatacaaaccttttgactaggagatgcatttttaaaggcatatagactcttagtaatttatatcctctgtacagcttatattttctatatcacgaagaataggaaagaaaaacagacagagttatcatcattcattctccaaaaaagagcacatgcttatgggaaccttgctctaaaacctaagcagccacatgaaaatgatttagcttcctgaagattgcgcaagagtcaacagcacagctagacaatattgttttaattcttcatgttgcagaattatctaaagaaaagaaagctgattttttaaatgatagctgaagatattttgaagacagttgaatctgggttggcaaggcaaaaagtcaaacagcacatcaaaacaagagaaggaaactgtgactaaaataaaagtgatgatatgttcctctaatttaaacattcaagtctgtgtaaatgaattaaaaaattttctttgaaaagttctcaccagttgtgagatagaccaaataatttaacacaagcaatctctagaggttgaattaaggtcctgttttaaaaacattattagtaagcagatggcgactataaaaatgatcacaaagtaatgattatacacactgccgagtcaagctgcccgaccggtcctgcccattctttaactatttcatgtatgtcaagttcaccaccccctgcacacctattgtcctggcatttcacagtttcttctttcaacaagggtagaagcggtttctgtgacacagctgtcaaagaagaacacgtgaagagggaagaaagtctaggtgagggctgggtatgttggctcacacctgtattcccggcactttgggaggctgaggcaggagaactgcttttgcccaggagttcaagaccagcctgggcaacatagtgggaccctatctctacaaaaaattaaaaaaattagcctggcgtggtggtgcacacctgtagtcccagctactcaggactctgaggtagtaggatagcttgagcttgggaggtatatgctgcagtaagcagagatctcgccacagcactccaggctgagtgacagagcaagaccttgtttcaaaaaaaaaaaaggaaaagaaaaagaaagaaagaaagaaaatgtctaggtgggaacacaagctaaggacccagtcttcaaattccaggacctcttggatcatccacatacacaacctgactctcattcacagaagcacttttcatgaaaacattatattacaatgatttaaacacccttctccaaattagttaacttgctttacttcagattagctagtttaaagagaacataattgattagtgaaaaaaaccaacttgactaatgagtgagctctgggaataggtttctgggtacccaagaagcattaactcatacaaataagtccaaacaatgactccagctgggaaaagaacagagtcagaacaagcagttgcctagggcaatacattaccaaggcagcggactctgcaagtggtttctgtagaacaaatgcaggctttgaatttaaatattacccactttgcttggggtaggtgaatctgtagatgaattactcaccccagaagttaagcagccactctcctgacctcactagatggatgacagatggatgttttaaaagtgactattcagagttcagggtgcaaatgaaggcattcactatatggctgcatacacagcactggctataagccaagcttgctttccaccccttctctctagcccagcgtaggctgctgactataagccaaacgccaatcaccaggtagcaatgacttgtctttgcactggctgtgaggaggcttagtcttttttaatcctctactgcttgcaagtgaattgggctattgggtatgtatgtatatgtatacacacacacacacacatattcaaatatgcatatacatatatctatctagcaaaccatcatattttcttttttacttattttttgagacagggtctcactctgtctcccaggctgcagtgcagtgggtgactatagctcactgcagccgtggcctcgtgggctcaagccatcctcccatttcagtctcttgagtagctgggactacatgcacacgctaccctgcccagctaattttaattttttgtttgttctagagacaaggtctcactatgttgtc

SEQ ID NO: 28904 - DNA, 2300 bp, Homo sapien
cactgccagttaagactgatcccctaactgcacccgaggctactactcttcgcccagtctcggcagtgaccccatttttttttcaatccttcccacagccaggtcactcagcagtggggtgactgacccgaagcgcagtgggaagggcttacagtcatctctcaactccccgaacttgcagggcaggggagcgcagaggtcagtgaaatccccagccaggccttattttagtcatgagtttccactggctccctcctctgactgtatcagcgctgctcacaccgcgggattggagtttcagctgttttccctgctcccggctgagtgagaaggtcacagagcccggacctttccgggggaggtgggtggggccctccggcagcctaagtgagattgcagagatctggggccgctggaggaggtccttccgccccgggcttggggctttgggttagcttctcccccgcttctctacctaggcatctcggttacaatgaaattaaaaacaaaacacaaagcaacacaagttctcattgtttttcccctctgtcagccagtggcctcgatacaattttcccagggctgcctttcctttattgctcaatttaacctcttcctagaggttctgcaagttcaagggcaggatccgtgtcggattcatcaactagtgcagcgcctagtgcagagcagggggctcaagaaatacgtgtcgaccgcatgattgctaagatttccctgtaacaggcggtttttttttcttgtctctctcatccctcctgccctgggtgcagaccgcgaacagcgccgccgaacttcccaacaggcagggagagggccgatccgggctggcacgccacgtccccggggtctcagtccctgggtcaacgcagagaggctcgcggtccgcggtgctacgacctgagcccggccacgtgaagcgtcacgccctgcgctgctgcagggcaggcgccgccgccgcggttgtgtaacgctgcagccggaggggaggcgaccggggcgcctctgctccggagggggcagaggagggagggagcgccgggcacagcgcccggtatctttctgcgcttgactggccgggaggaagggggtgacactggggcacccagggggctgcgcaaccgggtgcccgcccgcccgcaggttgtgcccaggagcggagctcctgggagcgaggggccctcggctcacaccctccacggtcaggtgcgcgcggcgtgctcggcggcagcctcagctgcccctgcgcttggccgtcggcccgcttcccatggggtgacatccgccccgcccctcggtccctccccaaggcgggcaattcctggacgcgagggtgagcagtgggggcagggaagccaggacggaaagaaaccccagcctctggggaaggctggggggccgggcgactccctccgcagcgcgccggttcctccaagcgggccgggcgggggaggaggaagagggctgggctggagctagcaaggggatattcctctcccggcttgagtcagacgcgggcggatccgtcctcccccgttccctcccaggagacgggaacttacttcatttccctggggcaggttcgcccacgttaccaacttctccccctcccccagcacccccgtcccttccagcttccgcgccccccacccaactgggcaggacccaggtcgtgctgccaccccctcttcggggaaaggcggccgcagccgcagacacctgggggccggggctgggggtgggggctccctagcagccgccggagcgttgtccaacacgtgagactcatgtgatgaagccgggggagggcgggcaggtcgctccttccctccccggcagtggccagacgtgcctggagtcacagggtagaacacgtagctccaacccacccactcgctcccatttaacccagcccgcagcctctccattactcctcggcttgcccccccacccccccactccgccctaaccgcccccccctcacccgctccctcccgcctccccgcccgccccacttctcattcacttggctcgcacggcgcagacagaccgcgcagggagcacacaccgccagtctgtgcgctgagtcggagccagaggccgcggggacaccgggccatgcacgcccccaactgaagctgcatctcaaagccgaagattccagcagcccaggggatttcaaagagctcagactcagaggaacatctgcggagagacccccgaagccctctccagggcagtcctcatccagacgctccgctagtgcagacaggagcgcgcag

SEQ ID NO: 28905 - DNA, 2300 bp, Homo sapien
gaagtcagtagaaacgaatgatgaaacttcagtggtttcgctagattgtgcaattcaccaagatacctagtggctattcagggaaccacatgaaatgcaggaaaaactcctgctgtatcctgccaggatcacaccacacaccaagtgacaaggaagcaaagaaacaggaaaacgctggggcatacccatgatttcttctccaatgaaagagggctaagaagaccaactgtaaaacacccacaatgcaaattataggtgccttggcattttaaaagggagtagggaaatctcccagaacccagagactctcaagctaaaatgccacaggaatatcttatcatttcactaatacgtattcatgccaggtggcacaatgcatttcaaatgaaaagtctgaccttttaggaaagataaaactgcatctcccccaatgaacgtgcataagcaatttgttgcagtaatgtttattacatcagatgttgagcccacgggctctctatttgcactcaaactcttaaagagagcatagccagaatcagcactcaccagcttgtaaaccactctgcagggcaatgattttctgctgctgctgatcaattaggtttgttagtgctttcacatgcttcaaggtaagttcaagaaccactgctttttccaagtgacccaaagtctggaaggaaaagagccttagtcagcggtgaggtcagagaagtcccacctttgggacatttattagcaatgagaaatgagaaaagaaaaaaaaaagtggaatagtgtttcctggttggctgttttaagtctgtaggtcatgcttttaaaaagatagacagatacactcatatatgtgtgtgtgtgtgtgtgtgtgtgtgtgtgtgtatatatatataatatatatatataattaaataatttaaaaaaacgggtgccacctgtctttggaggcattttggaagctgcaactacctcaggaaaatcctttgacagataaatttctccagcagcctctgccgaccttaactcaggggaatccagagataacattttcctgcagtggtgtcaactcagagagggacctctattacgtctggcagccaagaggctttccctacttctttccttacaccctttcagaacttccagctcatccaggcttttttgttcctcccgaaatactattttttttttttccatttccccaaccaaaggctgcgaagtagccgagggctactgtcaagaaaggacaggccgtaaaaatcacacaccaaagcaagtccccttatttgacaacaacaacaaaaaaggtggggggagtggtagaggggaaggggtaaataaaatgtgtgtgtttcttggcgtgttcctttaagtgagaaaaactagggaatcctgaaaatcaccagaagttaaactcctgaaaaggaaggccagttggtgttggagccaacttggagaggtccaagtggttctcgcctcatttgcatgagtcagccagaaaacgccaggactgtggaggaggaccccaccgcagagccacccgccagctctgatccgccagtctggtctgcagttccccgcggaacctgcaggcggcgagtgacccgcccgccctctgggcaaaggactgggttggaaaggggccagcttctcacttactgtaagtttgagatgttcgggtaggagatccttcagctgggcgatgcactcgttaatccggtcacgtctctttttctcgatgagccggtgcggcaatttgtaggtctcctgcaagacgcacggggaggcggtgggcgcttggggaaggagatgagaagcctatcctcccagccccgcagcaacagtccggcagaggagcagagtagcagagtagcacccagaaccatcgtctgccctttcttttccaagtcactcagaagaggcaccgagcccacaccctgcatcccctcgccaacctcaaagcgagaaaacttttcttggaaactcagcgcgcgcgaggggctgagcgcagggtccctaggggtgcacttgcttaccttgctgtcctcgctccgctttattccccgtcttgacttgtacacttggtacatgtgggcagggtacatcctgcaggaagagagaccaggaagggtcgtgactgcttgcgcacggctgcaggcgttctgccgggcaagaacctcccggtgcgcccggagctgctccaagttgagagtggcgcataacatggggctgcagttgaggcttgaagggccaaggagtgccaacttaccctggtaggtctccgtgctccagtcccggtgctttgg

SEQ ID NO: 28906 - DNA, 2300 bp, Homo sapien
gcgcggtggctcaagcctgtaatcccagcactttgggaggccgtaggcgagcggatcacgaggtcaggagatcgagaccatcctggctagcagggtgaaaccccgtctctactaaaaatacaaaaaattagccgggcgtggtggcggacgcctgtagtcccaactactcgggaggctgaggcaggagaatggtgtgaacccgggaggcggagcttgcagtgagccgagatcgcatcactgcactccagcctgggcgacagagcgagactccgtctcaaaaaaaaaaaaaaaaaaaagaaagaaacaacaaacgaccaacattaacgttaaaatagagatcacaagactgacagaacagactctttgtgacaattagataccaaattataaacaggacctaaggccatactaggcaagagttaaatgactaagtgcaaggtttctctttttctctaccagctaaaccagcactggcctggagataaacacaattaaaacagttacaactctctgccagatgcaggctaactgacctgttccacaagcctaactatggctttgattagacaagagactgatttctgtaactttctcctgttaagagacaactaaccatgcatccatgcattggttctggctggctttttcttttctttctttcttttttttttttttgagatgaagtctcgctctgtcacccaggctggcgtgcagtggcatgacctcggtcactgcaacctctgcctcccggagtcaagcgattctcctgcctcagcctccagcatagctgggattacaggcgcgtgccaccatgtcccgctaatttttgtatttttagtagagacggggtttcaccatgttggtcgggctggtcttgaactcccaacctgaggtgatctgcccgccttgacctcccaaagtgctgggattacaggcatgagccactgcacccggcctgggctaattttttgtatctttagtagagacggggtttcaccttgttggccaggctggtctcaaactcctgacctcctgatccacctgcctcagcctctcaaagtgtttggattacaggctgtgagccaccgcgcccagcccagttctggctggttttacagaggccaagcacttcaatacctttcccgtccctgattcactttctgatgtggagggcctgattataatacttttactttatttattttttaattgttgttttttgagacgagggtctcactctatcacccaggctgaagtgcagtggcatgatctcagctcactgcaaccttcgcctcctgggttcacacaattctcccacctcggcttcccaagcagctgaggctacaggtgcatgccaccacgttcggctaattttgtatttttagtagagatggggcttcaccatgttggtcaggctggtctcaaactcctgacctcaggtgatctgcccacctttgcctcccaaagtgctgggattacaggcatgagccaccgcgccctgcctgattataatacatttaaatgttaagtcgccaccccaaatgaacataggtcatatgcaacatacagatttgttcactatgtgtgtaagaccaccttcatacatattaatagctccttccataagttaaatatgtttacttggccaactcctcaatataaattcttgttgcacccttccctctctcaaagtgcttacttttgttttttttggcccgaggctgcacgtcctgcctacagcttataatccccttcttaagaaataatgctctcctttctaaatttataaacggtgtcatttttaagttaacactatcttttgctactaccaaaaatgtaggacaggaatttttattccacgccaactcttccagagtcttgaagtcttcctgcagattgttaatgaacaattatagcaaaaaatgaatgaatgaattaacgaatgtataagtggatgaatgacgaatgaaccaacaatgaatgaatgtagagaaagcctcaagggggcccgagggtacgctgtgctgcggagcatgcccaccaggtggcgatgccagcggcgggcgggcctggccggattggccgcgccgctcttgccgtgggtgccgacggcggcgccgggacgggcgtggggggtagggcgagtcatatgatccgctcggcttcctgggtctggctgctgccgcccgccggtgtccgcccgtgtcgcgccggggcaccaaggagccgttggagggtccgggcggaggcccgctcgtgtggaagtcgtcgacgccgccgctcgtccgtcctcccgtccg

SEQ ID NO: 28907 - DNA, 2300 bp, Homo sapien
ttcattccagaaggaaacactttctgaacctagaccctaatgcctaggctatgccttgcagggcactaatgtcaaaactattgcttttgggtggcttggaaagagcagagggacctgtctgctcaagggccagctatttgaagtgcaaattgccctaaagtgtagtaactccctttctgcctagagccaacaggctctgagaattgagcccccaacctgatttcttccattatggcttgtggaataagctttacagttttctatgaagattaaataagcacacatgtcaaagtgttttgaaaaccatcagttttactatgaaaagcatctttcaggagttggatggttttctctggttattaaaagatttatttttataagagtttttctctaacatcaagacagaagctgtcctcaatgtggcctgcagttaaccaggtcaaatttaagttaaaatttgcaataaagtagccccggaaggaaacatgcaacatgcaactgaatattcacattcagtttgcaagttccaggaaggcagaagttcaggatcaagggctggagctgggctgccagcacagtccctaggcatccttcacagaggggaaaaagcagaagctgtgtagtctaaagaccctggctcaagctgtcttcgtaatctttttgctgcttgggctgctctcgatgtctcaatgttgggaaagaacaaggctcagccaacagtaaggaccttcctatgtgccagctaccatgtgctgtaatcaagtgttttcttagttccccttacacctcctctgtatttcagaaagtcctctaccctgaaaatgtgatgagagtgccacatgacaacttaccttcttatgcactccattggtcggccattcagccaatatcagatttgggggtctagtcaggtcttgcttcccaagcttttcagaaaccctgatgaaacaggcatagggtctaaacttagggagggcaaaacttacagccaactccaaatgcagcaagcaaaataaataagcgcctaaaccattgaatctttatgtgaaagccatagccctttagagctaacatttgcaatcttcttaattataggaagtagatacagaggggtaaagttatttaactgggaatctaccccacacctcaaaggttaggtcactaattgcgggtgcacaggagagatggtaggatgggagggacaggagaagacatgtttagatatatctggtaaataatttggtggtggtgggagccttcattcccacccccaacccgccccccccttttaaaaaaatcctatttccgagacaaaagcaatataacataactttgtatttcctgaaacttccagtttctaagaactgtccaagagtacttacacgcacattcccgagaccgttggagttgttcgataggtctagggagggatctggggatacgtgttttacaagcaccatgagcgattcttcaaagttgggtgtttgaatcaaaagagcagaattcatgataccgttttgtgcactccttgagctaaaaggtagtatcccaccctctccataaacagacacctaagttataaaacttatgcgctcgatatgcaaaaatagctcgttttatacagaaacgatcctttccttcttttccttatatatcttttaactgtcatcactcctaacctagacctagagtggctttttccggtcctagctctgccggacacacgctctgcccagagacccgatccacccaaggccaggcggtctggggtcacgtctgtgtccagcgtccggcgggcgctgccgtgccgctctcccattggctggaagttccctcgcgggccggcgcggctcctgctcgccacgccagcccatcgggctacggaccgcccaggggggcggggcttgggagttggggcggggcccgggtgaggggcggggcctcggggcgtcgcggacgtcctggcggcctactgcgtgggagggagtcctgggccgcgccccgcgaggccgggcccaggccgggccaatcccgggccactgggcgggcgaccgtggggcctggccggcccgccggagagcctgggggttggggacgatgggctagttcctggtgcgtcacgggggagttccttaaaggggaagcgagccgggctacggggcgagcgcggggtgcggtggtcggcggggaggcccccgcgctttaaaataatgcccgcggcgcccgcgcgaccatgcaatggcgagcgctcgtcctggggctggtgctcctccggcttggcctccatggagtattgtggc

SEQ ID NO: 28908 - DNA, 2300 bp, Homo sapien
aatattctgttgatttggggtggagagttctgtagatgtctattaggtccgcttggtgcagagctgagttcaattcctgggtttccttgttgactttctgtctcattgatctgtctaatgttgacagtggggtgttaaagtctcccattattaatgtgtgggagtctaagtgtctttgtaggtcactcaggacttgctttatgaatctgggtgttcctgtattgggtgcatatatatttaggatagttagctctgcttgttgaattgatccctttacgattatgtaatggccttgtctcttttgatctttgttggtttaaaatctgtttatcagagactaggattgcaacccctgcctttttttgttttccatttgcttggtagatcttcctccatccttttattttgagactatgtgtgtctctgcacgtgagatgggtttcctgaatacagcacagtgatgggtcttgactctttatccaatttgccagtctgtgtcttgtaattggagcatttaatccatttacatttaaagttaatattgttatgtgtgaatttgatcctgtcattatgatgttagctggttattttgctcgttagttgatgcagtttcttcctagtctcgacggtctttacattttggcatgattttgcagtggctggtataggttgttcctttccatgtttagcgcttccttcaggagctcttttagggcaggcctggtggtgacaaaatctctcagcatttgcttgtctgtaaagtattttatttctccttcacttatgaagcttagtttggctggatatgaaattctgggttgaaaattcttttctttaagaatgttgaatattggcccccactctcttctggcttgtagggtttctgccgagagatccaatgttagtctgatgggcttccctttgagggtaacccgacctttctctctggctgcccttaacattttttccttcatttcaactttggtgaatctgacaattatgtgtcttggagttgctcttctcgaggagtatctttgtggcgttctctgtatttcctgaatctgaacgttggcctgccttgctagattggggacattctcctggataatatcctgcagagtgttttccaacttggtaccattctccccatcactttcaggtacaccaatcagacatagatttggtcttttcacatagtcccatatttcttggaggctttgctcgtttctttttattcttttttctctaaacttcccttctcacttcatttcattcatttcatcttccattgctgatacactttcttccaggtgatcgcattggctcctgaggcttctgcattcttcacgtagttctcgaggcttggttttcagctccatcagctcctttaagcacttctctgtattggttattctagttagtcattcttcgaaatttttttgaaagctttcaacttctttgcctttggtttgaatgtcctcctgtagctcagagtaatttggtcgtctgaagccttcttctctcagcttgtcaaagtcattctccatccagctttgttctgttgctgttgaggaactgcgttcctttggaggaggagaggcactctgctttttagagtttccagtttttctgttctgttttttccctatctttgtggttttatctacttttggtctttgatgatggtgatgtacagatgggtttttggtgtggatgtcctttctgtttgttagttttctttctaacagacaggaccctcagctgcaggtctgttggagtaccctgccgtgtgaggtgtcagtgtgctcctgctggggggtgcctccctattaggctgctggggggtctggggtcagggacccacttgaggaggcagtctgcccgttctcagatctcctgctgcgtgctgggagaaccactgctctcttcaaagctgtcagacagggacatttaagtctgcagaggttactgctgtctttttgtttgtctgtgccctgcccccagaggtggagcctacagaggcaggcaggcctccttgagctgtggtgggctccacccagttggagcttcctggctgctttgtttacctcagcaagcctgggcaatggcgggcgcccctcccccagcctcgctgccgccttgcagtttgatctcagactgctgtgctagcaatcagcgagactccctggggtaggaccctccgagccaggtgcgggagatagtctcctggtgcgaggatttttaagccggtcggaaaagcgcagtattcgggtgggagtgacccgattttccaggtgagt

SEQ ID NO: 28909 - DNA, 2300 bp, Homo sapien
gatgatctaacacacaacttaaactatagtgcaaaggaaacaagaaaaacaagctgtattcaaagatacagattaagtactcagagaccctactggttgggatgtcacacaaacatgactccattttcccctacagcattcctgtattcttatataattgtttttttgtaaacttgcacaagttacttaagctctcttaattttcatttcccccattggtttcctggtcaagttttaacacacagtaggttctcaggaaatacttgttcaaaggccgggtgtggtggctcatgcttgtaatcccagcactttgggaggctgaggtgggtgaatcacttgaagtcaggagttcaagacctgcctggcaaaaccctgtctctaccaaaaatacaaaaatcagccaggcatggtgcctgtagtgacagctacttgggagcctgagacaggagaaaggcttgaacccaggaggcggagtttgcagtgaaccaaaattgcaccactgcactccagcctgggcgacagagcaagacttcgtctcaaaaataaataaataaataaatacttgttcaatattcggatcaatatacaatatggagtattaaagataagtatattccggatactctatatgtatggaaccacatgagcttaagtgcagaggtccaaataagaatgtccgtcttattctctgtacttaactcgtgtggtaccatacatctagagtgcccaggatatactcatctttttctctagccatctatattatttttctattgatacataataaattaccacacacgtagtggcttacgacaacacacatttatcatctcacagttttcatggatcagaagtccagatatggcttagctgagtcctttgatcaaggtctcacaaggctacaatcaaggtgtcagctgggtggcgcttctttttggagctcagggtcctattccaagctcacatgatggttggcagaattcagttacttgcagctgcagagctgaggttctgctttcttgctggttgttagctgggagccactcttagctcctgcaggttcccacagtcccctatcatgtggctcctttgtagcccacctcacagcatagcagctcacatcttcagggccagcaaggcagggtctgtcatctcatccttgtctgcccacagtcatacatctatatctatgtctacatttatatctgtatctatatatacatctatatcatctatatatatctatactatatctatatataacttatacctcaagggagtgacattccaccgtttttgccatattctatgggttagaagcaagtctcaggttctgttcatgctcaaggaatagggatcatcaacaagtatgactcaactgggactccccttatggtatattcgccacactgtacaagtcctattgacttcaaagtcaagctcaagttacagtcttctcctttgatctcctagcactagacactaaacagagcagaactaagaatttatccagggtggtgtttttttttaaatcatttctcatgtcctgtaacacacacacataggtgcaggactaaatgctgaatccctacggcttgagatcccctgaggctgggatcttgcagctatctgcaatctttatctgtcttttgacacactctccaaatcctcaacaaattatgctaaattttctgcacagacacttagaatcctcacttcttccccatttatgggtcttcactctatttcaaacttcaaatatatcttgtgtctgaaaaaaaacttttggctgtgcttcatgcttcttgtctttgctaactccacaaacccctacacatgctactctctgaaactgtcaccacagtgattatgcgatccccaagacacaggccagatgtcttccttacttgaagcacttaccggcacttatatatctcatctttcaacaagtacatatataaaggctgagaataatttgtgtattattttttgtttaggtaacaaattaaaaaattaaaatatcatatcccaaaatggaaataaaacagatagaatgccgagtatatattaaataaggcaagctatttatgatgaggtaaggagagtatataaagctttatttttaagatataaaaacaatactagtttgaaactactttgttttatttttagtttttctgaaattaatatatgtaaaaaaattcataattttgtagataagagtgtggagcacaaaactatgcaacaaatgggcgttacctactctcaactgtgatggtttccaaggccgcctgtgtagt

SEQ ID NO: 28910 - DNA, 2300 bp, Homo sapien
cattgcgcacagagtagatttgtatattaattacagcactgttttctggaagctgactagaaaatatcttgttttgacaaaatcagaatagcacaacaattttccaaaaaagaaacaaagtattttgtggaaggggcccctttgtatctgacttatacagagatggcctatgtggtagtgataaccctatgtctccatcctggctgccccagcgaaagtccagggattatccctgaatggctctggttggactttctgcccaacctggaatagcactacagccagaaggatctgatgttctgattagccaagacttgatcacaggcagtgggatcagttctcctgaaaccatgaacattgaaacaagtaagaggggcatatccaaaaaaaaaaaaaaaaaaaaaaaaaaaattgatgggatgtccctgacaggaaaaacaacaacaacaacatcgacaacaaaaaccaaaaaccttctataccaggaaaccatcatagtgttctttgaatatacaaaaactggtctacacataatacaatagaaaatattggcctaaaaagagcaccatggccgaagggacatgacctattttaacagatgatttgagagttaaaagataacttggagggcatccaattcaatctcatcattttccagatggggaaactaaaacccagacagaggaacagaagtgctgagagcacacaagtattcggtggcggagacaaccaactacgtgccttttgacgttttcccccctacgatgatgataggtttcttcgttacattgccaacaaaaacaaaaagtatagtcttgtttctggttttctctccgccctaaaatctgtataatatgattttgctgccctccaacagaaagcctcaggaagagatggtttaacctccttaagtccgctcccatccccaaggacagacattcactttccttgaattggaagtagagccacttgttgctttaatgggccaaatgcggtctggacctgcaggaggagacgccgctcataaagagcttctcaattgcactgcaacctgtactggcatcctgactttgcccccaaaccccagccagagaaagacaaagaaaggcattcccaatcaatggggacacttgtgcctgccccctctttcttcttcctgccatcacctctttcctgctctttcttactggcaaaaactgccaccaggtgcaccagatgcatctctggaaataggtaggagggagtcttacacctgtcagtgctagaaagtgcgctctgcggagttctcagttgttccctctctgcaacgaagtaaaaagaagggatgcgtccgaggtttttgacacagacatgctggggaaacgcgtcagttcaaggagctctgactctagtgactactgaagaccagtgatgcactcccatgcctagcatctcctcttgacttctgtttccctgcagccaagctcagctcctggccctggaaacccctttgggtaaagcgtctttaagtcaagaatcaggctcctgtgtgcacgtgtggctttcttagcaaaaaactagcacaggcggctcaggagtagagtctagctagggtcttcccgcgcccctccctcactggtttctctgcccctgcctcgctttctcccagagctaagagcctaggctccggacctagggtttgggagcagtcagcacgacgtcctcgccccatcccgcggctgatgacacccgtgcccagaacgtgggtgtgggtagggaggcttccacagtgagttagggtcgagagctaggctctcgcttgctccccgcaatccctagattccctggggaccacgaaactcccattccgaggaaacctccccccattccccagccgcccacccgtttcccccccttacctcagcacgcagcccctccctgcgtgatgatgcaaaccagtggggagggctggcgctgggaagggtggggagagaaggagagccagcgagggagggagggagtgggaggaggaggagagggagccgaacgaccatttaaagcgatagcagtccctgccctctccccagtgctgggctgttggagagagcgagcagcaagccggtgagcgcgagcgcggcgcgccggccggctaacccgagagcgcgaggcgccccaggctggcaggcgccgcgggacccctcaccctctctggtcgcccctccccggattcccccaccctccgtgcctgcaggagcccctgggctttcccggaggagctcgccctgaagggcccggacctcggcgagcccaccaccgttccc

SEQ ID NO: 28911 - DNA, 2300 bp, Homo sapien
gacatatagtaaaggcagaacctcaaatcagcaagagaaggtaaactgtcatgtattacaataactgcatagctatatggtaagagataaaattttgattcatttctcacattgcataacaaaatacgttccaagtgagtcaaatatttaacttaaaaaattatagagtactaagagaaaacatggatgaaaacttctgtactctggaagtgggctcatttttttctaaccatgattcaaaatccagaagtattaacagaaaattaaatcaatgcattttattagaaagaaatgaataaatttttatttggaaaaagatacctaaaggaggtaaaagaataatgacaaactgggaaaaatatttgcaacttaatctcaaagagttaatatatctaattaaatttaaaaagagaagagaatggccaataactttttatcagaatggcttatttatgaacagtttacaaaaaaagaaacaagtttcatctttccacatgaaagaagctcattttcctttataacaagaaaaatgcaaataaaaatacactgtggtagcctttctcacgtacctgattgacacaaattaaagttcgacagcatactctgttgctgaggttgcagggaaacaaacattcaaatccattgctggtgggacagcaaaatgacacaacccttttagagtggaatttgccaatatatataaaaaatacacatgaatttaccctttgacaaaactcctccacttctcaaaattcttccccaaaatactcaggcagaacatgaaaaacacatacaggcatatgcagaaggctgttctatactttttagactgttagacatgattgttattctaagaatgttatctgtatattatgggataaagcaaatgaataatcataacagtatcattaagaaccaagattgtcctcatgagagaaaggaagtagagatttaagagtgtcaaggttaagcaaaaactctgtagtcctgaatttgaatgggaaatagctgcataaattcatgataaattttatctttaaaaaaaaatcctatactatatacactgaaaaaccctagatcccgtgacaggcagtgagcataaagttgatttggtatttaaatgagatacatataaaacacaactctctggcatatgagatattaatggtgctctgaaatggaaaaatacaaattcaagtaaatttgggaaattctgaatttccctcttggaggttacattttatgttatatgttaaatgttctggaaaagtcagtgaagcaacctaaaacattttagcacagtggctgtccggaaccctttgtgtgttttgcaggaaaaggggttgaggttgtagaactcttattgtgaggttgtagaactcttattgtttcttcactacacaaatgtgccgtaggaaacaatttggaaaatattgctgtgaaagtgaaatgcaatttgtggataattcttcttcatagagggacaagaggtctagagagagctactggtgtcgtgtacttaatgaatgcataatttaatgcaacaagtgttatttagtatctactggatgctaaaggctatgttcaatggtggggatccaaaggtaaaaacaagaaaaatgtcttggacacctggtagagcattaaaatatgattctatattgacagtgctataagcaagatttgaaatgttttacgggaatgttgaattgcgactgagcgcctcggtgtgacaaacagttgggaattaagtatgatggtgaaagcaaagaggaaggatctccctggcaaagtaaacagcatgagcaaagatagtttaacagcaacaatagtcacacctatctggaagaataaaggaaaataaatgtgagagggtaggcagggtccaggtaatgaaaagaatgtgggctttggggtctgacaagcctgggccatcatcattgctctacctgtaaatgacctttggaaggtgatttaacctctataaggctcagctttcccactggtatcataaggataaaaaaaattacctcacaaagtgatgatgacataaaaatcccacatccacagctttcaacacagtgtgggcacttagtcaatatcagttgttatcattattaggcagatgggagcaaaatggtaaatatctactgtgaccagtgaaagggatctggatttaatctgtagtcagcagacagccattgagggactcttagtgtaggaatgatgtgactagctctgtagtttgcaaaggtgaacgtggaggaatgaatggatgaaaggagacattgagcattgca

SEQ ID NO: 28912 - DNA, 2300 bp, Homo sapien
taaaaccacgtcaaccaagaaccagcagcaaaaccttgggaatctatttgtcagaagtacccagctatgaatgggatggctatatccagaacttaattctgtctggtgtcacttaattctgtctggtgtcacttgttttatttttccttctttaaaggagtggttgtcaaagtaggtttctaatgttggctggttttactttaaatttaccactcactccaagtgggcttctgatgtcactccatgatcatactatatttctagccctgcatgcttttattctctaggtgatgatttcatccatcatccactgtcccctctcctcaaaagctcaacatctccttccctggccttcatttactccatttatatctcatagaacagaagtttctccaccagcttctaaccccacattcacccacctacccatacctgtgcctgctctgttttttcctcctgctaatgtggaggaaaggctcatcttctgttccacgagctctgcaagtttcacttgtggtctagagctcctctactctgccctgttcaagaatatcgttccagcaatctccaagcccaccctgcagcaacatttgtccctctctactggatatccctatctatatactaatgtgctgttatttctcccagcattgaatttcatttatggaccccactttcctcatgatctaaaatgtgacttccctgcttctctgtagtgttggatgtctacatcatttctaagaacagtgaattactgacttaagtgcttttgttcctcatttagaggctctatctttggtccctgtaaatgttctttcttgccactttgaggagttgtatgagggatgcatgcagcagtagaaagttaagtgtataaaatgctacagtaactaaaacagcatgatactggtacaaaaacaggcacatagaccaatgaaacagaatagagagcccagaaataaggctgcacatgtatgaccatctaatctttgacaaagctgacaaaaacaaggaatgggaaaaagacttcctatttaataaatggtgctggaataactggctagccacgtgcagaaaattgaagctggacccctttcttacatcatacagaaaaatcaactcaagatagattaatgacttaaatgtaaaactccaaactataaaaaccctggaagacaacctaggcattactatcccggacataggaactggcaaagatttaatgacaaagactccgaaagcaatcacgacaaaagcaaaaactgacaattgggacctaattaaactgaaaagcttctacacagcaaaagaaactatcaacagagtaaagagaaaacctacaaaatggaagaaaatatttgcaaaccatgaatgtgacaaaagtctaatatccagctcctacaaggaacttaaatttacaagaaaaaaccctattataaagtggacaaaggacatgaacagacacttctcaaaagaagacctaaatacaaccaacaagcatatgaaaaaaagctcaatatcactgatcattagagaaatgcaaatcaaaaccacaatgagataccatctcacagcagtcagaatggctattattaaaaaagtcaaaaaataacagatgctggcaaggttgcaggaataaaggaatgcttatatactgttggtgggagtgtaaattagctcaaccttagtggaaagcgattcctcaaaaagctaaaagtggaattactacttgacccagcaatctcattactgggtttatacatggaggaatataaatcattttaccataaagacacatgtacgtgaatattcattgcagcactattcacaatagcaaagacatggagtcaacctgaatgcccatcagtgacagagtggataaagaaaatgtggtacatacacaccatggaatactgtacagccataaaaaagcatgagtcatgtcttttgcaggaacatagatggagctggaggctgttatccttagcaaactgatgctgaaacagaaaacagaatatggtgtgttctcacttataagtggaagctaaataataagaacttatgaacacaaaaaagggaacaaaagacactggggcctacttgggggagggtgagaggaaggagaggagcaggaaaggtaactattggttactgggcttaatacttgggtgatgaaataacacacacagcaaagccctgtaacacttgtttatgtatgtacaaaagtttcacatatacccccaaacctaaaaaaaaaaaaaaaaaaaaaggaaagtgtgcttacgagctctgtgagtctg

SEQ ID NO: 28913 - DNA, 2300 bp, Homo sapien
actcagaaaactgaaataatctttctaactttttcttggaatattgctgatccttgttttgttctcagagtcatggaaacatattttgaactatttacagcctttaataactaagtaagttatactcctatgaacaaaatttggagcatgtttatttctctctgcctggttcctctagaatttggaaactatctgtgagtattcttaacttatgaccatatagttctttgcatcagtgcaataagaatccatttttgttttgcaacaggacacaattggagaaactggttattttaccaaggctttgactggaagggtatgcttccctttaaggagtcaagctcaaattgcagagccaataaaaggcccttggggaaaaacaaattggcctcatactcttgcctatgcagtccttgtacagggttcctgacctgtggtaaatacagaatatcactttctaacagacctaggtgctccaagttcatcttgggacattaagaggagaggctcacccaactcacaggtatttgaggataaaaacacatcactgggctcagctttaaaaggtttcatcaggctgggcgcagtggctcacacctgtaatcccagcactttgggagtccaaggtggtggatcgcgaggtcaggagatcaagaccatcttggctaacacagtgaaaccctgtctctactaaaaaatacaaaaaattagccaggcatggtggtgggcacctgtagtcccagctacttgggaggctgaggcaggagaatggcatgaacccaggaggtggagcttgcagtgagccaagattgcgccactgtactccagcctgggtgacagagcgagactcggtctcaaaaaaaaaaaaaaaaaaaagaggttttatctgtgattccttacagcacaaagttccatcaaagccaatccaaaaggcttatgtagaaatagttattctggctgcattttccgcaaataatcaggccaagtataagaataaaatctatttttcaaacaactcagtcttatcatgacttttttttttataaaaatgaggactggagagattgaaattatgtttcaaatctcaacataagtttgtcattaaattctaaactcattagttttttacatttttgcctacatttttatactaaccctgtttgttcctgtgacccaaccagcaatctctcactacagctcagaaagaaaaagaagaatgggtaatgtgaaaatctggatcaatattctagttctgagcaattatcctgcaaatcctgccaggcgatgggaataaataagatgcccatcacttggaggaatccttttggaaaagtaagaccaagggagctaacaaaagccaaacacaatgcacctaaatcctagcaagcataactatagctaccagttatctttatgtgtcacaagacatccttttctctcccttgttggaggaggactcagttccacagtttcaccttagcatttggctatgataaggagttcatacaaccccaccccttgagacatatttttgtcccaaactcaattccaagcttccagtcaaagccctaggaaagaaaactggatctgaaggatccagaggcagacaatgatgaacgttaaaaggcacagcccaggtgagtatggctattcctgccaattaagccaagcttcccatttcacggataaaggccatgctagtatccatgggcataaatgaggtataggtaattcaaggctactgacagcagggtagacagggtgtatgtgggtaagagtgaataattcccacctccctccctgccctgttaacatgggtgaaagccattttaacacccatggtggcacttgccaaggttgccaggacttggggatgtaaggacagaagagggaaacagatgctcttccttctctccctcaggtaccctgggtatctgctagaagaggaagggaatcagagatgcctgctctcctctttctagaagggtagccattcatcttcagtctgtacccctttcaaatgcatcctgaagccctgggactcctttgaaaaaaattccttcttttttccttctctccttctctgtcttctcttcacagataggtaattatgtcttcatactatgggacacttccctcagatgcatcctctaaactggaaagagttaatttcccaaagcttaaactggttggcttaggattgggctcaggggaagagaacccagaaactcaacatgctgacaaaagggtgaagttttttaccagtcggatttttggcctccctctctctgtgaaaaaca

SEQ ID NO: 28914 - DNA, 2300 bp, Homo sapien
ctaggtgcggtggctcactcctgtaattccagcactttgggatgccaaggtaggaggatcacttgaggtcaggagttcaagaccagcctggccaatatggtgaaactctgtctctactaaaaatacaaaaatgagccaggtatggtggctcatgcctgtagtcccagcttcttgggaagccgaggtgggagactcacttgaacctgggaggcagaggtcacagtgagccgagatcgcgccactgcattccagcctgggcaacagcgcgagactctgtctcaaaaaaaaaaaaaaaaaaaaaagaaaagctaaaagtgatttgacatgttcccagtacaaagaaattataaatgttcaaggtgatggaaatcctaaacaccctgatttgatcattacacattgtaagcatatatcaaaataccacatgtacaatcatgatgtatcaataaaaaaaataaaagccagaacccaacctctattcatttgccaaatgtgtactgtgcctataccacatgctaggtgtttgaggacatagctgggagcaaacaaggcaaaaatcaattatagcagaaatctgtgaaaaaagaaataggtcatccctcatcttggaaaagataagccacaaaaagccctttccaggaatatgtaataaaaagtcacaattcaggatccctggctgagatttgggatgactggagatgatgataagaactaaattggaggaggctttcaagaggaaaaagcctccagcaagagacagccccacagtgggaactgcagcctccccttctcaccaaatccctcccgaatggtgtacttcgggaccactcttcagtctctgtgcaaccgagttttattttagcccacgggaccctggtttttctggcagggggcactgcaaagacgggttacaggccgaacacctcacaacagagacagcagtattctctctaggataaaaagggcttgtgtttaatcctctgtcagggcaggggggaaatgcctctggaatccaagtctgtggaaccggctcagcagagagatgtggctttataggcaaacaacgtggcatagagagaggaacctggccaattctgtcttataagagtagttatgttatgcgttgcaaggactccacattccatggatttgtgaactcagatggaatcttgtttgtccaggcctgcatgaccccatttatctaaaaattactaacttcctagtttatagtttacaatcctgtgcccgccgcctccctccccccccccgccacgcccccatgagctttctctctattactctcagtctctcaggttaaagccttgctcagtaattcagctgtggaccagttattctgattatttcctcatctatcgtcttacagtcataataataataatatctgagataatatgagcatacaacaagacagtatgtccacaggagcatctctaagatcaggacagtgatttcttgctcatggaataagaaggatttatgttaaagcaagttataagaaagcagtttaatactttacgaacgttaagtttaaaaaaatcataactcgctggaatcttttctcctctctggatattggagaactcgcccaggtttgggaaacgttagccagctcctgcaaaacacctcctccctcagccctccccgcgccccctacgaccaggcagaaagggtgggaaggggagcacagctcagcatttatttctggatccagctcactaaaaatacctcggctctcctgtttgatcactctcccttttgacctgaatggatcgcgggagccgcgccgcccgccccaccttcggcccgttgccctttaaaggaaaagggcgtggggacggattcctgccgctcgagggatagaagggagctgggtagtcaggggccgcggccatgctgacgtcagggcagccggcgctcagctccgctcgctgccacagtgcagagacctccctgagggagggggacagcctcgcgctgggattggctggcctcgcgcgagcgccggcgcggagtggctggcgaggttttagagggagtcccgctctccaattaaagcggcccagctgcgcctggctgcgcacagagctccctcccaggcccgcgaacttggccattcagccgccgctgtccccgctgcgcgccctcgcgcctctgcctgagaagccaggcgctgttcccccaccccagaagaggatggcaaaggtggctaaggacctcaacccaggagttaaaaaggtgagtggaaagctgtttgtatttacccagattcttactttttc

SEQ ID NO: 28915 - DNA, 2300 bp, Homo sapien
cagacacacaaatatcaatgctacaagttaaaaaataatgcataaaatgaagcctatgcaaacagtgtggtcttagctggacagatattctcatgagtcacccacaggtttttgagtcctgctgtgtggcatggtgtgctatgttcaaacagggatgaacaagacaggtttgccctcaaggagtccagaaaaatgtatagagaaataagagcattgcatgcataactcactactaggtagcaattaataggtatcttctaagagtctaaaatgttatggtaatttctgtaggaggggaaatgacttgattctgcaaatagcttggcaaatgcagtgaggcatgatacattccagacaaatgcccagattcaatgtgacttggtacccacatttagaaggatccactggactctgtgacagggtctgggcaggtggtctacagaagagcacagctacaaattagacagtgcatgctgtgcctctgagtggctgtttgtgtctttagtttgattctcacgtcttttgtttttccccctctcattctaccctgcaggttaatggcagatatttaaggaagactttgcccttcaagactaaaccctgtgaaatcagagtttaacaatgactgctttgggaaattaactcacagtgtcagtatccctgctaccactgccatgagggaggttaggcctatcctccccacatcagagacaaggaaactgaggctcagaaaagtgacctggtgaatcatgtgcagttaaaaagtggcagggactgagtctggatgcctagggcttgccttacagtcagctgcctgttagaaccaactctctgtgaccccgggcctcagtttcccgatctgtaaagcctaggttgtctctctgttcccttcccgttcacatgttctctaagtctccagcctgtgccttctcccagctgcattcaggtaggcaacaagtggtattggagctataggcacagccgcaggctcctgtgcaggagtttacccatgaccttctgggctccgggccagcccttcttgtaagggaaacgtgcagaccctggggacagaaatcagttcccttatgctggaactgctgccactgccaacatcaccaactaaagaaactgcgtgcgtgtgtgtgtgtgtgtgtgtgtgtgtgtgtgtgtgtgtattgggggaaacacacaaaacactgggataatagcaaaagggagactgtgagtaaatattacatgctctcaacccttacttcagccacctgaggacagggagtgaggaagctaggggtttttcctttacagaccataagatttcatatatatatattatatattatatatattttatatataatatatattatatatattttatataatatatattatatattttatatataatatatattatatataatatatattttatatattatatataatatatattatatatattttatatatatattttatatacattttatatatattgtatatatatgtaaaaccttaattaaactttaactagcatcaccaaagacataagaccctttgcaaatattttacacaacattgggtttggggtgtgtgtgcctgttagctcaaacatgtattcccaactatttgttttccatgcagttttggaatttaaagagttcccttctcattaccttttgggaagtttccgcgaacagatgggaaggggaacaagaaaaagtaagaatctgggtaaatacaaacagctttccactcacctttttaactcctgggttgaggtccttagccacctttgccatcctcttctggggtgggggaacagcgcctggcttctcaggcagaggcgcgagggcgcgcagcggggacagcggcggctgaatggccaagttcgcgggcctgggagggagctctgtgcgcagccaggcgcagctgggccgctttaattggagagcgggactccctctaaaacctcgccagccactccgcgccggcgctcgcgcgaggccagccaatcccagcgcgaggctgtccccctccctcagggaggtctctgcactgtggcagcgagcggagctgagcgccggctgccctgacgtcagcatggccgcggcccctgactacccagctcccttctatccctcgagcggcaggaatccgtccccacgcccttttcctttaaagggcaacgggccgaaggtggggcgggcggcgcggctcccgcgatccattcaggtcaaaagggagagtgatcaaacaggagagccgaggtatttttagtgagctggatccagaaa

SEQ ID NO: 28916 - DNA, 2300 bp, Homo sapien
gcttgaactgggctgtaaaggatgagtagccttgccaggcatagtggctcaggcctgtattctcagcactttgggaggccaaagcgggtggatcacttgagcctaggagttcgagaccggcctgggcaacatggcaaaactccacccctacaaaaaatacaaaaactatctggcatggtggcacacctgtagtatcagttactctagaggataacctgagcccagtaagtcaaggctgcagtgagctgtgatcatgccacagcactccagcctgggtgacagagtgagaccctgtttccaaaaaaaaaaaaaaaggataggttgcctctaagttggcaaagagaggaaggacaatggttaaagatggatacatgaatgcatgtgcaaaggccctgtggtggaagccccaccagtttattcaacacctatttgctggtgttggagatacagtggtgaacatggcccatggatggaactgaaagaaaactggtgtggcaggagcacagagcatggtgaggagggtgggcctggggcatgagaggcaggcatggccagcctgctccagttctggggcaattcaaaagactggtctctgttctaggagcaagggggagccttcaaacagctttaaggagggggtggtgatggctggacagggagatcatgagatacgtcatctcttctctgttgaaaccccagcacaatgcatgattgacttggtccactgggtcacaccatcatggatgggcattatctcccacaacagtccccatggggcaccacccagcacctgcccctgcctttctcatgtctattaatgacacccacccttgcatttggagcacctgaatcatctctgccacttgccttcatatctgatgggtcactcagtccagtcctttctctccatcctcgctttcactccatccccaaagtcatatctcaccttgaacattttctgctcagactgacaagtctccccgacgggaactcaccctctccacccaccacttccagatgaattgctcagaaacacaccctcatcttgcactctcctcttcaagaacaatcaggggctccctgttgcacacacagaaaaaaattgaaactgttttaccttgcagtcgagtttcttatttttcctgccccaaccctccttccttcctgttatcctttcagaagccaaatgggcagtttacagtcacagtgtgtgcccctgctttcctcacctctgtaccatcactcacgctgtgctttttgcctgcaattccccacactgtgtttaattgctgcctctgctggggggctgcaatagctgagtgggattctgtaccagaattggaaagatccatgttaactcttgcctgattctatctcccatgtcagcaggaagaggggctgccatccccacccctcccactctctaggaagactttcctccctcacccttcccttggggtgttttaggtgccctttatctgtaagttcataatatcccaggcttacagtaattcttccaaggcctttattgtgctataattatttattcatgaaagccttcccctatgaacttctaaagaataatcgtattatctttatttccccaactcttagtacaaatcctggcaactaaatgaaagaacaaacaacctggggttctgggatggttcgtctttgctgatggcactgtgttccaaaatggccaaggtcaaatataaaaatttcagactgaggtagacactgctggcagcctacacattgccaccacaccccacttccttcttcctagtggcaaggaagcagtgggtggagagggtgagttcctgtcagggagacttgtcagtctgagcagaaaatgttcaaagtgagatatgactttggggatggagacaaagggaggatggagagaaacgactggactgagagaagagcccactcccctttatgtaaattggctttgccaacctggtctgcagctggagaaaggccatgcgcctctattaccagccagtggggcttccgccttaggagggtcttagaaaagtgtttttccttaatgaaaggagatactgtgcagtaaatagccctgctgttgttttcttttcttttgatagaatgtcaaacttacgaaaaaagttacaagaagagaacaaagagctattagagggtgttgctgacacaatgctttatcactcttgaatattttcgtgtgtaattcctacaaataaggacattctcccacatagccacaatacaaccatcaaaatcaggaagttaacgctgatgtgtttctaccatgt

SEQ ID NO: 28917 - DNA, 2300 bp, Homo sapien
aatacagtctctggtaattttaggaggcagcttttctggtctaggactataagacatgggttgtacctttttactcctgggcatgagttcctgtggacccccgtccacaggggcaggattgagatcacgagtgagagccctggtctggggccacatcgccatcaccacccctgacccagtgctgagcagctgggactctcccttggtacccaggccagctctgctcccagaagtcttgttcatagaatgcccctgccctccacgactagggatggaaaattgatactagctttcaggctctcagtgtatcttggtgagaaagggtgctggacttcttggcaagggccaagctgccgttagctgtggtgactgacgggggatctcagtgtttttcacacatcccgtggatggaggcacagccaccggaatgcagctttcccagctaggttagccctggcctctaggggcccatctggtctttcccacaggctgcacacttcgggagggggatagtggttccggtagcccctaataggaagatacagcatctactttggggagtgagtaagaaataaaaagcttcagtgaaattgttacagcttagacaggatccccaggctctcctgaatcagtttccagagtcccctctcatccattgtctcatttgctcctctcagtgaccctactccctgagccctgcttttagggaaaggaaatcaaggccctaaaaaattgagtgattttttctccccaaagactgcgtagcaggttaggtattttgtgctgtggtcattgctgggaaaatgaggatgaataaaacattgatctacctttggggtactccaagtctggtgggggacacagaccccacatggaccttttacaaaggattcttaagaagccgtttggcaaaacaacagtggagaagtggagtggagtgccaaggggcacaggacagggagccgcactcaggcaggctttggagacggggaggtctaagctaagtctggagggggtgcccagtggtgccgctggcagaaccagccccagccagggctggggaaatggcacagggtgtgtgagggtgagtacaaatgtctgtatcatgaagccacagggcacctctgggaagcccagtccctgtgtggccctgtcttggcatgacagcactttctaagaagcattaatttcatatttcaaataattgaaaaatattgacaaataacaatctcaaataattgaaaacaaaaattgcaatatttgctgcattcttgcttggcaacccagggtggcctacataacttaaagcaaatcttctcccaacccttcacccatttctcttgatgttggtctcacggcatggtgaacatttgcttccccaaatattttttcaatggctcccaaaccaactattcatgcttctctctccagcaggcttgcctttctccttccttctttctttctgttctccttgtctctttccttccttttttctctgtgttctttttccctactgttgccgtcttccacagttagctgccttaccttctctcaccctggtctgcacatgtaggaggcttttccttggcatgtgggcagatgagaatcctttcttcctctcttgtgggtaagggcatctaatgtagggaccttacctgccaaattcaggagcttggatttagctgtgggtaatagtgagtcactgcaggggttaggtgagggggtgatatgatcaggttttctggtcttgctaggaagtacttgaactactgtgaccaattatttgtttgttctttgtggcaaaaacagaacttctttcttttctttctcttaggatcacctgtcattctcaagttgtttttatttgtgataaaatatacctgacataaaatttgccatcttagccatttgtaagtgcccagttcagtagtattgttcattcacgttgttgtgcagccatgaccatccttctctggaacccctttcaccttgtaaatctgaaattctgtctctattaaataattccttattcccttctccccacagcccctgtcaaccatcactctactttgtgtgtgtgagtttgaccacctgaatctttttggcaccatctcaagtataattcaaatcacgaggcatttgtgcatatcgacaatacacccatcgtggtaggtttgctgttcccctaacacttacgtgtgcctgttggattcccactctttgtttaagtgttgaatgccattcctttcttatacgagacaggggcccctgtccaaaaggggccctcacacctgtcaaag

SEQ ID NO: 28918 - DNA, 2300 bp, Homo sapien
cccactcatttccatcaacagcagggaggaagaatgactgtcagatgtcaggcacatagtgggcgcctctcttccctgatcccaacctcctttgatagtaagaggcagggaccagtactagcctcacactgtcgtgggtcccagagctaatgctgcttgttcctgctgctaccacggatgttaggtgttgatgggtacattacttgccccgagtcactcaagcacactgttgcagacagcacttctgtacggatgccgaagcaagatcagaaaggtctagctgttggtttgtttatcttccatgcgttttaagagctttttattaacttactattatgtgatctaagtagcgtgcagaaaaggactgtcatttctgctgatcagcacttcctggttacgaaaatacagctcagcgttgtctgcatttttgcggcctcaagatttcgggtccttgtaatgcttaattctcttcaacattttgttcaatttgacatttaaagaattttctgtggttgttccttttaaatgctgaggagggttttaggtaagcatatattgcgcttaaaaagtactcaagatgtaatagtggtatattgttttagttaagttgcaagcattttgtcattaatctatcatttatcatgttttggctcaaatatatacacacatgcaaacacacacctaaacagatacagcaatggatgctcacacagatgtttagggtaaaatatacacgcagagaaaggcatacaaattcatgataaccccatttaccatggggacaattctataagggcttaaaatcattgcttcatgtataaaggcatcaaaagaccacatttgttcctcaggatcatggtcttccttgtgtatacacagtaatgaaacttatatgactctcaagtatcagaaatccagtgctcctaccagccataaaaatcgatttgtgaggactgagtcacctaagaagcatttgtgaaattgtgaatactgctgaaggttgcacttgcatgctgtcggcgatgggcagtcagtgacgagggtgaaggcagtagagagaataaagacacgctctttatggagcagctgggagccatctctgtgcagtgtggccatcccagacaggccgacatttaggacactgacaaaatagtcctgatgcttcccctggtgaaggcaatcccaggttgtcattgaggaatatcatggcacatcccacgtgcattgctgggatggggaagtcaaggcgtagggcagtttcatcaccctggccagagaaccccaggttcagctgcagaggagtgattgccaaggatgcagtggagggggtgggacccatagagcctcggggaccagctcacaagttctgtgtttagactcatgcagaggaggatgatcttccaagggctgaggttgaaggggtgtcaaactccaatggaaaaggtttaggaaaagaccttttacaaatccaaagatgtttcacagtgggcgaggctggtgtggcgacagtagtggcccacatggctgggttgggagccagctctgcccatgaggtgccgtgtggctttgcagtgtggcctcacaatcccagctttgtttcttccccagggagatgaggctggtgatgctcaagatctcagaggccctgcccaggctgagtatctgtatataatatcccccttggggaggtaaccttcttgtggttatgacctttttctgcatgcgccctacaatacttaggagtctgcctcctacagctgggcgatgtagctcagttgtcaggcactctgactagagagtcagactgatgagggtttgaatctatcatcctgctcagaaaaatgggcatgataccagtgcccctctcaaaggggtgcagtgaggacatgagtaactagaagcatccataagagcttggtcagtagaaggctcttgtggaagaggagctcccagaacccggtggattgggtgcagagcagctgctatgatgaacgatatagatgtttccctttgttgtattccaactgggtaacaatgggcctgctgttctgggaggggcctgagggtggtccatcagagcacatcggtccaagcacactcgaagggcagacatctctttggcaggacgtctggaacatggacagggatctgaatgaagatgacagtaagtagagcctcaaagatggcacggaagactgtgtggagatattttagcctgcatttgaagaggacctaatctgacctctaatatgttggaagttatgtatccatagtcttttctaataagctctgtagctagc

SEQ ID NO: 28919 - DNA, 2300 bp, Homo sapien
catagcaagaaggcagccatctacaagctaggatgagagccctcaccagaacccaaccatgctggcaccctgatcttggaattccagccatccaaatggtgagaaaatacatttctgtcatttaagccaccagtctgttgtcatggcagcctgagctgactaatacaagtgcctgctgtttgagtccaaatgtatcaagttcaacaggcaaaactgagccatgctgttacaggcaggggaacggttcccactgggtggggtggaagggtcgggaggtagagagtgagtaccggaaagtggcctaaagtggcttcagaatctggtcatgttctgttcccgatctgagttttggtcacacgggtacatttactttgtcaaaatgcatccagttgtgtttttaagatttgtgctttttaaaggatttgtgttataattcagtaaaatgtatacaaagaaaaataatctcattcaaaaattatcagtaaaaacaaaagtcttgtgaacaatattttagttatttctatgttattcgtattcagcccagtgcctgaatttaaaccggattgtgtgctaaatgtaaaatctgctacagcaacaacaataaaatgaacaaggtaaaactgtgtatgctgttgacacagaaagatatccatattgtattttttgtttcttcttaacaaaaaggatgagcaatatttacagcatgatttcatttacgctttttaaaaattctaagtgtatgcacacttataagcaaatttacatgtaaattgacatgtggacattggaggtggggtgaccattagtttttagtttttaatcttttgaatctttgattttttaaggattaggatatttcttttataaatataaaaagtaatggtgaaggtaaataaaagaggacaatgaaagtgagtttggagcagatgacatctgcggctcctgcctcttgctctgaggtctgtgattaacattgaccttcttcatgtccagccagatggatgaccaggtttgagttggatgacatacatctccatgtgattctcaatttagatccaaaaaggtgtccattcttgtggctatcatttcggtttttggttgtggattctctttctccaagtggatgtggagctggctctggaagccaggtacaatggcagagcttcagggcatttaggtagccgatccccaggacaaagaggagcccagtctcctccccactcccagggagatggcctgagggaaagggggagtcagtcacatgcttatattccaaaataatagacctgtggagagtggcctgaagacacagaggagagaacagttgtttctggtcagggaaatcatgaaaggcttcctagaggagggggcatctgagatggtccttggagcatgagtagaagtttgccagggagaaaatggtagaaggagaatgtttcaaatgggggaaactgtatacataaaactcgatataggtatatcaggggaaaacatgtgagggctaaggctggaaaggctgtttggaggctggctgaagatttggactttatcctagggtaataaggagccataaaagatttgaagcaagacacttaatcagatctaagtaggcaggaaaagctttccacccttcccctttctttcctctctcttatcctcccttcttgggagggggactctgagcagcaggaatagaagacagtctgggtagacatgataagcattgaggttatgccatggaaggcagctgctattagtgacacaaaggtttgcttgacttgtggatgtctgattgggaaaaatctggagatggtaaagccatttctgttactggtctataaggctactcctgatcacagagcacctgagaccctgggactgggggagattgtggtacaggtgcagagggaggaagatcagagagatcccgaggagggctctgtgtgcttggatcaaggactcaacagggaaggtgggagagttctgtcgcactttggacactgtgtgtcatcctgatcatgtgattgtttgattttccttctggggatggatggttgacctccaccgtttcctggtcatcactgtgcatgcgggacacgctgtagaacagctcacactggctggcactgctaagcaggtgcggaggggagtcagagacccccggatggaggggtgagtgaaagcctgcctgaggcagtcgccacggagatggagggaggagagattggcaggaggtgtgtgtagtgggaagagaagagacagaagttgaggataattaggggtttcctgtatgtgtggct

SEQ ID NO: 28920 - DNA, 2300 bp, Homo sapien
caaagccagggggggaataggggctggttctcagtccccgcctcccggggggtgcctccccccgctgtgatgggggtcctaagagccagggggggaagaggggctggctctcagtcccctcctcctgggggatgcctcccgccaatgcgatgggggtcggaagagcaaggggcgggaagaggggctggctcttagtccccgcctcatggggggtggctccccccctccgatgggggtcctaaaagccagggggaaaattggctggctctcagtccccgctcacggagggtgccatcccccctgcgatgggggtcccaagagccagtgtgggggaacagcggctgcctctcagtccccgcctcgcgggggtgcctcccccccgcaatttgggtcctaagagccaggggggaaagaggtgcttgctctcagtccccgcctcgcggggggtgcttcctcccctgcgtttggtgtcctaagagccagggggggaagaggggctggctctcagtccccacctcgcggggggtgactctccgccctgcgatgggcgtcccaagagccaggaggggaagagtggctggctctcagtccccgcctggcggggggtgcctccctcccttgcaatggggatcctaagagccaggctgggggaagagggattggttctcagtccccgcctcgtggggagtgccgcctcctctccctgcgatggggtcctaagtggcagggagggaagaggggctggctctctttccccgcctcgcgtgtggtgcctcccccccccacgttgggggtcctaagacccaggaggggaagagtggctggctctcaatccccgcctcgcggggggtgcctccccccactgcgatgggggtcccaaaagccgggggggaagaagggctggctctcagtccctgcctcgcggggggtgttcccccctctgtgattggggtcctaagagccatggagggaagaggggctggctctcagtccccgcctcgcggggggtgcctcacccccttgcaatgggggtcctaagagccagggggggatagaggcggagaggataataattccagcatcgcaggctgttcacccagcctgtgaatttgttattaatatcctgaaagggagaggatgatattactccccataatagacagatatgactccccataatagagcacgaggtgtacacccaccctgtgatattcttcccaatattcaaaggccgagaggttgatattactccaaatatcaccgtaagtatacaccccggtgtgagatgctccttcataatattccaaggcggagggggtgatatgacttcatgtatggcagaaagtggaaacccccagggatgttgttcccacgatcctggagggaagaagatgatattactttcaatatgacagaaggtggacacgccctcactgatattgtttctaattgcaacgtgggagaggaggatatgacacgcgatatcgcagggagtagaaaaacccctgttatactgttcttaatattcagggaggaagaggatgatattactcccagtacagacgggtgtacatccgtctgtgaaacagttcataatctccagagggggagatgatattactcacaatatggtaaacaggctgtgagtccaccgcagatcctgagagctggtggtggagtgggtgtgtggggctggctctcagtcaccacagcatggggggcctttatgttcaggttttgcccaagagtcagcttatttgcttcttgtactagcagggcagttgctgccaaggccctaaaacaggggggcaatcctttagaaaccctgtctagttgtttagagacgtaggccaccggcctcagccagggccccacagtttgggttaaaagtccagctgccatcttttctctctctgatgcatacaatggaaaaggctgtgtcagatcgggtagccccagggctggggctgccagaagtttttcctttaactcatgaaagacttgctgttgttgggatccccattccaaaggttcctggtccccgccccctttgtgacctcatagaaaggcttggctaatactgcaaagtttgggatccacagtctagaaaaccccacagctcctaagaattctctcacctgccttctgcccttaggctccgatagattgcaaatgacctgctttctttctgatcccgggctgctgagttcggacccctgttggatagtaaatcccaagtaaggtacctgccttcggcagctctgagatttcttcttggacacctaatacccacagtcctc

SEQ ID NO: 28921 - DNA, 2300 bp, Homo sapien
ggaccagggggacctggggacccaggcaagggaatggaaaagcaacaaaaaaagttacctcttaatcctaagcgacttagggacagttttctggttgcccaccatttatccctagtaacactgtgggggtgccgaaaatgtgctcaagctaaaaaacctacagttccatcatcgtttgccaagacaggagtgaccaatgagatataaacagaagtagttgggttggacttctaacaaagctttataacagagccgactcagttcgcagatgtcgtttcttgtccctgccccttcctctttcttcttatccagactcagagatgatgattggaggagcagtagacatcttgtgcctatgaggtggctttcgggctagcagaacagaaggatgggagtccagatgtctgaagacatcatggagccactataatatttctgaactacttgtgttaagtgagaaaaaaagttcctaccttattcaagtcactattacttttgcatcctttgtgttactagccaggtgtaattattgataaagcctaaatcacctctggttttccccctcctacctcaaacttcacccagctccaatccaccctccacctggccaccagggagcttcctcacacacaaatctgataccgaccctgtcctgctttgaagccttcaatggctttccagcacccctagacaaaatccacattctttagtatgacatttgggatgctgcacacccaggcctgagctgagctgtatctcctgcctcaaccccagacaccctgtgctccagccactccacacttttcaacattcctgtctataccactcctcaatatccacaatcctgtaacttgaagtgttctaggtgctgagctcctgcttgtcattcgatacctatctgcaaagccacctcccacaggaagtcttccccggtgtcctcagagtaagttactgactcctatggacttctaagaccagctctttgtaaaatatctctgatctgtggcacttaccgcacagtattataatcacttattgttttaattagtctccccaccttgactgggagcacttcaaggcggacagagccttgttggtctgtttatccccagctattagcaaatcctgaatgaaggagtgaatagacaggtaaatggaagcacagaccctgacccctgaggattcagagttgccatccttcatgctgctggagcccaggggaaggctgagttagaagagggcacagaaaaaccgagcaggtatctaagagaggtgcaccccactgatgcatgtggagtgtctgggacccaagaaaatcctggaagctgtcactagggcagggtgaagggtagcacgaacatggacttcatgttccccccaccgggcatatcccagtgcaggctccagacggcagacgaggggcagccccacagcagcttcctctccctgtttcatccccagcctggccccacaccacagtccatcaactcctgctccaggtggaaacctcagaaacccacaaagctcggacctgctccaggtcaccaagcagcagggccaggcactggcaatccaacgagaagccccactacatcgcattccagctcctgaagccattccctgggtaggagagccctgattgttattatcatctctccattttacagatggggacagagtggcctagagaggtgaagtgtgccaaaggtcacacagccagccagaggcagaggagggactaaccccacttccctccacgggcagtgcaccccaaaggagccaaaatgctgacagcagtggggcaaattccaggggccccggagcgaccgccgagttggccacagccacacgatgcataggaaacgctaggccctctgcaccctctcctgaggcccagtgccctgaggcagccccctttaaggagcgatcggccttccagaagagctccagtcttaattttagcttggaggcctgccacaggaggctttagagagaggcaggctgaagttatgtgggacagctgtcagccggcatgctgggtggggcctatttagctggcagggacataagtctggggacactgaattggtctctctgccccaagtattttcagccccagccggccacacagctcggatctcctcctgtggatccccccagctctgcgatgatggcagaagagcacacagatctcgaggcccagatcgtcaaggatatccactgcaaggagattgacctggtgaaccgagaccccaagaacattaacgaggacatagtcaaggtaggctctgcaggcctgc

SEQ ID NO: 28922 - DNA, 2300 bp, Homo sapien
aataatgtctccgaaaacctgacaagtgctgtggaactttaattatatgagacttaaatgggcgttgcatgaaaagaaaaaaagaaaaaaaaaaggtcagataggattggggggatactggtttaaacaggtttatctactgcaggacatgtcagagcctttaatgtgccaaagtctattgaaaatctctgagagaaatatacagcatttctgaaagaaccggaccacagatgctaacacccatccccatcctttcttttttaatggctaagttctggatagcacactcggaaaagacagccctaaagaagataagggcactgtgtgtgtgtgtgtgtgtgagagagagagagagtgtgaggagggaggaagtgatacatgctctttctactgcattttatttccatagtgagtccacacacgcacaaattagaccttgttccttcgtcacatctcctgagggcgaaggtaccctcatgtcaaatggcagtactgggcatttcaggggctcggttagccaaaggggaggttccgggaggcttgaacccaggcccttccctcagtggtaccctggaagggtcactgcccctgccagcccaagggtcattttcctccattggtgcccatttttgtgctcaggcaacaggagtcacttaaacatgatcttccaaggaacgtgtacggttccagcaaacaatagaatccgaagaagaaaaagactctgttcttcacttacatttggccaagtgaagagacaaccaactctccctgtgtctgtttttcagggcagtgaagtatatttttggagctggtcaggacacaaaccaatcttacaggcacgaacaaaatgcagcattccccaaatgcagccaaaaccctttactggagccaccttcctaacgccagtggtcactggtcactttcctgagtgcgcgtggagaggttggccccgggtgggaaccgcgtgctggtttatgttgttacagtacaagtgaacgcaaagacttgcagtagctgcctcttggcaaatgatcttcccccacgcccaggcatgggggcatcatggtggggctgggggagagcgaagggccattgtgcttctgtggctgggccgtcttttctttctggcttccctacaccgtgtgctccatcatggggtatggagcagtccctaaagagaaagagctcgccagcagcccctgtgaagaagtcccccggggaccagtctggcccaccaccccctgccctgccaccgctgttgccccacctggctttagacctccttccgcagcaccaccttgatgctgctgcagacctggcccagggccgcgaagagtgggttgcagaaggtgcggatgcagagtgagtagatgtggctgatgcactggatctcgatcaggtagctcttaatgcatggcaccaccgcccagatgtggcagaaggagatgcaggcgaacaggaagccccagagcagggccagtgggacgcccagcagcgtggacaacagacggtagcaccagtacttggagacagtgaaggtggtgtagctcaccttccacacgccgtcaaagctgtaggtgcccacaggctctgcgatcacgtcttcaaaatccacctgcaggggtggcaaggggaagcctcaactcacagaagccacccgcttctcaagcttttgggtgtgtgcgtgcatgtgtcagaatcccctagaggtcaggttaaccttggtggctggaccctacctgtattaggctattcttgcattgctttaaagacatacctgaggctgggtaattgataaagaaaggaggtttaattggcccatgggtctgtgatctgtgcaggaatcatggtgctggcatctgcttggcttcaggtgaggccgcagggagctttcaaccatggctagagaagggagagcaggcgtctcccctggtgagagtgggagcaagagagagagctgggcagggggtggagtgccacactttacaacaaccagatcttatgagaactctcccactattgtgaggacagcactaagccacgagggatctgcctctgtgatccgatcacctcccacccggccccacctccaatattggagattatgtttcaccatgaggtttagaggggacacagatccagaccatatcatcgccccagggattccgactccccaagtctggagtggggcctaaggctctgtatttctaacaagctccctgttgagcccaagctgctgctgttcctaggcaccgctgaccaacacaacacgctcgttcaaccccctcaaggtgagcgac

SEQ ID NO: 28923 - DNA, 2300 bp, Homo sapien
aagattacttgtaacacctaatgcaatgtcactcgtcactgcatttgtgtgcattcagtgttgtaggtggcacatgacaaattcaatttttgctttttggaactttgaggattttttttcctgaatattttcaatccatgattgtttgaatccactgaactcacagatacagggatatagagggccaactgtatgtattaagtgctggcaatgtgctaggcaccaagcaattcatctttagtccttcctccaaaacgccaaagtgattcccctgcaccactctctgagaagtatgccttttttctttgcttcctggagaactcattctggagctctgaaatccagctacctctttgtaaaacgatctcccaagtattacctcagcccccagcagtcctcacttctgtaacatcatttattgttgtcacactgcaaatattaggttgatgcaaaagtaattgcagtttttgccattatttttaatagcaaaaaccacaattacttttgcaccaatctaatatgtgtttttctccctggccgaagctcaaaggtgaaggagcatgtcttattcattgttaggagttttcaaggggacctctctatttcctgcctggtttctgcacacaatgagaaataaaacaaaagacaggaaatggggatcacactattactgttgttgttattgttgttgtttagattaaaactaagttagagaatttaccttttgcatgagactaaatagccctgttaggtgaatccagaattaggctgtctcacgggctacgcgaggaccacacaggtaggcaggcttccctacaaagggtagaagagtctgtccttggtgaagtggctcagtaaacttgctccctagaaagcagctgtcttccaggagaaagaagggcaggcttggttctacaggccagtgttttccttctcacattcaccggtcaggggctcatagggaaaaatctgccttcatccagccgtggagtgaggcaggggtgttttacctgctaggattgaaccctcagattgcacagattatacagtttcagaaaaccagagggacaggacctcagacattagctatcttgaccagtgctctcattttacatatgaggagactgaggcccaaagagaaggggcttgcccaaggtcacttcattctcacctgagtcgtctgtaactttaatctgtaattttcgaggccgataggtactattgactaatattgattaatactgcctgccaccccttggcaatgctgtcaagattcccagccccattctggaatgattactcagctagaaccctgggatccaggtgctgtaaggttggcccctgggatatctcggcatggggctgtaattgtggattaaggaaacccagtccttggctaactcaagtctctccacataataaaaagacggagaagtgaaatgtcaggaggaaatacacatttaatgcattttaaagagccctgtttatttttgaatcctggcctttttttctgacttaattcttggccactgtaaattacttcaaaaaatgattttagaatagagaaggggcagggaggctgagaagctgtctttaacattttatcttcctttggcatcatttagaattttaattccgaagcgcgacaaggaggcagaaacggctcttgggcgcagacaagcagaatcactttaaatgaagacagtgttgtgcttcagaatttcctctaaaactaccgaaaaaataacgcctctcccagcactgcttagaatagaggccatttctaattcctcattaacgggaataggaacaaaagtattccaaagcaaagacttatttgagttcactgctaaagccgctacatcaagctggaggtgtggggggagagaaaagcctgaaaattaacatcatttttgggaaataatcagtttaaatgcttttgtaacttcatcactatctacccggggaagaacattattattcaagcctcctatgtgtctcggagtcaagagcttctaaaccaagaaaggaagaaacgggcgggttattgacgagttccctccctctcgcagttttaaaccactgcaaaataaacccatttgttaaggctctgggaccaacgctgggcgaaccagctccgctccggaggggtctgcgcggctggcctcgcccgccccctagcggacccgtgcgatagtgcagcctcagccccagcgcacagcgccgcatccagacgctgtccgcgcgcgcagcctgggaggcgctcctcgctcgcctcctgtacccatccagcgaccagc

SEQ ID NO: 28924 - DNA, 2300 bp, Homo sapien
taaatatttgaatttctggttaaacaacaaataattggttaataggttgtgtgcaatatttggggcaggtttacactaaaatgttgtgtgcggttcatctgaaattcagatttactgggcaacttgtattttatctggccatcctattctggcttctcgctgtgtgctatgtgccacagaagattccactaaacactagcctgcttttattttacatggaacattttgtttttagtcctgaataaggaagtacaatctctttattgatctaacagaaggagaaagtccatacaaacagcagcttgttaagaggagaatggctcccagggttagataaacacccaagacaaacgccttttcctgagctcaaagtgcgcttgttcttgaactttccttcctgggcctagaggtgggcttgatgggatctatcaccctggtgctgctgaagatggcaggaagagaaatgctcagcctgggaggaaaagatttatgggaatgtgggcttagtcggtgattcatccattcattcagcctcacccaccagctattggcagacactcagagatgaatggcaccgcatcctgtcctggaggctctccatagatagggaaatgtattttggccccaggactaacaagtactgcctccttccaaatctgtctccatggttgaatgcaaaaagtacattcctgtccctgtcttttctctctctccctttctccttacccattctttctcttttttctcatctcctctctcttcctctctcaccttcccagccatttgtcaccttaaacctaattaccttgtccaactagtagtgtgaaaaaaacaattactggttcactcaggccacggacctggtcttaaatgcttttcctttgtctctccaagaccccacttcctccacatccagaactatccgacattttccagctcagcctggcattcatttgcgttcatttgcatgccgttctatgattggctgatacaaagtggggggcgggggtggacaccgtaaacctccattcctcatgcatttaatataacatgtatgaaaaaaagtatctatatttatatctcgtttaagaaaaaaattgttcaatgatacttgttaaagcacaataaggaagacttaatcaggacaattcaagtaggtatagagaccactggaactgtgtcttgcaattggtgaaaactgggctcaactctgaatacaacatgggcaaatggaaatttatagccaggaagcagggtggggagcagtgcatgaaaaattactaagaggaaacatcagaggtaacagtagattcttgctgaagaggccagggtgatcagacatcaactgggggatggtggaggatgaggaacacatcagatatcaagagtgatcacatatcaaaggtggggattcttggtaacttgatttagcagggttttttgctaaaactggatttttacaggaagtacacagattggcctaggagaaggttcaggagcctgactaaagtttgctcaagcaaagaatcttcgtcaatctgcataggaaatatctagaaggctatatgccaaagttaatggtgcttctctccgaagaaaaagaaaaaccgtgcattaaaattttaatatgaataaaagcaacagctcccatttaaagcccagaggtcctgtttggaatctgactcgaaactctatccactttttcgggcgtaggcttctcttgtgtaaactgacaatgataacatctacctcccagtgttgtgatacgggagacataaagtaatggatataaaaacttctgttcagagcaaggacggatagtcactgcgattagggtgggcgacccggaggggggtcatgagcctggaccttgacagatctggtgaggtctggatttggtttgattcctggctatcttttcttaatattcaactggctctacgctttttaaccattcactttcttcaaggtaagtgcggcagaagcctggcgcatgcgcagtacaagcccttaagcggcgccccgcccacatactactacaacttccggcaggctccgcgcccgcctctggcgcgtcgcgggctgctgacgtaatgcggtagcgcggggaatttcgagtggtgttggagcgccggaggctagtgggtggctgacccccagcatcctcgggagcgaccatggactccctggccgagtctcggtggcctccgggcctggcagtcatgaaggtgagtgcttcggggagtttgggagctcccgggtgtctgcggggggaggtccctccctttgaggaggatgtc

SEQ ID NO: 28925 - DNA, 2300 bp, Homo sapien
gtagcagttgcctctggacaaggaggagccttgggagacttattctttccattttacctgctggctgttagaatttctttaaccatgtgcctttattacctatgtaaaaagatcataaaaataaacacataagaaatagggtcttgggtgtcaaaggtgttggggagtttgaggaccaagaggaggccactggagagtgtcagagaatctggagtcagcagtgatggggaaacatcagggggaggggccacaggggaaactgaggcactgattgttcacttgagagagtcatggagaataggaaatggggatagctaattgggttcatagagcaccagtacagaaatcacaggacactgttgaaggtccccagtgagctctgcacagaaggttctccacaccctctcgaagctggagggaggtgtaaataggtctctggaattgcctccgaggtttctgctgtctgttaaggggtctggcacaagcagagaccaccttcagaggggtgattcttggcaagccaggcccggaagctgagagaaagggctgtggggggtgaggagaaggagcctgagaaggcatcattctgatattaagccttcatgagctaccactggattcagaggcttctcacctctgcaagggtgagaggaaggctgttctttgcccattagcagctggtccagctatgaggctgaaggaactgggaggaagagcaggaggctgcagctgctcagggagccaagatcacggctcccattttcgatacagaaactcaacacgatggtcttggcaaacagggagaatgtcttggtccttttaggtgtctataacaaaataccgtagactgggtgacttataaacaacagaaatgtatttctcacagttctagaggctgggaagtctaagagcaagacactgacagatttgatgtctggtgagagcttgcttcctggttcatagagggcaatctcttgctgtgtcttcacatggtggaaggggcaaggtagctgtcttgggtctctttaagggcattgtattagtctgttcttacattgctgtaaaggaatacctgaggccgggtaatttgtaaagaaaagaggtttaattggctcacagttctgcaggctgtacaggaagcatagcacaggcatctgctcctggtgagatctcaggaagcttccaatcatggtagaaggtgagggtggagcaggcatttcacaaggcaggagtgggagcaacagagagagagtgagaggcgcaggtgccacacacttcagaatacaccaaggggatgtcactgagccgttcacccccatgatgcaaacatctcctgccaggctctgcctccaatgctgagaattacatttcagcatgagatttggcaggaacagaggttcaaaccatatcaggcactaatcccattcctgagggctccacccttatgacctaatcacctcccaaagacgtcacctcctaataccatcacattgggggttaggatttcaaaataggaattttgagggagacacaaacattcagattatagcagagaatatttaccaaaatcataatcacaatcataaataaaataacaaagaattctagactcttcaagctgcatggaacctagagataattttctcattgttttctgaattgtgtccttaaatatcatgaaagccacttcatggaaataggactgtggtcaatgaaactacagactatacctccttcttagaaagtctccatgcaaggaaggacatgaaaggcactgagaagtcctgcattaagaaaacttgtctacctttgttcaattagctttttctcaaatgcatgtagtcttagaagcccctgctccccctttttagcatagcatctagcagtgatcttcagaccatgctttggaaagtattgttttagtttaagctttttatttgataggtgaggtagctgaggctcaaagggggaagtgattctccaaggccacacagccaacagtggaaatgagaagctagatcttttgccttgtgccccagaggcctttctgccaacctgtacttctcctgttcctcattggaagagacatcttgagagtgtggacttgcgactgtgtcaggatctaggcaatggtaagatgagattaggcagaccaggggaccagcactggggagggctgagctgaaatttggagtcaaactaaggttagggcatctgttgtaaccagtccttgaaagctaggaaggcgatgtccaagtgggtgccagctgctgattctcagtcaaggaagacaagccttc

SEQ ID NO: 28926 - DNA, 2300 bp, Homo sapien
cagcactttaggaggccgaggcgggtggattatgaggtctggagtttgagaccagcctggccaacataacgaaaccctatctctactaaaaatacaaaaattagccgggcatggtggcacgtgcctgtagtcccagctactctggaggctgaggtgggagaatcgcttgaacccaggaggcggagtttgcagtgagccgagactgcgccatcgcactccagcctgggtgacagagtgaggctccatatcaaaagaaaaaaagaatcccaagctaccttctaggaaacagaagatttggtgctcaacccctgccagtctgatatgtgtctatgcactttaatccctcaagaggtgggaaatcacctttgctgataacggagccctttttctctctaaacatgtagaagcatcccaaggaccacacctggtttgggacatgctggtaaagtgttgatttccgttgatggtctagaacagaaagaatgtagacctggcacaggctcaactccacaaatatttcctgtaccaggcgtggtgctaggagtgccaggaatgcggcacaaagctgcatcctcattgcctgggggtacccagagtcccagcttttccccatagcagaccagcctttccctgagctgccccaccttgagggctccccgtgctgggtccttctgggaccatccagctgtgtcttccctcaggggaatagggctctgtgtcatgttcatgatgagttcacagcaaaatgcacattcattctgtaaatgtttatccaggactttctgtggccctggcttgtgctaggaattggggatacagaggcaaacaaaatgctctcttttcgtaggacacccgtcgtctagtaggggagacagagcagtgcagaagaaaccataagaaaccaaagtataagacaggtgaagtgccctgttagagatagaaaccagcctgctgtgggagttctgagatatggatgagttctttctttctttttttaattaacggaattattttggcttgggatttaagctcatgcttaaatgatgttggaacatctggctgacaaacaaaccattgtcagcctcctaggtgtttggctgacagggcctgtgttcctaagcatcccggggagtttcggatgtagggggactgtgggaatgaggcccagcagtgcctgcatgcactgagtgctatcacccccactcctgcacacagtcctcccagtccacggaatgacgcctccctggtgtcttcctttgctgagctgctcccatttctcacatgggcctcagtcactcccatgagcctcaggaacaagcctacacttgctttctgctgccctcagtttcctcctctgtcagctgcgagtactgattcctcctcgggaggatcaaatgagatgaaaaacatggggagaactttgcaaatgggagtccccctggaggagaagtagcagattccagccccctcactcccgtctgggtgcgacttccctctggtgagaacgggcaaggtcaggcgaggctggaattctttcatgggtcctgaaaccttaggtgaactcccgcctgtgcgtctttgctggtacattcagtgagatgatcaatatgacgccttcagtgcagcacctgccatgaagtcggtgcttactaagtagtggtggtggtggtttttctcccttcattctgcccgcagtctcctgctctccttccctactccctccaccttgctttctccctccgtttcctttcttccttcctcccatcttcacttcctcatttactcatttgttaaacacttccaccctttaaaaattattttaattgtgataaaaaacacatagcagaaaatgtaccatcttaaccattttacaacgtacagttcagtggcattagatatatcacattgctgtgcagccatcaccaccatctgtctccagaactcttttcaacctgaaaaactgaaactgtacaaactaaacaataactcctcattccctccttcctctagtccctgtctgtgaatctgactcctctaggtacctcatataagtggattcttacacgatttgtccttttgtgactggcttatttcacttagcatactgtccccaaggtccatccattctcttccttttgaaggctgagttgtgccccactgtgtgcctagaccgcatctggttgacccatccatccgtcgatggacacattatgaatggtgctcctgtgaacactgtgtaccaataagtgctttttgagcatgatcacgtgcctggcattgtgctgggctgcagtgggaaa

SEQ ID NO: 28927 - DNA, 2300 bp, Homo sapien
acacagtgttcacaggagcaccattcataatgtgtccatcgacggatggatgggtcaaccagatgcggtctaggcacacagtggggcacaactcagccttcaaaaggaagagaatggatggaccttggggacagtatgctaagtgaaataagccagtcacaaaaggacaaatcgtgtaagaatccacttatatgaggtacctagaggagtcagattcacagacagggactagaggaaggagggaatgaggagttattgtttagtttgtacagtttcagtttttcaggttgaaaagagttctggagacagatggtggtgatggctgcacagcaatgtgatatatctaatgccactgaactgtacgttgtaaaatggttaagatggtacattttctgctatgtgttttttatcacaattaaaataatttttaaagggtggaagtgtttaacaaatgagtaaatgaggaagtgaagatgggaggaaggaagaaaggaaacggagggagaaagcaaggtggagggagtagggaaggagagcaggagactgcgggcagaatgaagggagaaaaaccaccaccaccactacttagtaagcaccgacttcatggcaggtgctgcactgaaggcgtcatattgatcatctcactgaatgtaccagcaaagacgcacaggcgggagttcacctaaggtttcaggacccatgaaagaattccagcctcgcctgaccttgcccgttctcaccagagggaagtcgcacccagacgggagtgagggggctggaatctgctacttctcctccagggggactcccatttgcaaagttctccccatgtttttcatctcatttgatcctcccgaggaggaatcagtactcgcagctgacagaggaggaaactgagggcagcagaaagcaagtgtaggcttgttcctgaggctcatgggagtgactgaggcccatgtgagaaatgggagcagctcagcaaaggaagacaccagggaggcgtcattccgtggactgggaggactgtgtgcaggagtgggggtgatagcactcagtgcatgcaggcactgctgggcctcattcccacagtccccctacatccgaaactccccgggatgcttaggaacacaggccctgtcagccaaacacctaggaggctgacaatggtttgtttgtcagccagatgttccaacatcatttaagcatgagcttaaatcccaagccaaaataattccgttaattaaaaaaagaaagaaagaactcatccatatctcagaactcccacagcaggctggtttctatctctaacagggcacttcacctgtcttatactttggtttcttatggtttcttctgcactgctctgtctcccctactagacgacgggtgtcctacgaaaagagagcattttgtttgcctctgtatccccaattcctagcacaagccagggccacagaaagtcctggataaacatttacagaatgaatgtgcattttgctgtgaactcatcatgaacatgacacagagccctattcccctgagggaagacacagctggatggtcccagaaggacccagcacggggagccctcaaggtggggcagctcagggaaaggctggtctgctatggggaaaagctgggactctgggtacccccaggcaatgaggatgcagctttgtgccgcattcctggcactcctagcaccacgcctggtacaggaaatatttgtggagttgagcctgtgccaggtctacattctttctgttctagaccatcaacggaaatcaacactttaccagcatgtcccaaaccaggtgtggtccttgggatgcttctacatgtttagagagaaaaagggctccgttatcagcaaaggtgatttcccacctcttgagggattaaagtgcatagacacatatcagactggcaggggttgagcaccaaatcttctgtttcctagaaggtagcttgggattctttttttcttttgatatggagcctcactctgtcacccaggctggagtgcgatggcgcagtctcggctcactgcaaactccgcctcctgggttcaagcgattctcccacctcagcctccagagtagctgggactacaggcacgtgccaccatgcccggctaatttttgtatttttagtagagatagggtttcgttatgttggccaggctggtctcaaactccagacctcataatccacccgcctcggcctcctaaagtgctgggattacaggcgtgagcaaccacaaccagcctagcttgggattcttaatccctccacatgtt

SEQ ID NO: 28928 - DNA, 2300 bp, Homo sapien
tggtcccaaaaggtccagttttgctcaaaagattccctgaaactgaaaatgtagtataacggaatatcactggctggctccaatcctcggggcttgctgtttcagaagagaaagaggcgcccatcgatgtatttataggcttaaagctggcatgcactgaagctacctggggttactcaacaactgttttagggcacatttcctccatctttttgtttcattaggttttagtcggtcagctatctggggcctgaattaggatttcacacacatccagagccaaatgacaaaacaaacaaaagaagccctgtgactaaaacagaacttggggtcagcagctcagtaagggtggccccctggaaacaactcctgtgtaggatcaaaggaaagtcaagtggtatgtcacatcccagggctggggacccttaggggaggggagccccactgccttgagctcagccagtcacccctttgttccacgaccttggcctgcaaagttcttccctcccatccctgagcaaaatcctaaagttccttcaagttctggcccaagtgtcgacttctttgggaagtcttcccttactccatccctaccccacctcttcttcctacagaaaaaaaaagaagtttctcgtccccctcctccacactctgtcctcagttcccagcccatcccacaagtctctggagactgggagagcataggtgtggagtcgccctcattcaccactttagagagactggaacaacatcagcagccctgtggaggcaagcccaggcccaggcactatggtctcccggattataatgattcacacacggaaaacattggagagaaaaagctgaaaaggaatatgctgcccaaatttctctaccatgagcaagtattgcttttatcattggaaaaacataaaataaacattttaatggactgcacatttctcacgctaaaggagctaatggtgtttcctattgtgtggaaaacagacctgaacccatccacaggatgctgaagaatccacaaattacggcacgcattgacagtgcctatgtacatgggaaggaggaaactcagcctgcctggggcatcagggaaggctccacacaggacaggatgagtgagagctctccagttagactagggaagatgaggcagaagggaattcaaggcagaaggaacagtatggtcaaaggcagagtcatgaatgtgcaagctaaataatatggctggaatgtgggagatatgggagatgatatcatttggatgggtgtccccgttcaaatctcacattgaacgataatccacagtgttggaggtgagccctggtaagaggtgactggatcatgggggcagatttctcatgaatgattagcaccatcccccttggtactgttttcaccacagtgagttcttgtgagttctggttatttaaaagtgtgtagcatctcccccctcactttctctcactcctgtttttgccatgtgatatgcctactcccctttcaggttccaccatgatcgtaagtttcctgaggcctccccagaagatgttggcacctcatttcctgtaaagcctgcagaaccatgagcgaattaaatctcttttctttataaatcacccagtctcaggtattcctttatagcaatgcaagaatggcctaatactggagagaatcgtggatgtgaggtatgcaataaaaggttaactccactagcttggggtcctcaaactctgcaccttccaaagaaagaactggcccttgaccagcccccgggaaataacctctgagcccttggaatatcgtgcctgatggaatagagtatctttgtatcgctggggctttgggccaccccacatagtttatgctaacagtgtaattcatgataaaggcctgtttttgtttacctggagtcccagcccatgctgtatcggtttgattccaggcatgcaggggttgcatagagactgagtagccaaggtcagtcacgtgggtgactcatacctccgtgactgactcccttctcctaacaaaaaccctggacaccaaggggcagttgggtttccctgctatgttttgtcacacatcattgctgggagagttcagtgctatccaagtgactcccccgggagaggacaactggaaatttatgcctggtgtcttcctggactccgacctatgcacctttttccttggatgattttaacctgtctccttttgctgcaatgaaccataaccatgagtatatcagcttttctaatttttgtgagtccctcaagtgaattatcaaacctaaggta

SEQ ID NO: 28929 - DNA, 2300 bp, Homo sapien
tctctactaaaaatacaaaaattagccaggtgtggtggttcacacctgtattcccagctactagagaggctgaggtgggaggatcacttgaatccgggaggttgaggttgcagtgagccaagcagagattacaacactacactccagcctgggcaacagagtgagactccatctcaaaaagtaaataaataaataaaaataataaataataaaaagtaaaattaaaagataaaaaattcaataaaatgaaataaaataaagacagcttttatgtactcctaaatcagcggtgggaaatagtttctacctgatgtgccaactgtgctggattgcagtgacagctggcggtctgtgttgagaagtattctgaggctgtgtcagggtcagcaggagagtatcagatctgccctgggcttggggctgggcatggtgtatatggacggtgtgtttattttctctgctaagcgtttatgcttagattctgccatcatgctttaggtgacttattccctcattctctggtctctttttctggccacacttcagcttatcaacatttaaaaagccatctggctgccatctcttctccctaattcatttctagggtggatttgaccaatctggctggcccagctgtggtctctcctagagcattgtttcctgcaatatcttcccaaatagaggaggaccatttttggatctgcagtctgctaataaaccttccaaattattaacgggtctcttaaaatctggagcccaagctaagtaagcactgtctttcagaagtactctcaatggttcggaggctagcaggactaataatacatcccttgatcctgttaatgcggcttaaaggttgtgttagctttttccctgtgtttgtaaagccgaagctgtagtgtaccccctgctgcggatggtgagggcaggagagccagatgcagtgggggcaagatctcctcctgtcccctccctgcctctgtgactcttggtggcttggggggcctggggcctgcaggggtgacatatggccccaccgaggtccaaaggccacaggtctcattctgtcacaatgaagttgtctgccctaaaggtccctggatcactgtcagtcttgacactggagcaacctgaaaaaaataaggacaatgtagacattttctcataaacctaatggcacacaattcaagacctgctctttattacacaaatgatggtcttcatttcctgcgtgtggtgtggtgtggtgtgtgtgtatgtgtgtgtcagaaattatcctttcttaaacaattgaggtagttcttctccctgccccgaataccctttgaaaagttggccaccctctgtagatccccttccttttgcggggaggagggagtcttaccaggctgtgaaagctggtctaaaaaccccagccttgtccaaggtgaggcccatcagaatttgacgtgcccccttggagggtcttgaagaagcaatctggcatctcaatgaggcccctgtggcacaggattgggccattaatagttaaagtagttaaatttctcacagcccaatgtattggaaaggcagcaatgttttcatttagaccttagggctggggtataatttaaggagagtggattttgatttaggaactcagttaacgagtgccagccttgtcaatttttttttattgtgtcgaaaagcacatcacataaaatttactatcttaaccgttttaaatgcacagttcaatgacgttaaatacattgataatgttgtgcaaccgtcaccaccatccatctccagaacacttttcatcttgtaggactggaactgcacccagtgaacaggaactccctgttcctcccccattccctggcaatcaccagtctactttctgtttccgtggttttggctcctctaggcatctcgtgtgagcggactcatacaatatttgtcctctgtgtctgctgtagtttagttagcgtaatgcttcagggttcatccgtgttgaggcgtgtgtcagaattcccttcctttttaaggcggagtaatatcccattgtatgcgtagaggccgcatcacgttcatccgctcctctggggagggacacttgggtggcttccgtggtgtggctcatgtgctgcggtcttgtcagtttttagccatggctcgggaaagtgacttggcccctcagtacctccgtttcctcatccattacatcggagcctgtcctctacgtgggactgaagtaagaatcgttgtttgtgacagtgcgtaactgcaacagtccatcgagttgaagttatttctga

SEQ ID NO: 28930 - DNA, 2300 bp, Homo sapien
ccgcctcactccctttgccatacttgcctggggacgcccactgcagctgccatgtcctctaggaagccttgatggactagcatggataacctattcatttctgagtccaaacagaatcatttattatagactcagaaaaaggcaaatggaagactatacctattttgagaaatttgggaacatttatctcaggggacagtcaggggccaatacacattagtgacaatcttagcatatgaaattccagtgatcagcgactctttagtgcttgactcagtttttacagaatgaatcttattctaccttaattccacatgaaatgggtttggtctcccttgtagaatgcaggagactttgagcctgggttggaaggctggtgaccttgggtaagtcacttcccatatctgagcctctgctcctttgtctgtgaaagagtggtgcttatacctatgttgttaggttgttgggggatataaaagggtaataacagttgctactgtttattgagtgcttgctatgcaccagagactgtgctaagcttagctttgcatttttctttgatcttttcaagagctcctctcattcccgatgttccttaccctgcaatattttttcccatagcactttacattttgtatgatattatataatatacttactgtgcttatttttggtcttcctctcccagggcctcttgcctcgtacaactccagggggcaccattcacaatgctttctactccaggggtgctttttactaagaatattagcatgaatggtggaaactgctggagttgtgtgatgtggagccccgggagcttcagaaggtcagggatttttgtgtgtgccagttctgatcattgctgtatccctgtacccagaacggtgctagacctatagtaagcattcagtaaatatctgttgaaagaatgaataacatagcctccaaagagagctgattttactatctaggaaactgaggctcagtctgacttatgaatttgcccagagccccacaagccaatgacccacccagctgttctgcctccagtgtgcctgctctgcgtggctttgctaagctgcatgcctttaactcctcgcatcgtctctgccaccaagtaactgctcaacaaatattgatgcttttccctacatgggtcaggccctctgctagactatcccagtagagtgacaaaccatcatatagctgttgattccagaaactgaattaaattgcacagtgcaaaaaaagggaggatcttaagtttttggaagaaaaatccctaacccaagtgctaatgtttggagtttgcagaagcctctcaagacttaccaacccgattacttttcctgctgccttcccttttgtgagcgtttcttcccctttttgcttgcagtgagttctgctctcctgtaggctacaatgtgtcagttgttataaaatccgggaggcggagtctagtgacgtgagcagtgggggagagctcagccagccctgcagggcgagcagtccagccttgtgttcaccggagcttaagcgttgcagcaggaaaacttccatctcgctctcctggctttgatcctcactggacatcagaccagaggcaccgaagggagggaggatgcgagatgaccggccctttggcaacctgaccatcgacttagcagagccttcaaaagcaagccaggggctggctgcacgaccaaagaggcgccgcgcctctcgtggatgtgtgtgtgtgagtgatccagcgagtgtgtgtgcgtgtgagggtgtgtgtgtgtatgcctgtgtgcacagcacaactgtgtgcgtgtcccggtgagtgtgcctgtgcatgcgtgagtgtgtgtacgtgtgcatgtgtgtgtgagtgcgcttggttattactattattattatttttggaagaaaaatctttgaaaatctggggcaggttactgtgctcctagggtgattcttcttttgcaagaggagctgaccagggcaagctactagagccatttctcggcaagtaaagagatttttccttccagaaggagaaggatttttctccctgctctgcagccaagtgaaagagattagtccctaaacctgtgaaatcgaccagagctgtgtgattaccagggcttgagagaggactcgaaaagaaaaggagaaataaatcaaacagcctgtcagttcctttggccacgtcagaagatgtcatctcaaactaagttcaagaaagacaaagagatcattgctgaatatgaagcccaaataaaaggtgagatgcgggctgggagagttttccttct

SEQ ID NO: 28931 - DNA, 2300 bp, Homo sapien
caggtgtcagctcagagcgctataccatctttggccttggttttgtatggctttttgtgacatttttgtgacatttccatggctcagcaccctacacataggtctcctagaactatttgtggatttaaaattttaataatggtgaaaatagctgacatttactgagttcctgccaccagtgggcacacaagcaggttgagccacttgctcaagttctcatgagctcaaggctcgtggcagagccaggagaggatccagtctgtcgtactccaaggtgtatggttttaactttcatttttcttgaagaatctagacttgcagcagggatgttaatctctgtgcccatctttctcaggtaacgtggggcttttgtgggtttgaactagttagaagaggacagcaaagggcctgaacatgtccaggggaggcgtgaggcagtggggtgatggcaagggctgcgggccagtggcatctatttctgaactggtgacctcctgcctccgggtacaaggctataataagccccatgattcaccagttggacttctccctgtcgttgctccaagcaggtcttgtgctttgccacctgtgggccccagctcatgctgtgtgctccaggagaacatcctgccccgcctcactccctttgccatacttgcctggggacgcccactgcagctgccatgtcctctaggaagccttgatggactagcatggataacctattcatttctgagtccaaacagaatcatttattatagactcagaaaaaggcaaatggaagactatacctattttgagaaatttgggaacatttatctcaggggacagtcaggggccaatacacattagtgacaatcttagcatatgaaattccagtgatcagcgactctttagtgcttgactcagtttttacagaatgaatcttattctaccttaattccacatgaaatgggtttggtctcccttgtagaatgcaggagactttgagcctgggttggaaggctggtgaccttgggtaagtcacttcccatatctgagcctctgctcctttgtctgtgaaagagtggtgcttatacctatgttgttaggttgttgggggatataaaagggtaataacagttgctactgtttattgagtgcttgctatgcaccagagactgtgctaagcttagctttgcatttttctttgatcttttcaagagctcctctcattcccgatgttccttaccctgcaatattttttcccatagcactttacattttgtatgatattatataatatacttactgtgcttatttttggtcttcctctcccagggcctcttgcctcgtacaactccagggggcaccattcacaatgctttctactccaggggtgctttttactaagaatattagcatgaatggtggaaactgctggagttgtgtgatgtggagccccgggagcttcagaaggtcagggatttttgtgtgtgccagttctgatcattgctgtatccctgtacccagaacggtgctagacctatagtaagcattcagtaaatatctgttgaaagaatgaataacatagcctccaaagagagctgattttactatctaggaaactgaggctcagtctgacttatgaatttgcccagagccccacaagccaatgacccacccagctgttctgcctccagtgtgcctgctctgcgtggctttgctaagctgcatgcctttaactcctcgcatcgtctctgccaccaagtaactgctcaacaaatattgatgcttttccctacatgggtcaggccctctgctagactatcccagtagagtgacaaaccatcatatagctgttgattccagaaactgaattaaattgcacagtgcaaaaaaagggaggatcttaagtttttggaagaaaaatccctaacccaagtgctaatgtttggagtttgcagaagcctctcaagacttaccaacccgattacttttcctgctgccttcccttttgtgagcgtttcttcccctttttgcttgcagtgagttctgctctcctgtaggctacaatgtgtcagttgttataaaatccgggaggcggagtctagtgacgtgagcagtgggggagagctcagccagccctgcagggcgagcagtccagccttgtgttcaccggagcttaagcgttgcagcaggaaaacttccatctcgctctcctggctttgatcctcactggacatcagaccagaggcaccgaagggagggaggatgcgagatgaccggccctttggcaacctgaccatcgacttagcaga

SEQ ID NO: 28932 - DNA, 2300 bp, Homo sapien
ttttttgttttttacttttagtcattttgatgagtatcccattgtgattaatttgcaattccctaatgactaatgatgttcagcatcttttcatgtgcttattggccatttgtccatcttttggagaaatatctattcaagccctttacatatttttcattttatttttgagacaaggtctcactctgtcacctgggctgaagtgcagtgatgtgatcataactcattacagcctcaacctccccagctcaagctattctcctgtctcagcctcccgagtagctgggactacaggtgagtgtcaccatgcctagctaatttttgtcatttttttgtagcgacagagttttgccatgttgccagagctagtctcaaactctgagctcaagcgagccactcacctcagcctcccaaagcgctgggactacaggcatgaaccaccactcccagcccctttgcacatttataaattgtgttctttttggttttgttttgttttaaattcggtttatctttttgttgttgggttcctttcacaataagttaacttttgtcaactgaaaaataaaaataaaattctatgccccccaactgactgaacaggccctctcttggccaaggagaccctagaaaaaacttggaagctgagttcctactcatgacaggatgggaagtcggacacacctctttataacccctccctctataatcgccattagattttctttcctaagggttaaacagaaaccagcccttttgaaagactcactccaccagcctgatgctgaccctcccatttgcagtttcaatagaacaaccgactagcattccttcctgataagagatcacccaccatccagggagtggttctggccagtcgacagaggacgtgcagtgagggttttcacatcccctgcttcaccttttgaagtcaagcggtagaaaactctacccttggatcatgctaaggccaccattttttaaacatgggatccacagagaggcatgaagctcaactgcacatgcacaaattgctcctttcataaatattcgtgacccctcttacagtttatttaacatgtatatttggccactgtgtttagcataaatccctgtcttattcttccaaccctggaagtgcctgtttttggcttctgactggaagctaggcttcccagtctgtcaaaatggctaccatgcaggttcaactctttttttttttttttttttttttttttgagatgatgtcttgctcccagactggagtgcagtggcacaatcttggctctctgcaacctctgcctcctgggtaagcaactcttctgcttcatcttcccaagtagctaggactacaggtgcaggccaccacatccagctaacttttgtatttttagtagagatggagtttcaccatgttggccagcctggcctcaaactcctgacctcaagtgatccacccgcctcagcctcccaaagtgctgggattacaggcatgagccactgtgcccggccaggttcaaccctttatgagaaataaagttcatctgattgggcacagtggctcatgcctgtaatcccagcactttaggagggctagacagaagaatcacttgaacccagatgttcgagaccagcttaggcaacatagtgagccccactatttctattttttttaaactaaagaaaaatatgaagtaaacagtgctaaaatagtgatggcaatacagaaatcaggaactagtggcatgacattttgagaaagatatttaaataagctggagagactcggtgtctccagctttaaaacagaaatcagtctctgccacttcataggtgctagaacaaaagagacttgttccaaatgagatgacgcatgtgaagcgcttacccagtgctcggcaaggggaagcactctctaaacgttagcaaataccatggtaggacacaaggcccctgactctccgctttcagcttactgaagatcctcaaaaccaacagcacacagcttccagcgcatgctcctttccccaagaccttgtgggggaacccgccgccagcgcggagccaccgtgactcgtagcctgacttccgtttccgggggcggcttccggcggcgtgacctgaccgcaagaggccaatggagtgtgggagctgaaagggtcttcgctggcggccggtaactggcggcggttgggaacggccgagtgtggctcttctggtgtttcagcttggggagagaggggtggccttcctcttgcagttgaggccggcgccgagccggacttcaggcggatctcgtg

SEQ ID NO: 28933 - DNA, 2300 bp, Homo sapien
aaaatgggatcaagtatgagtgagagttgctaagatgcctggtagggatgcaaaggggtagagagcctggggagagagggtgagggagggaagcactggtttctcaagcaaaagctaaaatttttctattaagatttaacctgatgctacactttggtggtgcagcaagggtctcaaatggtataaaactcaggtgatcatgctttatgtctgtctctagaaaaatgctccaaaaatgataagtagtgataatccgcagtctcgttgcataaaatcagccccaggtgaatgactaagctccatttccctaccccacccttattacaataacctcgacaccaactctagtccgtgggaagataaactaatcggagtcgcccctcaaatcttacagctgctcactcccctgcagggcaacgcccagggaccaagttagccccttaagcctaggcaaaagaatcccgcccataatcgagaagcgactcgacatggaggcgatgacgagatcacgcgaggaggaaaggagggagggcttcttccaggcccagggcggtccttacaagacgggaggcagcagagaactcccataaaggtattgcggcactcccctccccctgcccagaagggtgcggccttctctccacctcctccaccgcagctccctcaggattgcagctcgcgccggtttttggagaacaagcgcctcccacccacaaaccagccggaccgacccccgctcctcccccacccccacgagtgcctgtagcaggtcgggcttgtctcgcccttcaggcggtgggaacccggggcggagccgcggccgccgccatccagaagtctcggccggcagcccgcccccgcctccagcgcgcgcttcctgccacgttgcgcaggggcgcggggccagacactgcggcgctcggcctcggggaggaccgtaccaacgcccgcctccccgccacccccgcgccccgcgcagtggtttcgctcatgtgagactcgagccagtagcaagggcccggtcccacagcttcgacagccaatcaggtgtcgaagacaagcaggcggcgggtaaaccgactcccccgaaggaaggggagggtgggaggacgcccgcgccagagccgatttcactgaccctcccctcccgccgcaggaggccggccgcgcccgcacacccagcatctctacaccccacctacctacccgccccacccagggggcaacgcgagagtcgctaagcggctgcgtactcccgacggcgtaactgacaggagctttactccaaccagaatacgccatttgtgttttcacacacggcgggaggagaaacggccaatcggcgacaagaggctagccggaagcgctcctccctctgcgagagcaatggctccgtccggtttcgagcattttccgctcccttctccctccccctccggttgccgcagggcgggcctccctcccgcctgcatccagccacccctttccctcccaacgtaacaaacattatgttcccgacttcccacgggaaaggcaacccccgcaagccaccagacggcccccctagccacccatccccccagtgtaccgcacctcccctcccaccagagttccgctcccctacctagccgaggctctctgaggagccggagcgccgaagcacagcctcttctctaggcggccccggcggcttccgctgattggcggcgagtgggccaatgggtgcggggcggtgggcggagaggccaatggcgcggcgggagggggcgtgtcccgggtgcccctggcgccggcgctgggaatccccgtgcggtcagtggcgtttccgctcgggcagcgggctgagtgagctgccgccgccgccgccgccgccgccgccgccgccgctgccgggggaggggcggccgccgcccgcctgcgctcagagactcacgcagccccagtcccgccagtccgccaacacagtagtgccggcccccctctttccctggccctgccccccctccccgcctttggctcgctccgcctttctgccccccacccccacctcacgggtacgggccattcccggccaggaaacgccgtggcgccgcgttgggcctaactcgagtcctgccgcctcccgggagtgccgtgcgccgcagcccgggcccaggccccggcagcgcctgggacaaggtaagggtccgacagaaaagagaccgaacctcacgatcgggccccaggggagggaagggtcacctcctccgtctccccgcgctcgctctccttgggtcgtgggcctggccctccccaagctc

SEQ ID NO: 28934 - DNA, 2300 bp, Homo sapien
cctacactcctcttcacattcccgacttacacgcagagggaaagagaattcataaagggaatatttttctgcctttgaagatattctcacaagatcgttctccacgcccaaggcaagtaaaacgacacaatctggctcaactccaggctcgaaccctacacattcaacgaggctatctcagacacgctgtggcacacgccacggggagccagagaacgtgtggtgggggtggcgaaggtaatgcctttgggaagcagccatctgaggtgggaagccagaaaacgagagggaaggcgtccaggaagattacggaggggagatcgcggcccccagagcgatcagagttgtctgtcacaaggccgcgagaacgggggtagggagtgggggatcggggagagaaaaaaagtatgcctgtgtatttcgagcggagggcagcaagaggcctctcctcaagggaaaggtaaacgtggagtaggcagttcccaggaaagggggtgaagaggcgttgggggaggggaagcgtcctgacccaggaaaaacatgaaagggggagttgggtcgcctagattagagggggatctctctccctgggaaaatggggtgttgcaacggtgtgtgcaaggcggcgaggggggtgagaagtggcagcatcctcctaagagcttggggagggccaggcccacgacccaaggagagcgagcgcggggagacggaggaggtgacccttccctcccctggggcccgatcgtgaggttcggtctcttttctgtcggacccttaccttgtcccaggcgctgccggggcctgggcccgggctgcggcgcacggcactcccgggaggcggcaggactcgagttaggcccaacgcggcgccacggcgtttcctggccgggaatggcccgtacccgtgaggtgggggtggggggcagaaaggcggagcgagccaaaggcggggagggggggcagggccagggaaagaggggggccggcactactgtgttggcggactggcgggactggggctgcgtgagtctctgagcgcaggcgggcggcggccgcccctcccccggcagcggcggcggcggcggcggcggcggcggcggcggcagctcactcagcccgctgcccgagcggaaacgccactgaccgcacggggattcccagcgccggcgccaggggcacccgggacacgccccctcccgccgcgccattggcctctccgcccaccgccccgcacccattggcccactcgccgccaatcagcggaagccgccggggccgcctagagaagaggctgtgcttcggcgctccggctcctcagagagcctcggctaggtaggggagcggaactctggtgggaggggaggtgcggtacactggggggatgggtggctaggggggccgtctggtggcttgcgggggttgcctttcccgtgggaagtcgggaacataatgtttgttacgttgggagggaaaggggtggctggatgcaggcgggagggaggcccgccctgcggcaaccggagggggagggagaagggagcggaaaatgctcgaaaccggacggagccattgctctcgcagagggaggagcgcttccggctagcctcttgtcgccgattggccgtttctcctcccgccgtgtgtgaaaacacaaatggcgtattctggttggagtaaagctcctgtcagttacgccgtcgggagtacgcagccgcttagcgactctcgcgttgccccctgggtggggcgggtaggtaggtggggtgtagagatgctgggtgtgcgggcgcggccggcctcctgcggcgggaggggagggtcagtgaaatcggctctggcgcgggcgtcctcccaccctccccttccttcgggggagtcggtttacccgccgcctgcttgtcttcgacacctgattggctgtcgaagctgtgggaccgggcccttgctactggctcgagtctcacatgagcgaaaccactgcgcggggcgcgggggtggcggggaggcgggcgttggtacggtcctccccgaggccgagcgccgcagtgtctggccccgcgcccctgcgcaacgtggcaggaagcgcgcgctggaggcgggggcgggctgccggccgagacttctggatggcggcggccgcggctccgccccgggttcccaccgcctgaagggcgagacaagcccgacctgctacaggcactcgtgggggtgggggaggagcgggggtcggtccggctggtttgtgggtgggaggcgcttgttctccaaaaaccggcgcgagctgcaatcctgaggga

SEQ ID NO: 28935 - DNA, 2300 bp, Homo sapien
ccttgtgtcatgtcctaccaaagggcataattcatttttctacacataatgacagtctgagtaaaccttaaagactctaatcccataacaggccagaatttttggctacagaagagaactaatgatcctgagaaaactggaagaaatccaatagaaaaaaaaaagccctacgtcctctatggagcccagaaacctctgattacgtgggtattctctgctttagtcctagctcagatcccacacatctaaaattaccacttagaactttctgtgacctaaaaacattaataatataaaattaacaaccaaaaaataatttcaaatagggagtacacactctcctaaaaagctcagcacactccactcagctggatcctccccaatcacaagtatagctatgtaacatctgtccaacaaagaaatgtaaatatgaccttggtcacaaatatgtcatctaaaaacttgtttagtcaactgatgaaggtaattagcacagaacttggggattcgttcagtacctatgtgcaggaaggaaactggagaaatgaacttaaatatagacaaagcccagtggaacccagaggtctgggaaagaaatgagttaccggtgaatacattgcacaagtaacatgagaaagcagaaaatgcaggtcatacacgcacccctgacccagaccagcagagctgactgcagcatccatatccaagagaaagaccactgacgcccaagaagtgagacaagcaaggactctatagaatcaattagcatagaaggggctttcccaacagtttaactttccctctcatgcgatttacctacttgaaccagggctctttcctacactcctcttcacattcccgacttacacgcagagggaaagagaattcataaagggaatatttttctgcctttgaagatattctcacaagatcgttctccacgcccaaggcaagtaaaacgacacaatctggctcaactccaggctcgaaccctacacattcaacgaggctatctcagacacgctgtggcacacgccacggggagccagagaacgtgtggtgggggtggcgaaggtaatgcctttgggaagcagccatctgaggtgggaagccagaaaacgagagggaaggcgtccaggaagattacggaggggagatcgcggcccccagagcgatcagagttgtctgtcacaaggccgcgagaacgggggtagggagtgggggatcggggagagaaaaaaagtatgcctgtgtatttcgagcggagggcagcaagaggcctctcctcaagggaaaggtaaacgtggagtaggcagttcccaggaaagggggtgaagaggcgttgggggaggggaagcgtcctgacccaggaaaaacatgaaagggggagttgggtcgcctagattagagggggatctctctccctgggaaaatggggtgttgcaacggtgtgtgcaaggcggcgaggggggtgagaagtggcagcatcctcctaagagcttggggagggccaggcccacgacccaaggagagcgagcgcggggagacggaggaggtgacccttccctcccctggggcccgatcgtgaggttcggtctcttttctgtcggacccttaccttgtcccaggcgctgccggggcctgggcccgggctgcggcgcacggcactcccgggaggcggcaggactcgagttaggcccaacgcggcgccacggcgtttcctggccgggaatggcccgtacccgtgaggtgggggtggggggcagaaaggcggagcgagccaaaggcggggagggggggcagggccagggaaagaggggggccggcactactgtgttggcggactggcgggactggggctgcgtgagtctctgagcgcaggcgggcggcggccgcccctcccccggcagcggcggcggcggcggcggcggcggcggcggcggcagctcactcagcccgctgcccgagcggaaacgccactgaccgcacggggattcccagcgccggcgccaggggcacccgggacacgccccctcccgccgcgccattggcctctccgcccaccgccccgcacccattggcccactcgccgccaatcagcggaagccgccggggccgcctagagaagaggctgtgcttcggcgctccggctcctcagagagcctcggctaggtaggggagcggaactctggtgggaggggaggtgcggtacactggggggatgggtggctaggggggccgtctggtggcttgcgggggttgcctttcccgtgggaagtcgggaacataatgtttgttac

SEQ ID NO: 28936 - DNA, 2300 bp, Homo sapien
tatctcagaattttctttgatccctcacttctcaattgacattgcaccacattgaactgcacacttattcctgctgtactatatattgtatatctttaagcaggaaaaaatgacttgttatttcaagcgaacaatatgcattatttgactccctgaaagacccattaatctctaagttagagttataccaatcatcggagtttctaatttgtgaatctgtgttctaattaatataaattacaaattactattctattctgcaaagccatacaaactttatatttttgaattacccttcagtattccctaaaacctaaccaggtaacaatcagagttgaagttctttcttcccataaacctgatttttatcctttgccatcaaagcctttttattgtaaaggcttatattaattttctaagtttgaatacatgtataattctacaataatacattgcgcttgaatagtttattttctactcacaaagggtacaaaaagatactaaaccaagcttctcactaagcctggttaataaaggtctcaaataattttctttaaaggactgaatgtcattctcatttctgtagtggaaagagcatagactttggagtcagacagactttgtttcaaatcttagctgtgtcagtgtgtaaccttggggaagtcatgtaatctcaccaccacatcttcccactctgtaaaaatggagtatataccatgtttagtggttgctgaaattaaatgaattaatatgtatttaaagcacctaacaaatattgggcagttcacaatggtagccattactgttgttattatttgtcagtagactaacataactttacagtttagtttttattttgaagttctatggtattatcatgcagctgataaataattttgtccttaatatgcttgcatgtcattggtggatgagaaattattactctaatatttgaaaggtgttgggggttcatcaagatgagaggtatgataaatataagatgccattgtttttacctgtactttcttcagggtatcctgtcttggtagtgaatggaagagggcctggtccctggggcagtgcagaaggcactttgatcatctcactcactgcaaatgtcatgtgaggtttcatggaagtattaagagatccaattaagaagaatagttctgagtctaaaccagcccagagtggcttctctaggggaaactccccgctcagctggtacgtttgtgtttgtcattagggacaccttgtatctcaggtgcctgccttcagacatctgcctgtactggcttcatgttacacacaaatccacatttaataacactcctactgttatttataggcttagttatgttaataagattgtttcaccgagttctttctcttatcctagtggctagtggttgtggaaagaggaggggttagaatgggaaatgaagtgttagtttaagggaagattaggtgttatgctatcatgcattgcttttcgcctttgtgcagccctgaatctgtggaggctagtccagcagttaatgagaagagcgtgtattccactcataattatgggaccactcagaggcatgggtgtcgaggactgccttatgctgtgagtatgcatttgtttctctccagaacagtgatcttcctggagtgtaatccattcttatacattgtgactttcttgaaatgtttatatgcagcatgacgaagttgccccttttgcacttccctgactccagcggacgtctagccctgcatcattgttcttgtttttatgtcccagttgaccttggcattttgttttatcactttcctggttgaagccaaaaaacaaagggtactactttcttctttctttccatatgtaccatactttaggggagagaggggccagtgtttggacactgttgatttaaaaaatcttattttcaggatcataattacggagcccctcctcctccgacacctcctgcttctccccctgtccagacgatcatccctcgttctgacctgaatggcctgccgtcgcctgtagaggaacgctgtggagacagcccgaactctgaaggagaaactgtacctacctggtgtccttgtggtctttctcaggatggcttccttctcaactgtgacaagtgcaggtaagatcctgttccatctaaatttaagtctgggttgctgggattagggtttcttacaagtagggaaaagctcaaagtattctttcttgtgtttgttaatgtagatgattccttagtgctccttggctcgaattctctgcactaggtgagaat

SEQ ID NO: 28937 - DNA, 2300 bp, Homo sapien
atgtacaaggccatggaataacagattagccaggtgttgatcatatgtaaccaaaagtaggttatattaactggaaactacctggatacatatttttaaactacctttattaataaaaaaatagatgaattgaggctgtgtgcagtgcagtggctcactcctataatacaacactttggcaagaagccaaggtggaaggattgcttgaggccagcagttcaagaccagcctgtacaacatagtgagaccctctctttacaaaaaaaaaaaattaaaagccgttgtgatgatacacacctgtaagtcccagctactggggaggctgaggtggaaggatcacttgaatgaatttgaggttatagtaagctatgattgcaccactgcactccagcctgaatgaaagagtgagaccctggctctatttaaaaaacagagagagagatgacttagtatgggaaattctatataccctaggtaggaattatgtaatatttatagaaagttaagcatgttctttctcatctttattttagagatagagtcactgaagtcttaatcatgtattttttttttttttttaatattttcttgccgtttctggggaggcaatttcactagatgtagcatgtctcttagaaaaattgagctttcatcacattttaaaatttctcatcattgatctaaataacatgtacagataaaacctgaaaatattagcatgttttccttaattatgaagtaatttgagtgtctactaaggtgttcttgctgttgtttaatgttattgctctggttttattcagttacagctgggaagagtcactcgtgttcaaaagcaccggaagatcctgagggctgcaagagatttggctttggacactcttataatagagtatcgtgggaaagtcatgttacgacagcaatttgaggtcaatgggcatttcttcaaaaagtaagaacgtcattcattgagcagtgagggctaaggtggacctggttgaccagtgttgttgtaaaaatcattctgtttgataagacgctcttgggagaaaaaaatcacaactcagataagctcacacctgtctgctatttgtagagaagtgcaagtaaatcttcaaattgttcaatgtataaaatggtgacacctcctttccaagccaagcattccttgctttgtgcttgttctttaatcaaaagcagacaaacgtgatgctttcccaagtttaggcgttgcaaaagactgctgctgcttctctcagcatatgcttcatatttggagtcatggggtggccttcttatttgtgttgagaattacaggaattttaattgtatccctagaccatacccctttgtgctcttctactcaaaattcaatggtgtagagatgtgtgtggatgcccgtactttcggtaatgatgctcggttcatcagaagatcatgtacaccaaatgcagaggtaagatatctgtagcaacttccctttgactggaaccatcaaatgacaagcttactgaagaagcagtgtgaaaacttcactcagataaaggtctgtagataatagtcgtgatatttcatcgtgggaggtgaaaaacaaaagtaatggtgcttttatacgacaaaatgggcgcaaggaaagagttttctttagagaaggcagaaatagaaaagagcaagttagcatttgctaaggagaaaaagctagactggataagaaaatcaagtgtagttatattaaagagattgccatacggtggaagtagatgttgttaggcctaactaagctatttggttgcagtttttttagattttagtgagtaatgttttatgagaggatctagacatttctagaattcattactcagagcaaccacatcaaataaagcaagaaaatccacagagctttacttactggctaaggaattttaattctctggtggagctggaaacagctataagatgtgaaagcggctgggcgcagtggctcatgcctgtaatcccagcacttcggaaggctgaggtgggcagataacaaggtcaggagttcgagaccagcctggccaacatggtgaaaccccgtctctactaaaaaaaaatagaaaacttagccaggcattgtggcgtgtgcctgtattcccaggtactcaggaggctgagacaggagaattgcttgaacccgggaggcagaggttgccgtgagccgagatcacgccactccactccagcctgagcgacagagcaagactgtatctcaaaaaaaagatgtgaaagtagagattttaccctgatttctaacatctcaa

SEQ ID NO: 28938 - DNA, 2300 bp, Homo sapien
ttctccacatatttaagaaagtattataaattttcaagccagtgcagtataatagtttcagatgaaatgaaggggttaaataacagattaccataactccttaaataaataatagattaccataactccaaatggagagaaagtatggtttttttctctcttacggaaagttcatggtctttatgaaaaatccaaccagaagccttttcacacaggtgcgacacatgattgcagatgggatgattcacctgtgcatctatgctgtgtctgccatcaccaaggatgctgaggtcaccatagcatttgattatgagtatagtaactggtaagacctcagaaacctttcctaacaggaatatccatgtcttacatattaagctattcactctatttaaagtctgctcttgtttcttgccttttcctttgtttacttaatcttttcatgactaatgaattttctgcctagaaattgtaaaggaaaagacaggcaagattttttttagagatacggataccttgtatgatactgctcacaaatttcctgacagaagtgttttcgcttatgcctttttagcaagaatagcaaaatggatatatatgtatgtatgagacactcctggaaattacaatagcatcctgttgttatgcacagagtacttatgtcagggaccatatagaatgagaatttaggccaggcgcagtggctcacaggcctgtaatctcaacactttggaaggctgaggcgggcggatcacgaggtcaggagatcgagaccatcctggccaatgatgaaaccctgtctctactaaaaacacaaaaattagctgggcgtggcggcacacgcctgtagtcccagccacttgagaggctgaggcaggagaatcactcgaacctgagaggctgaggctgcagtaagccaagatcacgccactgcactccagcctggcaacagagggagactctgtcttaaaaaaaaagagagagaatttaatatgttacctctacttttaatttgtcaattatacccttataaagctaggggtgagatttaaagatccaccctgtccacagaaaccatgttatctagctgtatatgacagtgcagaaaaccataaagggcaattcatagatgaatatgtgggattttttaaagtatatgctttttgttctttggtcatttggggcaaaatagaggttatgtggtaaagtgatgtttggcccaggtataaggaaaaaagatgttctgcttaattcatcaaggaaaataaaaaaggttttaagaaggttataaaaggttttaagaagtagggaattagtaggtaaaagtgaggacatggtaatcgtgggcacaagatgagtatggccacatcagactttatcattgataaactgcctgctaaatagccaataaaccactggggggattgaatttagggagggctttcttttttttttcccactgaccatggagtagaattggggttacacaaagaaagacagaatattgaaagtgttacgtcaggcgcggtgactgacgcctgtaatcccagcactttgggaggctaaggctggaggatcacttgagcccaggagttcaagaccagcctagacaacatggcaaaaccccgtctctgccgaaaataaaaaaattagctgggcgtgtagtcccagctactcaggaggctgaggtaggaggatcacttgagcccaggaaacagagattaccgagagctgtgatgcaccactgcactccagcctagatgacagagcgagattccgtctccaataaaaagaaaaacaaaagtatttataggactctctaatgtctctgtttaacttattcagagacaatatcagaggaagttactgtactgatattttaagagggtgaatggataatgtaactgaatttcaagggtactgagacaggcattttggttgtttctttggagcagtaattataaagtggactgtgcctgtcacaagggaaaccggaattgtcctatacaaaaaaggaatcctaatgctacagaactgccactcctaccacctcctccaagcctacccaccattggagcagagactagacgtagaaaagcacgacggaaagagctagagatggagcagcagaatgaggcttcagaggagaataatgaccagcaatcacaagaagttccagaaaaagtaactgtatccagtgatcatgaggtaatcgcccctggtcaaatgatgatgctatggcatcaatcctccaaaggaagaggaacccgggttgccgcatggtttaagtaggggagcta

SEQ ID NO: 28939 - DNA, 2300 bp, Homo sapien
ctactgagcccagcctcacagccaagtgtcaagccagggcttctggactccaaaacctgtattgcttccttgctctttcgccataatagcgagacctttaaaatatttatccatctttgagcctcccagaaaactcctttgcaatatattttaatagaggttcagagaagggagaaatgttcttttgattttaacaacttgctgagtaggtgcatctaaaattaacttattatccatgaggttaattgtatcttgttagatacaaacaaatgtccatgttccttttttatatgagtcctgaaatattgtaaaattatacaacagaacctggaggagtaggtttgattgtatttgctgtgtttcacctcatagctaaccatggtagcatctttcttctagaatactcctgttctgattttatgttccctttttgtagtcatcagatccagaatgtaaattattttacaagtacatctactagaccctggaaatattaaaaaattactcagataggaaagcttagtgaccccaaatgagtgttttctgctttgaaaagaaaaacttaaaggtggccataacaaaagatttttcactcctgagcctaatttttccatttataaaatgagtgctttggacaagatgacttctaagttctcttctaagctttaaggctatatgtatggttctgacaattcatctttacatcattattctgtatctaagatagttcattcttcggattttttattttgtttttgtgtttgcttttcagagacctggttgtatcctaaaatgtttacgtgattcaaattaccattgagagctcttttttatatccttgttcactcttccttccaagtgtttacaggtttacagtttcagttttgctttcatttggccagccacaatgacatttgtatgatgtaagatttttttttttttttttttttttttggtaaaatttttgtggattgtttcctaggtttctaagagggaaaatctatgagaattgctctctggtgaagagagtatttacttacctgtaatacatgttctctaaaggtataaattataataattcacctttgctcttcctattgggggagggtcttactcagaaattgatgtttatcaaaattcgatctgtcttatgtcagggcaggagagccacagagtggtgagcaacctacaactgtatatcttaagagaacacaattacaggtaagaaattttctgtcttccacaggatacataatcttattatcctaatctttgcaggtttactatctggcctaaatttatttcttgtcagtttattattctaatctttactaccaaaaacttgtgactgataggtcttctttttgactttttcccttttttttgatttctactgaagctcatttcgtgatttgcattactcatgcataatttaaccaaactacttgttggaggggggagtcccataggttatttcatttgaaataaaccttttggaaacgcttttggtacctgtagtgaagagctattaatcctcatccaaaatcttccaatgaatcttttttattacctcttcacacgtctctagcacggggcagacaacttttaagagatctttatcttccttctaggcgcttattttatatattagttttattctatacgatcacagtctctcctaaataaatgttaagatttcttcctcagtcttgccattttacaccatcccaaatggtatgaaaagttgaatagcagtcattttttattggtttttgtcttttgatgggatctcattatatgtaatccagatttcctcaagtttttcagttaaaaggaattgataggacaatgttccaatatgctgagacacaagacaataaaatgcttgactgtgtaactgaattagtgtgttgaattgtatcactcaccagttgatgtacatttaaaacaggtgcactaaatagttttagataattattgataattctctggttcttttcaattatagcgctggataaaacaagccttagaagaagggatgactcaaacatcatctgtaccccaagagactagaactcagcacctataccaaagcaatgagaatagtagctcttctagtatctgcaaagacaatgcaggtacgtatctaaaacctttctgattatatgaccaatgattgtttcaggtctgcataaaaaatttaagtatgagtatttctgatacaaaaagaaatggcgtgttttctaaatagttactttacatctgtctttacagaggaagagagagatctcaagtcaggg

SEQ ID NO: 28940 - DNA, 2300 bp, Homo sapien
cctcctctgctccattccggcctgctcccagctcaccctgagggagagctgcaccgagggatgcacagggccctgctgtcagctgcagaccggggccctgatcagcccagagtcagaaaagactttcaggctctggaggtagcgggagggggtacgtggcctcggcagttggagcttagaagctgctcagcccgggctggcctggcctcctcttcctctctgctggaacatctcactgatgactgagcccttgaccttggcctcttttgcccaggcctcctctctgctgggatgtctcaccaatgactggacccttgaccctggcctgttttgtacagcacagacttcttggccctgttgtcagggttgggggtgtggaggggaccccagaggtggggagttgggggatgcattaccccttctgccccttttcatgccctccataccccaggcgtctaccaagggcagagactgtcttgtctctttgatacttttctgcataacttgaacttgcaggtcatctctgaacagggtacccctgtcccccttcctaagccttgttaccctgtcccagcctcttcctcctcctggcccacctctcgccttgcgatatgcccagggtctgcacctatgggcagtgcttggagccgaggcatgagtgtatgtgtatgtgggtgaaatgtgtgtgcgtgtgtgtgcgcgtgtgagcgtgtgtgtgtgtgtgtgtgttgggggacaggtgagaagtttctcccccctccacccactgtgggggcgtctcccttccccttggcagggagcaggtgagggagactcctggtattttttgaacacccgtcattcccctgtgggtctggcggcagagccatctctcccggggagcctccctgccctggggcctggacagctccctcagcactagttgctggtgcagaccggcttcgtccagcgccccctcctggcggcctggacctgcagggaaggggcggtgccctgcaggatgccaggggaagccgcctcgggcctcggcggaggggagagggtcgcttgagcgccatgtgtttgccaaccttgtgttcatttccacaggacttggacctgagagttagggtttccaagaaagaccctagaagtcccctgcctgtctccccactctggaccctagccggaatcagatgttgggacctagtgggttcctgccacctggaacttaccaagtcccgacttcactcctccacttactcctcccgggcaaagcctccccgcagtgctctggtcccagcgctgggctccccttccccgccggcgccttcccggacagtccagtcggcctggggtaggggcgctgcgggacagagggtccgagttaaatgcgggaggatgcgggagccccgtgggagggagttggggtaggagggagttcctcaaagatgcaaaccaagcccagcgttggagggggagagcagagttaggagagagtgaggggaggggcgcagcaagcgactgggaatgggagaagacactggggtgaggagaagaggggtgcagagacagggagatgagagatgattggagaaggagcgagggggacgcacaggcacagagaaacagcgcgaggaggagagatcgagagagacggggcagaggtggagagagatgagagaccagctgagaggctgcccgagagcttggggtgggggaggggaaatggatgaaaaggcggaaaaaggactcgggagcggggaagaggtaaatggagatgtgggttgggggcaagaatgggatgcagaggaaggagaggaggatgaaggagccaggatgcggggcagtggggagggggttgctatctgggcactgggtgaggggagagcttgttcccccaaggacgcctgccaccaggtgtccttgccacaccttgttccccaaggacacccaccaaacctgtgccctggtgcgggggatagaactgacctttcagaggctggaggcccggggcacaggcagccaaggccgcatccttttgggaagaactggagtgaaggaagccacttcagaggacgtagtgggtccagctgacttaggagtgggtcagcgccgggtggagaggagggaggctagttccctggtggggtagcctggcaacattcccattccaccgcacctggccagctgccatcttggcagagccagggggagatgcaccagggagtttggagtcaggaaggcagagttgtgtgggctgaagtctgcgggaaccccagggtgacacaggcaaggggtagaagtcagagtggggacca

SEQ ID NO: 28941 - DNA, 2300 bp, Homo sapien
tggacttttatgattttttcccaggactgcttagcttggctcagcaggctagacaataaggcaataattcaagcagagtatggagtaaagagtaatgaataacctggtatgttcagggcaggacccaaaccaggagcagccccagaggggactctgagatgctctttgatgatggccacctccctgctccctgccctcagcatcttccatctccctgtgaagctgtgagctccatgagagctcaccggcagggaccacgtctgttttactgaccaccttctccccagtgcttagcctggtaactgtgcctggcacatgacaggggcctcacacatttataggatgattgaataaattaatgaaccaggttgatcagtctgactggcaggatctatctacctctctggataagtcaacccccttctttgacctctgttccccatctgtaaagtgggagaaggtatagaaagaaacactctccacagaccctgcagctcatgattccaggatcacagggttctcaggaaacagccaagatgcgtctcaagaagccaaatggaaggggaaatcaaatttattgagcacctcatgttcaagcgctgaatgagactaattcacgtggttcccaggtctccaaattgtgggattttatggatccataactttaataaaatttgggattgaaataggctatctactttttattttggcaaataaagacatttaaaaaacctcccgttaactatcaccactatttcttaaaagaagtgaattttttttttgcaagaagcaagtaggaaatacataatctcaaaacaaaaagagcagtccgacttccccactggaaaaaagacagttggcaatcttacatgatttttttttttttttttttttgcagataaaattgcatttcttgttgaaatttcttttagagacgaggtctgtctctgtagcgcaggctggagtgcagtggcacgatcatagcccacagcagccttgaactcctggcctcaaatggtccccccaccttaccctccctagtagctgggatgacaggcacaagacactgtgcccagctccagatacacattttgagattgacccgtgtatggggtccagtatttgagacctgctaacatggattgctttttgccaccccaccccacttacatgcctgtgaagtgtgacttaagctgcccactttacagatgaggaaacagaggtttagacagagtggtagtgcaaggtcacagagacagttttagactcagtttgtctgggttcaaacccacatcatcttgacagatcctaagccaaaggctattttccagcagggaaagaaatgaaccacgccggctcccccttggggtgcgcctggggtgttctgtgacctaaccctgtgcctggcctttgatgctttttccttaacacatctttatggtgtgcctacttcatgccaggcgctgagctgggggcaggggagagtgtagggagggaaaccaaaaatgtcccagcccctttctctcctgtcccctagtactcactccgggtctggttccccaggcctcgctccttgccctggcagccaacgaatccccatcgcaggcgtgggctgctaccagtttaaggggttccctctcccaggggtgttggcagtttcctaggagactctgggaaccttcaacgcctccaagacccaaaggactgaaagcgtaatggtgcaacttcaggcactgtgataggttccaggggaggtaattgggagtaagagatccgttcaaatcctgtcaaataataccccctccagctccttccccactcccataggctttgtggggcctcacagccccttagctcaggctggaagaagggagtcccctacatcgggggccctactgtggaggtgtgcttgctgccccggctgggggaccccaggtatcgtggccacccttccccccaactgccagaaccaggagcacccttccccggttccgccccgccccgtcccgcacgcccgctcgggagcgcgcctccgccgggccgcgccggtgcacgagagcgcgcgcctcggcgcgggagcgcgccccggggagaacccgagcaagatggaggccgcgcagaggccgccgcctgggccgaggcagccgctgctgggagcgccgagccgcggcgcctaggccgtgccagtcccggatccgctgcctccggccgtgcccaggttggtctccccgcaccctttccccgcggccgcagcctcgcgcgcgtccggcctgggcgcggggcagccgcccccccaaccc

SEQ ID NO: 28942 - DNA, 2300 bp, Homo sapien
gaactcctgggctcaggtaatcagtttaccttggccttccaaagtgctgggattacaggcatgagccaccatgcccggcctgtaatttttctttaacaccatataatccagtcatttcattccttggtgtttaagacaaatgcgtatatagatttgtcagaaaatatctagtaggccaggagtagtggctcaaacctgtaatcccagcactttgggtggcagacgtgggaggattgcttgagcccaggagtttgagactcgcctggacaacatggtgagactcggtatctacaaaaaaatttaaaaagtagctgggtgtggtggcacatgcctgtagtcacagctacttgggaggctgaggcaggaggattgcttgaggccagtagttggaggctgcagtgagccacgatcatgccactgtactccagcttaggcaacaagagtgaaaccgtttctaaaaaaaaaaaaaaaaaaaaaattaaattaaattaaaaaccaatctaccgtattaaaactctagaagccaggatagtgattaactgggggtgggaggagttgggggggcagggtggtgggtggttgttggtgagtgggtagtgactgaaagtggtcaggaggagggttccggggcgctggtgtacatatcatacttctattaaaagtttaacaaaaacgaattactttcattcagactgggtattagaccacattaaggaatattgttaattttcttaggcatgttaatagccttatattttttatgtattttttttttgaagtacaaatctgttgtgataaatgcttaagtattcacagctgaaataatgtgatgtctgggatttgctttaaaataattccctggatgggaagggactgcttaaacaggatagataagcagatgttgattattgttcaaaaccagttaatgggtacatgagggttcattatactattgtctccacttttgcgaatgtctgaaatattctaataataataataatgagaggcttctcatcacagaatttcaaggcagtcgcttcacctccctgactcccagtttctacctcaataaaatagggctgatgatataatgcactgtactcacagggatgttgtgagcagcagggggagaaagggttttatgaaatgttgtgtttttgtttttgttttagagacggagtctcattctgtcacccaggctggagtgcagtggcgcgatctcggctcactctccgcctcccgggttcaagcaattctcctgcctcagcctcccgagtagctgggattacaggcacctgccaccacgcgcggctaatttttgtatttttagtagagacggggtttcactgcgttgatcaggctggtctcgaatgcctcacttcataatccgcctgcctcggcctaccaaagtgctgggattacaggcgtgagacaccgcggccggctgaaatgttttaatattggtaaccactgccattatggtttctagtactaatttgttgcctccaagcgttctctcctcctcgccctgtaattttttttttttcttaagacagagtattgctctgtcacccaggctggagtgtagtggttcgatttcggctcattgcaacctcagcctcatgggttcaagcgattctcctgcctcagcctcccaagtagttgggattacaggtgggtgtcaccatgcccggctaatttttttatttttagtagagatgcggtttcaccattttggcagcctggtctcgaactcttggcctcaagtgatccgcccgcctcggccccccaaagtgctgggatgacaggtgtgagccaccacgctcggcttccctgtaattgttgattccacttttcctctggttcttttcaatggttccttcctgctacccccctcccccggcagcccaatggttgagcccggcttccccgggggaaaccccttggggcggatcacgcggtatcagccagtggcctccctggtggatagaaggatcgctctgcgccgggggcgggccagtaatcgtaggcggggcgcgggtccagagctccgattggccagagtcggagtaaacatccggcgggacggggcggggccggaagtggaagtggaagtagaaggcggtggctgaggcggttccggaggttctagtgtcggagttgggtgcaggcaggtgccatgggcccgcttgaggcacactgaggggacgcggggctgggccatggccggcgctcgggccgccgccgccgctgcctcggcggggtcctcggcctcttcaggcaaccagccgcctcaggag

SEQ ID NO: 28943 - DNA, 2300 bp, Homo sapien
ctcactacctttggactaacttcttgcaaactttttttttcagaaggagtctccctctgtcacccaggctggagtgcagtggtgcgatcttggctcgctgcaacttccacctcctggattcaagcgatcctcctgcttcagcctccctagtagctgggactacaggcatgcaccatcatgcctggctaatttttttttttttttttgagatggcgtctcactctgtcgcccaggctggaatgcaatggcgtgatctcggctcactgcaacctccgcctcctgggttcaagcgattctcctgcttcagcctccccagtaggtgggagtacaggcgcccgccaccatgcccagctaatttttatatttttaatagagatggggtttcaccatgttggccaggattatctcaatctcttgaactcgtgatctgcccgccttggcctcccaaactgctgggattacaggcatgagccactgcacccagcctaatttttgtatttttagtagagaaagggtttcacctgttggccaggctggtctcaagctcctgatcagaagtgatctgccctcctcggtgcctcccaaagtgctgggattataggcgtgagccaccatgcctggccctcttgcaaacttcttgatgttacagttcttatgccttttttctgttgtgtttttctctgaactgtgatcaaaataagtaattttagggggagctgtttcttctatttcaccagcaagttgtgtataaagagactttgcagcttttactggttgcatggaatagagcttgtaggtactagtctatggctaaagaatggggaagagggccagtacactggctcacgcgtgtaatcctagcactttgggaggccaaggcaggtagactgcttcagcccaggagttcgagagcagcctggaaacatgaaccccatctctattaaaaattttttgttggctgggcgtggtggctcacccaggaggcagaggttgcagtgagcagagatcacaccattgcactctagcctgggtgacagagcaagactctttctcaaaaaaaaaaaaaaggaatggggaagaggccaggcatggtggctcacacctgggaggctgaggcgggcggatcacttgagatcaggagttcaagaccagcctggccagcatggtgaaaccccatctctactaaaaatatgaaaattagccaaatatgctcacttgaacccaggaggctgaggttgcagtgagctgagatcgtgccactgcactccagcttggatgacagagtgagactgtgtcttttaaaaaaataaaggccgggtgccgtggctcacgcctgtaatcccagcacttggggaggccgaggtgggcgggtcacctgaggtcaggagtttgaaactagcctggccaacatggtgaaacccctgtctctactaaaaatagaaaaattagtcaggcgtggttctacgcacctgtaatcccagctactcggggtgagacaggagaatcgcttgaaccccggacgcggaggctgcagtgagctgagattgccccactgcactgcagcctgggcgacagagcgagactccgtctcaaaaaataaataagagaatggggaagctgaccaatgaaggtagtggattagtggcagtttcagtaacctggaccaagagttcttatgttttatgggttgtagacctctttgaatctaatgaaagctgtaatcgtctcccccaaatgctcaatacccacaatttcagattcattgttaggggtttaagaatccttcctgaagtatacaatatatgggttaatggactacacgtaggacctgtggcctagcatcacatcttcccagcacagaataattatcacccaggtacatgtctttcccagtgacctcttaggccatggacctcctaattctcaccctcagaaccccagaattctctttgtgttctggtctccttctctgtgcaggttgagcgcattgagaagagatgtctggagctgtttggccgagactactgtttcagcgtgattccaaacacgaatggggatatctgtggccactatccccggcacatcgtgttcctggagtatgagagttctgagaaggagaaagacacgtgagcatcatgtgaccgtagtgtacatgtctggggagtccgtggcagctaatccctgtggccaggaagtctgtagctgggcagggcagaatcactttccccaggtgttaatccttattggcatttttatttacttcaaggttggacaagtcagactggcaaggtggcatggca

SEQ ID NO: 28944 - DNA, 2300 bp, Homo sapien
ggatgaggatactgggtcctgtcccagggtaatgtctttgttctttctcttgacctccccataggcttgcagccctgagtgatcgagagactcggctgcaggaggtgcgctcagccttcttggctgcgtacagcagcacagtggggcttcgggcagtagcccccagtccttccggtgccatcgggggcctgctggagcaatttgcccgtggtgttggactccggagcatcagcagcaatgccttgtgaagaagccagcccatgacattttcctgctcctctctcagctgagcccttagcagagaatcaaagccatgcctggccgaaggggtacttccaggtcaggggaaatttcagtcccccatctccatcatgaacatggcagccccaaagctgagcaaggccaaagacagggttttccaacccccagcctcttgactggtgaccaccaccccttcttgtcactgtctcccacccaccccatctttgctgggattcccatcaactctcagaactgtgtggggtttccctggggccttgtggaagccatgacttcacaaagaccctacctgtcagttcttgtttctggggaggagggatcacctgcactgagaatgaggcagtttgacacagatcacaaaataaaatcaaagtctttttgaatagccactcttgtgtcatcatttggttattgtctttgtggagctactaggaaggttctcattgtccttccttgtgctggacaaggggtttttatgtggagggcaggtgaaacaggaagagaactggcgacaggtatacctctccactcatgagccatggtagtccctgcagtggggacaacactcaagactgttgagagtagtggttctcgggcctaagcaggtcctagtcacctagagagcctgatgagctgtgcacattcccagggctgcctgagctttagccttagggttgctaaggaagttgcctgggaattaggagctggaggatcttcatttttttcagattttttgagatggagtctcactgttacccaagctggagtgcaatggcacaatcttggctcactgcaacccctgcctcctgggttcaagcgatcctcctgcctcagtctcctgagtagctacgtgaacgtgccaccatccccagctaatttttgtatttagtagagatggggtttcaccatgttggccaggccagtctcaaactcctgagctcaagtgatctgcctgccttggcctcctaaagtgctgggattacaggcatgagccaccgtacctgaccaggatcttcatctttaacaagttctgtaggcagcagggtcctggtacgggtgacctgcatcccctaccttgagccctgcctatggaggaaggactggcttctgaagctttggagatagcaattggtgtgcatgtgtggtgggtgagagcctggctgaccaccaccctcttctacagtgtaacctacagtagattgcgtcatgagagtgtgtccgcatctgtaacgccatgaaagtcgtgagggttaaaggcatgggcagacagctttgcacggtgctcaacagccaccatttactgtcatcattgtgaatacccagaggacaaatcataaataccagtgaatgtttactgagcacttgctgtgtgctaagtgttttccttgggttatctcagtaaaattttacagcacctaaagtagctgctgttaaaggcctttctgacggcctttcacggttgagccacagagatgttgagtaacttgtccaaggtcacacagctactaagagatgtacttttcctattcagagacctaggcaggctgggagtgggaaaagacagaaacactaagggagtggctcagtaagaggcaacaattccagtgcccaccaggtgccccaaatgtttcagcatcatggacaactctagggggcttgggtttccaccccagagacttgcgcagggcagactctaccaaggtgtgggttggagttgggagtcggggtgaggttccccgctggctccaggctgctccaatggggcgggggccgcccgcagggccgggcggggctgtgctgccatctggagccgctgccgccggcggccactgtcagggcgcgagcggctggagcgcacgcagggctggagcgagtgcagccgccgccgccgccgacaccgcggcacatgggccggccccgccgctgccgtcgcccctagccccagcagccctggtctcgcagcctcctgcggctctggtcgcccgaccagccatgtctctcggcggagcctccgagcgcag

SEQ ID NO: 28945 - DNA, 2300 bp, Homo sapien
ccaccccctgccaaccccagcccgatcccagctccagagcagccctgaggattccacatatccaatgcctcacagtctgcaagcctgctcacccactgcttctgctttaagccagaggcacctggaaccctggacttcactgggagggccaacttggaggatcagtgctggctgacaagccctccgcctccttgcctgcagagggcctggcactatcaccacctctctgccttcatgccaataataaagctgatctttattccacctctgtctcatgcatgttggcgaaggaagactatgggacccaacgactggggccacatcaagagggagggaaccaggatggcttcagttagattcatccccatcctaacacgttcatccaatcacttcttcatacattcttcaaagaccttaataagtgaaactttgtatgtttttcctcaggagagaggcccatagttgttttttttcttttttccataaaatccgaatcctacacacgacccatagttctcagcagattctcaaacgaattcctgaccactaaaggagataacttagtataactctgctttgatccatctattctgaattattttaataaggataataacagctaatattttctttgaacattcactacatgtcaaaccgtgtgctaggtgatttacaagcatcatctcatttaattctcacaacaactctgagaacaggtactatatattattcccactttacccataaggaaactgaggctctgagaagatgagtcatttaagataattcatcagtttgacttcagatcccaagatcttaatcagcaaacctcttcctggcatgtcgattttattgggatggtttttagaaaacatacattttattgggtcaaatgcaaagtttgcattaagaagatagaagctttcagatgctttgggctttgtcccagaaccctggaagacctttcacgctcctctttgatgacaaaactggagaagtattgtttaaggatgtctccccctgccatgcaagttctctgaaaccctcaagaactaacaacagagttttcgagctctgttttacaaataaggaacttaaagaactgaacttgcccacgttcacattgctaggaggtgacccactcacattaaatcagctgttttggcaccatgttccaatcagcaacccgcagcacatccctgccaacccacagatttcccaccgctttaccagacaagccctttcacacccaccggccccaaaccagccccttctctcagacccataccttttctctagcacctctcctttacttttcccaagtttcttccctttccttcagtcacgccccgttatccctaatcggtcctgccctttccccacagctccgcccctgccttaccaagccccgcctgctcccttcagcgtcgcatcgctttttccaactttgttctttatttctagtccagctccactttccaggctcatccaaagctccgccctttctctcgcgagtactcttcttctgtttagccccactttttaccccgctattctaacaggcccccgctgtgcggtagccccgccccctcccacaagccccgccccacagaccggtctagtctccagccccgccccggtcctacccataactaccggtcccttaggctccagcccgcatccctcttgctcccggccctgcccccagccccgccccgtgactctggccccgcctcaccgccttcctccgagaccaaggccaggtccctcccgcagccgcggcgccagcaggaggcagggagcggatagggaggaggcagagggggaggggagaagggcgggctcctcacgcccagccccgcgctcaccgtccgtggttgcagattcgccacaaaccgcccgacgaccccagatcccgagtacggtgacttcagtctccagaaactccactctaagatgggagagctagagaagccctgtggggtgtccagggtcctttctgaatcccggagcacggtctttcgagcctcagcgggcgggcggggatccgtggcgaaagtgcagctcagtagcgccgcggcgccacgtttaccctgcgcagacgccgtcgccgccgctgctgccgccgccgctgccacagcctttgccgccacggtctccgccgccgctgtcctcgcgctgcctctgggagcctccattgttccagcagcgcccggtcccgagaccgggcatcttgggggctcgcgaaacgggcggcggccgacggagttgagaccccagggcgccggcgggaccaggag

SEQ ID NO: 28946 - DNA, 2300 bp, Homo sapien
gaggtcagggtgcctcctttttgtacccataaataccctgtgattaccctcccgccgccaccacacagtataactgttgactgggctctttcatctctagaccatgaacagtcctttgagggcagggaccatcacagagtctggccagagtgggtgcttgggtggtgtgtttgagtgaatagaggaggaaggctggtccttgttctccctgagatgatttatttgatcttcaccttatcctataggcagtggctgcccaggaccaagctggttcctctgggtgtgaaccaggacctagacaaggagaagatgctggagggccgcaagtccaacatccgcaagtcagtacagatcgcctaccacagggctctgcagcaccgcagcaaggtgcaaggcgagcagagcagtgagaccagcgatagtgattgatactgctcaacacagcccaacctatagtgccctgtgacttctctcctcccctttgctcactgtcctggagtggcaccggcctctgcactgactcatttctggtcttggggccagtctcaggggaagctgggtgggggaggtccctcctgccctaagtgcagctggactgtacagaacactccaagggccaatggcagttcagcgcaaggagagggagggcccacaggtcagaaaaagctccagagacctcacagcattgtagggcggggtggtgggccaaagttaggacactgcgtaaaacaggccatcccaccacctctacctgctcatgccaggagaatccataactgcctagaggcctggggcccctaccggtcgtgaggtgagtgggcatctgtccagcctggaagaggggcactaggtgactccctcccctgctgttgtaaatactgtaattatcggagaatttaaattattctcatttgtaactgcgtttccgggtcgcgccagagtcatttggtactaaaaaaaaaaaaaaaaaagactgggggctgtccccatttcccttctctttcccatagattcccccacctttcaaactggtttgtatttatttcaaaggaagaaaatatattgattcttagaaaataaactgtcaatttagaattctttgttcttgccccctgccagggcaaaggggatacaaagggaggttctgtgccccagggatgatacataattgggcccaagtggttgctgactgctgtgcatgctacatttcataagacacagcaaagagagcccctgttgcccatgcatggagtgagtggcaggccctgtgttgagcacctttagacattcagctttgcgtaatccttgcaataactatagggtagtttaataatagactggttatctccacaaagatgctgaagtttcaaaaaattatcttgcctaagttcctacaactaggaaggtgcagagctagaattggaacccaggtctgtttgcaaacctggctcttcaaccagtatgctgaactgccaggggaagagtcaactatcgattcctacttggcccttagaggcctcaagtcctttgccagtggcatggcccaagtgtttcagcatcaatacagctgagaccttccccactgcttaaccggagacagagctgggatggagacggttgctctttgctcacccccaacctcagcaccttctttccagactccaccgacatttattgaaggaatgccttccaagtgctaggcgcctgtgggatggcatgcctacagataggaacagtcacaggaagaaggggcggcccaggccttgcagccactgaggactggcactgagacaatgatggcactggtctgatgttgattccatgctgacggtacactccgctaggtctctggctgggacacaagggtcaatccgctgcagatgttgctcttcaagaatttgcagtctgggcggggtgcggtggctcacgcctgtaatcccaacactttaagaggccgaggcggctggatcacgaggtcaagagatcgagaccatgctagccaacatggtgaaaccccatctctactaaaaatacaaaaattagctgggcgtggtggcgcgcacctgtagtcccagctactcgggaggctgaggcaggagaatcgcttgaacccgggaggcggagcttgcagtgagccgagatcgcgccatcacactccagcctaggcgacagagtgagactccgtctcaaagaaaaaaaacttgcagcctgatagttaagatacagcaaccccaaatccctatgctaaaaggtgagaatggcccagataaaggtcatgtctcctagctccctgctttttc

SEQ ID NO: 28947 - DNA, 2300 bp, Homo sapien
tactaaaaaaaaaaaaaaaaaagactgggggctgtccccatttcccttctctttcccatagattcccccacctttcaaactggtttgtatttatttcaaaggaagaaaatatattgattcttagaaaataaactgtcaatttagaattctttgttcttgccccctgccagggcaaaggggatacaaagggaggttctgtgccccagggatgatacataattgggcccaagtggttgctgactgctgtgcatgctacatttcataagacacagcaaagagagcccctgttgcccatgcatggagtgagtggcaggccctgtgttgagcacctttagacattcagctttgcgtaatccttgcaataactatagggtagtttaataatagactggttatctccacaaagatgctgaagtttcaaaaaattatcttgcctaagttcctacaactaggaaggtgcagagctagaattggaacccaggtctgtttgcaaacctggctcttcaaccagtatgctgaactgccaggggaagagtcaactatcgattcctacttggcccttagaggcctcaagtcctttgccagtggcatggcccaagtgtttcagcatcaatacagctgagaccttccccactgcttaaccggagacagagctgggatggagacggttgctctttgctcacccccaacctcagcaccttctttccagactccaccgacatttattgaaggaatgccttccaagtgctaggcgcctgtgggatggcatgcctacagataggaacagtcacaggaagaaggggcggcccaggccttgcagccactgaggactggcactgagacaatgatggcactggtctgatgttgattccatgctgacggtacactccgctaggtctctggctgggacacaagggtcaatccgctgcagatgttgctcttcaagaatttgcagtctgggcggggtgcggtggctcacgcctgtaatcccaacactttaagaggccgaggcggctggatcacgaggtcaagagatcgagaccatgctagccaacatggtgaaaccccatctctactaaaaatacaaaaattagctgggcgtggtggcgcgcacctgtagtcccagctactcgggaggctgaggcaggagaatcgcttgaacccgggaggcggagcttgcagtgagccgagatcgcgccatcacactccagcctaggcgacagagtgagactccgtctcaaagaaaaaaaacttgcagcctgatagttaagatacagcaaccccaaatccctatgctaaaaggtgagaatggcccagataaaggtcatgtctcctagctccctgctttttcatgccatcctccagaagggaagaaattaaataatccatcctcctactccaggcgactagaaggcaggctgcctcagggccacacactgggacttggactcaacctgatgggcttctgggcccagccccagacaaacccccggcaaacgtcccattccgaggaaagcatgagcagatggagtatggaagaaatgcccaagacggcaggcagcagctgtggcggccggcgggacgacaatccgaggagaggcctctgatgtcctgaggtctcagaggacgcctaaaggccttgaatgggacaagcttagcgggcgggcgcagaagagaataatactctggagacacttcccgagggctctggggccggagctgtgttcgctccggttcttggtgaagacagggttcgtgggaggcggcccaaggagggcgaacgcctaagactgcaaaggctcgggggagaacggctctcggagaacgggctggggaaggacgtggctctgaagacggacagccctgaggaaccgcggggcgcccagatggaactcgttagcgccccgagtgcagacaatcccggagggggaaaggcgagcagctggcagagagcccagtgccggccaaccgcgcgagcgcctcagaacggcccgcccaccctgatttctcattggcgcctcctacctcctcctcggattggctacctctaggtgaaatgagcggtggttgagccctacttccggtggtgctgtggtctgcccctggagaacccagaagaacacagctgtgcgcgcccacaggctctgggggcgggagaagataagtcgcaaggagggggcgggacctacacctcaggaaagccggagaattggggcacgaagcggggctttgatgacccgcaaagggcgaggcatgcaggaggtggaggaattaagtgaaacagggaaggttgttaaaca

SEQ ID NO: 28948 - DNA, 2300 bp, Homo sapien
tctctgcatcctgagagctctttcttttttttttgaggtggagtctcactttgttgcccaggctggagtgcagtggcgcgatctcagctcactgcaacccccatctccgaggttcaagtaattctcctgcctcagcttcccaagtagctgggattacaggcacgcaccaccatgtgtggctaattcttttatttttagtagagacagggttttgccatgttggccaggatggtcttgaactcctgacctcaggtgatccaaccacctcggcctcccaaagtgctgggattacaggcgtgagccaccatgcctggccctgagagccctttctatgcagcaaatacttgcctaagattcttctggggctcctcagtgccctcaggatcaagttggtgctcctctgtggcatatgaggccctaagaggcctggccccttacctgcttctctaaattgggctcctgcctctcagtcccctcagcccctccagtctggccaggcttagcacttgcacttcccggaatggctatagacattattccgctatgcctcactaattcctacttaactgacagctctgtcaggtcatcaccacttttatgacctttctcggaccccataggctggatcagatgcctcctgaagaattacagacttcttcctctagacttggaggtgagggaccctctctggaatagagaaggtgttgggagtgtttgttgaatgaaagagtgaatgaatgaagtccttcagtaaggatccctaagcagttactgtgtgcccagtgtgatgccaggtgctgtgcaagctgagcctgggtagggatggggaggagtcctggggaggctgggaccagaactagggatatggactcaccttccacttgctcttggcaaagttcttcttgatctgctcactcaccgactggtggatattcttatctagagctgtatctcctgcaatcctaggatggggttatgtggtgggttgcctatgagggcagaagcagacctgagggccccaaatcccgccccagctcacaggttgtgtgaattctcaccatgggtgctgcaaggcctgctcacaggtgaatcttttctctgggtccttctccatcaagtgccggatgaaatctttggctaaacccccaagacaaaagcaaagataatgacagcatggtactgcctgtgtactccccaagagcatacccactccctcaggtctggcctggcatcaagacaaagaggccaaatcagtccatgccccaccccacccaacctatgctcttcttcaggccctcccaccccgtgccttccagctctttcctttctctcttaagaaaaacatatggccgggcacagtggctcatgtctgtaatcccagcactttgggaggccaatgcaggtggatcacgaggtcaggagttcaagaccagcctggccaagatggtgaaaccttgtttctactaaaaatacaaaaaaaattagccgggcatggtggtgggcgcctgtaatcccagctacttgggaggctgaggcagagaattgctcgaacccgggagacagaggttgcagtgagccgagattgtgccactgcactccagcctgggcaacagagcgagactgcgtctcaaaaaagaaagaaaaaaaaaaaaaagttgttcttgactaatctcagtgcattcacactgatgataaacgatagtagcttcacaggtttgcttcttaatagggggcacaaaaggaggatgaaaatgtttatggtggtgttttagacattagggtgtcaataggggagaggtattttcaaatagactatgtttgaagattgaacaaatgaatgcctagtttctcactctgggagccaagcagaaggaagtacccaagcagaaggaagaaggggtagggtgtctggtctcgaagacagctctttgtgtggtgctggaaaatccgacagaaggaaggcaggagggagaccgcccccaaagcaggtgagggaggaaccagaggcagggcccaggggaaaaaagcaaagccccaaataccagagtcagagatgtcgtcccagtaaggagagtcaaactcgtactcggccttcaaaatctgttcaaagagtttggcatcattctcgtcatagaagggagggtaaccgcagagcctgggcagggagaaactcatcctcatttccactttcgggtgccgttggctccggggtggagcactggggcagtctcaggggtcaggcaggagccatggaaggagttccccctttataaactctaccagccctgcctgctcactcc

SEQ ID NO: 28949 - DNA, 2300 bp, Homo sapien
gggaggctgaggcaggtggatcacctgaggtcaggagttcgagaccagcctgaccaacatggtgaaacccccatctctactaaaaatacaaaaattagttgggcgtgttggttcacgcctgtagtcccagatacttgggaggctgaggcaggagaattgcttgaacccaggaggcggaggttgcagtgaggcgagatggcaccattgcactccagcctgggcaacagagggagactgtctcaaaaaaaaaaaaaaaaaaaaaaaaaagaagttgtacaagtcctcgaaaggacagaggtcatcttatcacccagggggtgttgtcatcaagatgaacaggaatttgtggtaaaagaacccctagctcagtgggtgtgcttggtgggtataggggagagtgggggctcagccctgagcaggaaatgtatttttccatgaactaaggagtctgagatactgagatttggaagatggatcccttaacccctcatccctggccaaatcaagtcctctctctgagtctcagtttacactgagtctagctctcatgttttgaatagtgttctaggcacttcatatcattatatcatagaattctcagaactctgagtcaatcttcaatattcccatgttcccgagtaagaaactgaggttcggagaggtaaagcatgaccaggatcagttagactccaaagcctttccaggaacctcagctatcttcctctctcatctgtaagatgggcataataaattggccaggtgcagtggctcatgcctgtaattccagaaccttgggaagctgattggggaggattgcttgagcccaggagtttgagaccagcctgggcaatatagtgagatccccatctctacaaaaaataaaaaagccaggtgtggtggcacgcacctgtagtcccatctacatgggaggctgaggtaggaagatgacttgagcccaggagtttgaggctgcagtgggccgtgatcatgccattgcactccagcctgggtgacagagcaagaccctgtcttaaaaaaaaaagaaaaagaaaaaaagaagaagagaaagaaagaaaaaagaaagaaagaaagagaaaaaggaaatgagctgggcataagcactgttctctccccatcaccagctggaacatgcaagaattcaggagtagggagtggcacttggaggcccttggaggtggagtggggtcccaagcaacgtgcctcctccggctgcccccagttcagccccatccccaattcctgcgagttgctccccccgccccctctttccactcggcaccaaatttcttcccaaggaaggccttgagcaaaccgacctttggcctcttgcctgccgtcctagttgcaggctctctcccctaacctggaccccagccatcaaactctggagccccgccagtcacgtgacacctcggtcctttttggcctgtttccttcaggatcccgatttaacttcctcctccccaattccctctgcccccaatacctctaggcaccaccacccgctctgaggagcaagtgtctggggctgaagcctcagctccatcttgcagaggaaccggggcctcagtcttcccacctgtcaagtggggcccacaccctgcgaccacctccactctcttcattgcctagtcttgcccggtccttccccactccctcactcccccatcccccaccagactcccgtgcagttccagggcctgtttcccttcagggcacggagaagggagacagagccctaagggaggtcgcagaactggtctgaaagaaaatccaccaggccacagggtgagtttggccggcctctagcttcagacagacggggttcgaatcctgctttgcttccgaccacccgctgatttgaaaatcatctctccgggcctcagttgtcccctctgtgaaatggaccccgcttaagaccaagggcgggaagcgtccagcaggagatctctgaccagaagcagggagatggcctccacccgtgccccttccccagccttggagcggtgcctcgcctcccaatcccgggtccctccgccgcaggctccacctccactgacatcagagccgcaggcgggcggagagagccgccgagccgagccgagccccagctccagcaagagcgcgggcgggtggcccaggcacgcagcggtgaggaccgcggccacagctcggcgccaaccaccgcgggcctcccagccagccccgcggcggggcagccgcaggtacagccgggccccccatccctgcacccctgggcgctgcgtgggggcggtggg

SEQ ID NO: 28950 - DNA, 2300 bp, Homo sapien
gtgaatgagattatgagaagtatatgaataaagttctaggaggccaggcacagaaaatgagctgaattttgaaggatgagtaagagtttactaggtaaaaagaggatggggaaagacccaggagcctctgtagattctagatcctaatttattcactagaggaaagagatattctgtgttttcccttctccccctcagtgacactttctgtaaatttcagatcctcaccgactggcaggataagaaaggtgacagacgattcctgaagctgggtcgagaccatgaacttggagctccccccaaacatgggaagcccaagaagcagaaactggaagggaaggcaggacatgggccgggccctggcccaggacggcccaaatccaaaaaccttcagcccaagatccaggaatatgaattcactgatgaccctatcgacgtgccacggatccccaaaaatgatgcccccaacaggttctgggctagagaacatagaagggggcctcaaggttctggtggtggaggcactggtggggcaggggcgcccactcaggatctgcttctccctgcaggttctgggcttcagtggagccctactgtgctgacatcaccagcgaggaggtccgcacacttgaggagttactgaagcccccagaagatgaggctgagcattacaaggtagaaactctgggccttgatagacatgatgcggaacaagagagttcagaggtgcctgagaagtaaagctaccaaagccatgcatcatcttccttccccaaccctgcccagtctgctgtctgctccatcagtgcctccagacacctaggcccaaactcagctttctccgtgcactgcctcccctctaccccagccaaatgtcaacacgccctcaagcatctacttaagtgaagtctgcccatgttcctttatccccatcccctctgctttggtccaagccttcatcaacttctatccaaacagcctcttaactctcttcctgtttcgaggcctctggaggaacctttcttctttctttaagatataaaacttgggctgggagcagtggcttatgcctgcaatcctagcactttgggaggccggggcgggcagattgcttgagctcaggaatttgagaccagcctgggcaacatggtgaaaccccatctctaccaaaatacaaaaaattagccaggcatggcggtgtgcgcctgtagtcccagctactcgggaggctgagtcaggaggatctcttggacccgggaggtggaagttgcagtgagccgagatcacgccactgcactccagcctgggcaacagagcaagactccgtctccaaaaaaaaaaaaaagatataaaagtcacctcacgcctgtaatcccaacactttgggaggctgtggcaggcagatcatctgaggtcaggagttcaagaccagcctgaccaacatggtgaaacgccgtctctactaaaaatacaaaaattagcctggcacggtggcatgcacctgtaatcctggctactcgggaggctgagccaggaaaatcacctgaactggggaggcatcggttgcaatgagccaagatcgtgccactgtattccagcctgggtgacagaaggagattccatccattaaaaaaaaaaaagccgggtgcggtggctcaagcctgtaatcccagccctttgggaggccgaggcgggcagatcacaaggtcaggagattgagaccatcctggctaacacggtgaaaccccgtctctactaaaaatagaaaaaattagccgggcgtggtggcgggcgcctgtagtcccagctgctcgggaggctaaggcaggagaatggcgtgaacccgggaggcggagcttgcagtgagctgagattgtgccactgcactccagcctgggtgacagagcaagactctgtctcaaaaaaaaaagaagatataaaactatgttttaatgatgaaaataaataaaacatgctccattaaagaaaatttagaaaatacagaaaaatgttgagggagaatcctcccataggtgagctgtcatgatcagatgtgctcatgacatggcgctgcatccaggcctttcttcctcccgttatctacaggatcaagtccacgcatcccagtccttgctggcacagctccagtgcccctctccattttcctcggccatatccctcttcattgccgtgttgaccagtcccaccaagtatctcgccctcattccaggacaccacagcctcctcgctggtctctgggcctctggcaagctcttctctccctcttgtctccttgacag

SEQ ID NO: 28951 - DNA, 2300 bp, Homo sapien
tggcacttcacagctccaacgtgcacccaatcgtgttgtttggtcacactggaatgaccatcacaccttgtctcttcaactagaccataagctactgaggaccagaaagcccaccttaaccatctctattttgcagaatacagcatagcgcctggcacacaaggctcaaggcatctttatgcagtgaataaagtcatcagagtagcaaataaataacatctgaagtacttacttagtgtctggcattgggctgagtttttgcaaaaaattctcttttaatcctcacaaaagcactaaggtaggtcctattattcaccccactttgcagatagggaaactgacactcagagatatgaggcaactttctcaaagtcacatagctaggaaacagcaatgctagcaagcgcttatgccaggattcaaatccaggtttccccattccagttccctaggactgctaaccacaacatcacatcacctggtatgtacttgactttctcactttcctagttgccaagctccctgacagccataactgtcctaattacctttctctaatgactagcataggacccagaacacaatgggggatgagtggggtgccaataaaagcttactgaattagaaatcttgcaatttaagaggatcatgcatattcttgtgtattttttgtgtcatgcaaacccagtttgcgtctctctccctctccccacaaacccctgtaccccaagtctcagcatatggggctaactcaatgacccatcccataacttgttgcagtccatctctggtgctggcccctctctggggttatcacctgggtttcggcctcaagcacacgcaggcgccggctggcagaagacagcagggtctccagctccagctgcagggtgtccagctcctcgatgccgatgccatcatcctcagagcgtgccagcactgccgtgtagcggggacagaccttcaggtgatccacagacttgaagtcgtggaactgcaaggggcagtctttcaactcactcatggcccaggatatggggatcctgtggagctggagaggacagggccattgatgggagacaaagtggtctgagaaaagcccaagggcttcttacctccagggacagcctcaaggaagcccagcttcagtcccttactgacaaaattgatggcacagttcctactcacagggcacttaactgggtaccaagctaggtgcagagcactttatcagtttatctcactgaatttctcactcagcaccatgaacaaggaccattgtgatctcgtttttacagagaaagaaactgagactctgtaagggtgggtatgtgcctatgcttccaagatgcaatttgaaccccgctagtcttgagtctgcaccctgatcaccatgctatactgctatgccttgcctcgcctttctgatgctctttccttcccttctatttctcttgggttctgctaagactttgagttccaagcaccccattcttaccatgttctctgggactcttggcctcttttcttaccctattccacctttctcccttctctagtcactaacagtggtttagaacgtgggctggtaagccagacagacctgggttcaagcccaggctttaccattctctacttatatgcccctgaacatgttatttgacctttttcagtctcagtttttccatctgtaaaatggggacaaaagaagtctcggtctgtttccccattaaaagtctgaatctgaaaaatggggataacaatagtacctacctccctgggatgttctgaggattaagagatgatgcccgtcaagagcccagttcagtgtctggcacagaagtgggactgtttaatggctggccccgcccgggggtcgcccaaatgtcccgccttcagagtcctcgttctctagggacaccctagtgcgacccccgccccctctacctcctcgctgcggcctcctacggccccaggggccgcgggagggggcggggagttccggtcgatgtgagcaaccgccccggaactggctatgggcgggccccttgcagttgacgcgggggcggggagtcagcgagggcgagcctactggagtttgccgggggtgggaagaaggtgggcctcgagcaaagccgctagaggtggggtgcgggtggtcggcctcaggcgagccccggggcacagcccggggcgggaggcggagcttggcggccgagatctccgcgctgcagttagccccgccgagcgccaggagctgcgggtaggaggggcgagagaaaggatgggggtacagaacc

SEQ ID NO: 28952 - DNA, 2300 bp, Homo sapien
atgactagcataggacccagaacacaatgggggatgagtggggtgccaataaaagcttactgaattagaaatcttgcaatttaagaggatcatgcatattcttgtgtattttttgtgtcatgcaaacccagtttgcgtctctctccctctccccacaaacccctgtaccccaagtctcagcatatggggctaactcaatgacccatcccataacttgttgcagtccatctctggtgctggcccctctctggggttatcacctgggtttcggcctcaagcacacgcaggcgccggctggcagaagacagcagggtctccagctccagctgcagggtgtccagctcctcgatgccgatgccatcatcctcagagcgtgccagcactgccgtgtagcggggacagaccttcaggtgatccacagacttgaagtcgtggaactgcaaggggcagtctttcaactcactcatggcccaggatatggggatcctgtggagctggagaggacagggccattgatgggagacaaagtggtctgagaaaagcccaagggcttcttacctccagggacagcctcaaggaagcccagcttcagtcccttactgacaaaattgatggcacagttcctactcacagggcacttaactgggtaccaagctaggtgcagagcactttatcagtttatctcactgaatttctcactcagcaccatgaacaaggaccattgtgatctcgtttttacagagaaagaaactgagactctgtaagggtgggtatgtgcctatgcttccaagatgcaatttgaaccccgctagtcttgagtctgcaccctgatcaccatgctatactgctatgccttgcctcgcctttctgatgctctttccttcccttctatttctcttgggttctgctaagactttgagttccaagcaccccattcttaccatgttctctgggactcttggcctcttttcttaccctattccacctttctcccttctctagtcactaacagtggtttagaacgtgggctggtaagccagacagacctgggttcaagcccaggctttaccattctctacttatatgcccctgaacatgttatttgacctttttcagtctcagtttttccatctgtaaaatggggacaaaagaagtctcggtctgtttccccattaaaagtctgaatctgaaaaatggggataacaatagtacctacctccctgggatgttctgaggattaagagatgatgcccgtcaagagcccagttcagtgtctggcacagaagtgggactgtttaatggctggccccgcccgggggtcgcccaaatgtcccgccttcagagtcctcgttctctagggacaccctagtgcgacccccgccccctctacctcctcgctgcggcctcctacggccccaggggccgcgggagggggcggggagttccggtcgatgtgagcaaccgccccggaactggctatgggcgggccccttgcagttgacgcgggggcggggagtcagcgagggcgagcctactggagtttgccgggggtgggaagaaggtgggcctcgagcaaagccgctagaggtggggtgcgggtggtcggcctcaggcgagccccggggcacagcccggggcgggaggcggagcttggcggccgagatctccgcgctgcagttagccccgccgagcgccaggagctgcgggtaggaggggcgagagaaaggatgggggtacagaaccggaagaaacgaagggctcgtccgcttcggcttgtcctaatttggtgcccaatctgaagctgggctgtaccattgcatacctgggggaggctgtggcaaaggtgacaagaaggccgaaggcacaaagggaagctgcacccattcctggaggagcttaaatagtgactcgagtgcaagaatttaaaaataccgagacagccctaggtggaaaacttccggaaggcccaagcgttcgtaagggctctctaccccgctcggagcatagatggtaccgtccggaagtccgggcggagaccgtagctgcgcttctcgcgaaagggcaggcatcgcggggctggccacttccgtacttccgctttccggcccagccagcgcccgcgatggtgagagagccgggcccccggccagggacccccggctgttcggcctcagggcagtgggtcggtgggagatgtggctttgccgcaggggcgcggggccgagggatgtccgggggttgtggggacacgatgagggtgggaaaaagagacggggcgggggcccgaggtgaggaagggg

SEQ ID NO: 28953 - DNA, 2300 bp, Homo sapien
aaaaggcaaaactacaggggggaaaaatcagtagttgtctggggtgggaaggagaggactgattacaaaagggcttgagggaactttttggggtgacggaaatgttctgtattttggttgcagtagtggttacacaacttgactttttttttttaagacacgggatcttgctatattgtccaggctgaagtgcagtggctattcacaggagtgatcacagtgtactacggcctcgaacttctgggctcaagtgatcctcctgcctcagtgtcctgagcggatggtactacaggcgcatgccaccatacccagcaagtttttgcaacgcttttttttttgagacggagtcttactctgttgcccagtctggtgtgcagtggcacgatctcgactcactgcaagctctgctttctgggttcacgccattctcctgcctcagcctcctgagtagctgggactacaggtgcccaccaccacgcccggctaattttttgcatttttagtagagaagaggtttcaccgtgttagccaggatggtctcgatctcctgacgtcgtgatccgcccgcctctgcctcccaaagtgctgggattacaagcgtgagccaccacgcctggcctttgtcaacagttatagaaagtaaacctaaaaagggtgactggctccgtgacgcctgtcctttcatgaataaaacagatgtagtctcatgtaatacctcaataaacttgaacttttaaaaatcaagaggcatgtgccccactagaaaaaaaaaatacagatttttagcagagacatgaggtcacaaaagtttgccaggatagggaacccaggaggaagaacaaatttagaatagaatatgagttttgaactagaggtctaatttcaaggtctcttcaagatatccaggcaaaccttgaaagagagctgagaagccagattaggagtcatcagaatgaagaaagttatcgaagccaggagactagatcggtatcaccagggaaggtgtgacgaagagggagatggtcatccaaagtcacaactcccaggaatgcccacacgtatgaaaaaggcccacatgtatgaaaaaggcccacatgtatgaaaaagggaggacttccaggaagggagggatgagcagtatcacagctaacatacactaaggctgacacagttcagttctgaccaggaagggcctgaatggaagcaacacgagagatcctccaatggggtggaagcagggctggaggtaccaagaatgggataaggaagtgtggccgcctgccttaagcaactgtagggtcaggaaggcagaagaggacaaagggcgtatgtcgtgaagttccactgtggataggcaggtggacttgcttcatgcctcagaggctaagaggccgactacgtaccctcgaaatgctccaaagagcctaggagaccccacttccgggttcctacagggctcaggaaaagcccctacctgcttcgaaggctgaccgtgaagccacaaggcccacttcataccagggagtacccccactcgccccttcctcacctcgggcccccgccccgtctctttttcccaccctcatcgtgtccccacaacccccggacatccctcggccccgcgcccctgcggcaaagccacatctcccaccgacccactgccctgaggccgaacagccgggggtccctggccgggggcccggctctctcaccatcgcgggcgctggctgggccggaaagcggaagtacggaagtggccagccccgcgatgcctgccctttcgcgagaagcgcagctacggtctccgcccggacttccggacggtaccatctatgctccgagcggggtagagagcccttacgaacgcttgggccttccggaagttttccacctagggctgtctcggtatttttaaattcttgcactcgagtcactatttaagctcctccaggaatgggtgcagcttccctttgtgccttcggccttcttgtcacctttgccacagcctcccccaggtatgcaatggtacagcccagcttcagattgggcaccaaattaggacaagccgaagcggacgagcccttcgtttcttccggttctgtacccccatcctttctctcgcccctcctacccgcagctcctggcgctcggcggggctaactgcagcgcggagatctcggccgccaagctccgcctcccgccccgggctgtgccccggggctcgcctgaggccgaccacccgcaccccacctctagcggctttgctcgaggcccaccttcttcccacccccggcaaactc

SEQ ID NO: 28954 - DNA, 2300 bp, Homo sapien
tgaatctaaaatgcttctcatatacagaaacattgtactcattactactctggaactcttgctgtccttttgtgttactctaatcttaattatttctttcgcttatttattctacaggaaatgagtgagacactgtatatgttaggtactgagctaggttggaggctatatagctgtgaataaaatagatatggtctgttgaccatgaggtttacagcctagtaaaggagaaatcacttacaaaggcatgaaggagggcaggtgcagtggttcatgtctgtaatcccagcactttaggaggccgagatgggcgggtcacttgaggtcaggagtttgagaccagcctggccaacatggcgaaaccccatctctactaaaaatacaaaaattaaccaggcacggtggtgcacacttgtcatctcagctattcgcatggctgaggcaggtgaatcacttgaacccgggaggtggaggttgcagtgagccaagattgcaccactgcgctccagcctggacaacagagtaagactctgtctcaaaaaaaaataaaaaaggccaggcacgttggctcacgcctgtaatcccaacactttgagaggccgaggtgggcggattgcctgaggtcaggatttcaagacaagcctgaccaacacggtgaaactccgtctctactaaaaatacaaaaattagccaggcatggtgatgtgcgcctgtaatcccagctactcgggaggctgaagcaggagaatcgctttaacccaggaggcggcgattgccgtgagcagagatcgtgccactgcactccagcgagggtgacagaagcgagactccctctcaaaaataaatattaagaagacatgaaagacatttttttgtcaattgtaataaatactttatagggggatgtcaaggtctctctcaagaggccttccttaattaagctgagatctggaggatgacttaggcaaagaaagaggagaaaagcctacagatagatggtcaagcatgtgtaaagctctgaggtgggaaagaatttggctgatacaaggactgaccagtgcagctagaagctaatccctctcctaagaatgtccttattctggcagggtgtggtggctcacgcctgtaaacccagcactttgggaggccaaggcgggcagattacaaggtcaggagattgagaccatcctggctaacaccgtgaaaccctgtctctactaaaaatacaaaaagttagccgggtgtggtggtgggcgcctgtagtcccagctacttgggaggctgaggcaggagaagggcatgaacccgggaggtggagcttgcagtgagccgagatcgtgccaccgcgctccagcctgggcaacagagcgagactctgtctcaaaaaaaaaaaaaaaaaaagaatgtccttattctcctttttctcctcctaatcccatttcaccttcaaaaccagtttcttctgcaaatatagattacttgtaaatctaaatatttcacatgtcatctttatatcatagttattttctgtatatttgctatccagttgagctgtttgagggtagagacagtgttaatcatctttgaattcccagttagctcagtgcgtggcaaacagtacacctatacatttgttggcctaatagattgacgacaatcatgcattcactggtgtgtctctagatcactttctcaaccttagcactattgatatttgagtctcgataattctttgtagtgcattgtagtatgtttagtggatatctgtccactgaatgcctgcagttccccttcttgccaagtcatgacaattgaaaatgtctcagcattcctctggtctgaccccaggttaaaaaagaaagaaaggaaatgtctcgacattaccaaatgtaccctggcaggcaaaattgtctcctgttgaaaactaccactctacaccttggaaggcgtctcgaaggcctagtctgttctgttcacagtagtgtcttaagagccttgcaccctcagtgctacctggcttcatgggagctggaataggggatcggtgggtttggcgtgacagattttgatcttccctttcctctgtgttatttcctatagactgccactctccgcccctacctgagtgccgtgcgggccacattgcaggctgccctctgcctggagaacttctcctcccaggttgtggaacgacacaacaagccggaagtggaagtcaggtagggaaggacaagtcaaggtggggatgaggggtgcagcacacagagatggctgctgtctagaaggtgccatgaacttat

SEQ ID NO: 28955 - DNA, 2300 bp, Homo sapien
ctatattttttccaccagcccagtggctgggctgttgaataatttccagtgttcatgatgtttatccttgccttgaggcttggaggtccaggaaaagggctgggtgtgtaaaaggttcactgaagtgtttcatatttaatattggaagtctgggggccaaggggtaaatataggagtgggtgtcagggtaagcttcaagaagggtgaacctttgagctgagctttcaaaagggattcctccagatggccagaggggtttcttctgatggggtggacaaggtgatgttaaagggaggagggggtaagggcaacttggaacagctattgcccccctcctccccccccctttttttttttcatttttgagacagggtctcgctttgttacccaggctggagtgcagtggcgcaagcatggctcactgcagcctcagcttccccaggctcaagtgattctcccacctcagcttcctgagtagctgggaccacaggcctgtgccaccacgcccagctaatttttttgtttttggtttttgtttttttttaggtctcactatgttgcctcggctgccttgggtgatccccccgcctcagcctcccaaagtgctatcatctcctttatgacattacctctgtgacctacctcgccacccctctgaattaggtgttccctcctccagggcacatggctatgttctagctttgcagtgaatgttaaaggtgctcacagtgaaactgggtgactaataggatatagcagctggtcactcaacaaccctcacaggacagcattgcctgggtgagccagccacaaacctcatttgtcatgtatctctctcccagggtccaaattccctaaatcacctttcctggggggcatgcttttcgggaagtccagccatcagctaaaggggagttggggtcagctggacaggaaggtgggggatccaccttcactcttaagagcacatctacccagtgactgacaaagctgggctcttaccaggacactcttcgactctgcctgcgggggcactgctagagtttgcctctcaaactgtccctgtgtggtccttctgtgactggcaggcaacctgagtgataacaggtgtttaagagacaggctttggagtcagacctgggttccagtgctgcctctgctctgtgatttgaggcaaattgtttaacatcttggagccttacctcccctgtgacttttgaggataatattttgccagtgcttccaaaaaggttgcttacagtcttagcctgggggccaggcataactgttgtgaactattacatttctttcgcagttgactcaaatgattgtttttccatttccagtttctggggagggtgtgctctgcaccttcttgttacccccatatgctgccctcgctaaggaccttaccctaggcccatctgccaggcccagcaggtctgatctggcctcaccaggctccagccaccctggctgtcttgtagttcgcacagaggttcttacccttctcagggctgttgctgggactgtcccttccctgaagtgcagttcctcccctttccctggtgactcctgactcctggcatttacaccttcagcttaaatgcgccactttatctaaaatgcgcccccttcctggtttcacctctgcttgttcattgcccttattatacctgtaaactattctcttcctttgttacttgctttttattcccctcacactgggcttttagtaagctccatgaggtcaggggccatttgttagcgcctataaatactgtggaatcactcaaaccctagggccggtggcaccaggaagtactggataaggaaccgcaacactaactaactggggctcagtgctctcttccgccttcagtgccctgctcatcaagggtctgggtgaggccccaggtcataaggaagccctcgctcgactgccccggggcccatcgcagcccccaaccagccccgagcggtctgatggtgcccagggaatggtttccaaggcaatagcaaacggggcggggcttggaacggaggacaaggctcgagcctaggcaggaacttcccgggagaggaggcggcgacgcggaggggcgcgggatcaggggccctgggagggcgagcgcggcgaggggcgcatgcagggccccgacgcgccactgctcctgagcgcgagggagctggggcccgggcgccggggctcggcctcctggtaccgccaggagggcggcgcggtgtgcaactggctgcggaagccgcagccgctcgagccacgcaccagtttcccctcg

SEQ ID NO: 28956 - DNA, 2300 bp, Homo sapien
cctctccgtgccccttccagcccagcctcgaactccacatcccgtagatctagcccctacctgtcatctacacccagaaaacttaacaagcatttcaaattcatgtcccaaaccagactttgatcttcctgcccaaacctgtcgtcctccccagtctccagtctttcccatctctcagttcctcacgccagaaatctcatctttctgtttcttcacccacaggtctaattccatcagcaaaaccacttgtcatctccacctccaaaacgattctcaactctagcaccttctcccgtctgtgttgtaaccaccttcattttagtaattgtgatttctctcctaggcaaactatgacagcctcctagctggtctacctccatcctgtcccctcatctttttgtaatacagcagcaagccaagcttagaaagattccctcagttagccttttttgctcatgacactcttagtatgaaatccaagtccgttccaaggcctgcagggccttccacagtctggccactgcctacctcctctggggctttccccatcattttccatgttccactcactctggtctcccttcagttccttctgacctctctccagcctcaaggcctttgcacatgcattcccctctgcctgaaccgccatttcccagctctgtacattcatggcttcctttcaaccttccctgaccatgtatttctaagtagtttctctggatcccattaagtatgcagtttctggagccaaactgccaggatgtaaatccctgctcttttgcttaaccactatggggcctcaggcaccctgcttaatttctctatgcctctgtttcatagcccgtaaaatggagataacagtatctaataaaaatgcatagtattggccagacgcggtggcttacacctgtaatcccagcattttgggaggccaagtcaggaggatcacttgaggccaggagttggagaccagcctggccaacacagtgaagcccagtctctaccaaaaaatataaaaattatttgggcaccagatgaggtggctgacgcctgtaatttcagcactttgggaggccaaggcgggccttggcctgaggccaggagttcaagaccagcgtggccaatatggtgaaaccctgtctctactaaaaatacaaaaattagccgggcgcagtggcacacgcctgtactcccagctactggggaggctgaggcaggagaatcgctcgaacccgggaggtggaggttgcagtgagccaagattgtgccactccagcctgggcaacagagcaagactccgtctcaaaaaaaaaaaattatctgggcgtggtggcatacacctgtaatcccaggtactcaaggagactgaggcaagagaatcgcttgaacccaggaggaagagggtgcagtgagccgagattgtgccactacacttcagcctgggcaacagagtgagaccctgtctcaaacaaaacaaaataaaaacacacagtattgttagtaatgcatgtaagtgctcagcatgtagtaggtcctcaataaatattagccattgctattatcattattaccatgcatatttatttctctacttatttatagtctgtttatttctcctaatggaatataaaaatttcctgatggcagagtccataactgtctggttcacctttatatcccctatgtctggcacttatgcaatacttattgaagaagtatccttctctcacattgcagcagaagaagatctttacaatccaaggctgctacccggtgatccggtgtctcttgcgccggaggggctgggtggagaagaagatggtccatcgctcaggccccaccctgctgccaccccagaaggatctggatagctcagcgatgggtgacagtgacaccactgaggatggtgagtggttccttccctttccacagctgttgctcctgagtccttttcctttggttcccactgtcccagagttgaggccttatgggctatgggtcagggagaggaaactcatcagctctgggctctgcatccacagaggatgaagatgaggacgaggagttccagccatcacagctgttcgacttcgatgatttactgaaatttgatgacctagatggaacacatgctctgatggtgagggccctgggggccaagatgatacagggactgcctgcttagagggagggcattggtgtccagctgggtgacctcagacaagtcctttctttctctgggccacagtttccctatctgtagtaaaaactgcttctttaaaggctggatagagctg

SEQ ID NO: 28957 - DNA, 2300 bp, Homo sapien
accttgttagtaagaggaagttctcaggacaaggggaagtatacaattcagaaaatttggagtctgaccagtatctggcaagttcaaatccagcccctgcaccgtatccggcatttgtagatatgatgtctaaaatgggtctggaggtagaacaatcaccaaatccaatgatagtgagcaaacggactcttacctcctaagcagaagatatctggctaatggacccattctgtcttacctgggtttctttttttttttgagacagagtcttgctctgtctcccaggctggagtgcagtggtgcaatctcagcccactgcaacctctgcctcccagttcaagcaattctcctgcctcagcctcctgagtagctgggactacaggtgcgtgtcaccacacctggctgatttttgtattttttagtagagatggggtttcaccatgttggtgacctcaggtgatccacctgcttcagcttcccaaagtgctgggatttcgggcacgagccatcatgcgcagccttacctggtgttcttagcaagtgacttcacctctctgagcctcaatttcctcatctttcaatgagaataccagtaaggcccatcttctggggttgtggcaaggatgaagggctttataataatgacctgccattatattattggtgtgggttaggaaggattctagaggaagcagctctttttttatttttaagagatgaggtcttgctatgctgcctaggctggtcttgaactcctggcctctggcctcaagcagtcctcccacttcagcctcccagagtgctgggattataggtgtgagccaccgcgctcggccttggcagctctttaagaatgagaaagggtgggccgggcacagtggctcacgcctgtaatcccagcactttgggaggccgaggcaggcagatcaccaggtcaggagatcgagaccatcctggctaacacggtgaaatgccgtctctattaaaaatacaacaaattagctggatgtggtgtcgggcgcctgtagtcccagctactctggaggccgaggcaggagaatggtgtgaacccgggaggcagagcttacagtgagccgagatcgcgccactgcactccagcctgggtgacagagtgagactccatctcaaaaaaaaaaagaatgtgaaaggggggacaggagggacatcaggcattcttggcaaaggacacctcccaggcaaatatatggtgatagatgtgagcaactcagaccttgcaagcggggccaaggctctgagcgcagatccagtcagagtctttctgaactgtctgggtgtgtggtgagtgtgggcagtcctgccctgccctctcagtggctaactccgtaggtgggtctatgtctcaatctccggaatttgccgtggtttgatgaggttgatgccaactccttcttcccacgctgctactgcctgggggctgaggatgacaaaaaagccttcataggtaaggagacccccagccctatgcctgaacctcaggctgacagagcagggctgaagctctggctcatattggagagaaacaggcctctcttcatgccctcatctgcctgccccagcagatttccctttccaccctcaatccttatccttccctaatgtgccctcccttaataagcctcttagcttggtcaactctgacctccagaaaagcttgggtagcttggcttatattctagagcaggttctaaaagttggtcagtcccttgagtttggaatccagaacagattccaggcttatatcaagttccatttgttgaattgggttccaaaaaaggctgcaggctttggatttctaaggcagactaggttccgattccacaatatgttctaaattcaggttagaatttggatccagattctatgctagatttaaattacattcagaatctgaactaggacacagtctggttctcaggacagaataagtatcaaaagtaggtgatgaacagaagaaacaaatcagacaatgggtccaagccagattctgaaggcagaatatgatccaagtcaggtcagatttggggtctggttacacaactgaaacaggagcaagttcttttttttttttgagacggagtctcgctctgtcacccaggctggggtgcagtggcgcgatcttggctcactgcaagctccgcctcccaggttcccgccattctcctgcctcagcctcccgagtagctgggactacaggcgcccgccatcacgcctggctaattttttgtatttttagtagagacggggtttcactgtgttag

SEQ ID NO: 28958 - DNA, 2300 bp, Homo sapien
tcaccaggtcaggagatcgagaccatcctggctaacacggtgaaatgccgtctctattaaaaatacaacaaattagctggatgtggtgtcgggcgcctgtagtcccagctactctggaggccgaggcaggagaatggtgtgaacccgggaggcagagcttacagtgagccgagatcgcgccactgcactccagcctgggtgacagagtgagactccatctcaaaaaaaaaaagaatgtgaaaggggggacaggagggacatcaggcattcttggcaaaggacacctcccaggcaaatatatggtgatagatgtgagcaactcagaccttgcaagcggggccaaggctctgagcgcagatccagtcagagtctttctgaactgtctgggtgtgtggtgagtgtgggcagtcctgccctgccctctcagtggctaactccgtaggtgggtctatgtctcaatctccggaatttgccgtggtttgatgaggttgatgccaactccttcttcccacgctgctactgcctgggggctgaggatgacaaaaaagccttcataggtaaggagacccccagccctatgcctgaacctcaggctgacagagcagggctgaagctctggctcatattggagagaaacaggcctctcttcatgccctcatctgcctgccccagcagatttccctttccaccctcaatccttatccttccctaatgtgccctcccttaataagcctcttagcttggtcaactctgacctccagaaaagcttgggtagcttggcttatattctagagcaggttctaaaagttggtcagtcccttgagtttggaatccagaacagattccaggcttatatcaagttccatttgttgaattgggttccaaaaaaggctgcaggctttggatttctaaggcagactaggttccgattccacaatatgttctaaattcaggttagaatttggatccagattctatgctagatttaaattacattcagaatctgaactaggacacagtctggttctcaggacagaataagtatcaaaagtaggtgatgaacagaagaaacaaatcagacaatgggtccaagccagattctgaaggcagaatatgatccaagtcaggtcagatttggggtctggttacacaactgaaacaggagcaagttcttttttttttttgagacggagtctcgctctgtcacccaggctggggtgcagtggcgcgatcttggctcactgcaagctccgcctcccaggttcccgccattctcctgcctcagcctcccgagtagctgggactacaggcgcccgccatcacgcctggctaattttttgtatttttagtagagacggggtttcactgtgttagccaggatggtctcgatctcctgacctcatgatccatccacctcagcctcccaaagtgctgggattacaggcgtcagccaccgtgaccagcctgaaacaggagcaagttctaaactcaggctctagagtcagaaaaggtagagtcaggttctggatccaaaatggggcaagtcatgatcaggttctggaaccagaacaggcctcaagcctaggggctgagcagggtatcccctggcctgggagcagaggacttctggctgactgctgcccgcaacgttctcaagctggtggtgaagtctgagtggaagtcataccctattcaggcagtagaggaagaggcctcaggtaagtactgtggttacctccactctcccacccatttatcctccacccatccgcccttccacctatctgcccttctacctatctattcatccacgcacctactggttcatccacacatctgtgtatgattcacatctacccatctatccatccatccaccagccatccatccactcatccacccacgtattcacccactctctgatctaccgattcacccacccacccttccactcatccttccatcctcccacctgtcacccattgttaatctcgtcattcatctacctgatgtcagctccatactccccatccatctatccactccctgcctacctatccttccacagatccacctacccatctatctacctgctattccattctcccatctactacctatctgttcttcaggccatccactcatccattcttctgtcccaggtacttagacacttgtcttcccatccgtttgttagttgatccactcctcattcagccctcccatgggcctggcatgtagccgagcaccctggagagggcagactaagaagacatggtccgtccctgcctgtgaggagt

SEQ ID NO: 28959 - DNA, 2300 bp, Homo sapien
ggctgacttttcattaaaatactgttttttttttctttttgctaactataaaatcatattgtcatgtcgaatatactttttcaaattacgctcctgtgtgatattttcctgggccacatcacagattactgaaaagatacttcatgctacggaccacagaaaagtttgtcaggacataggtgtgagtactcctgggagaccttgcctagccccctgcatctggctgtccctgttcctggcactgccccagtggctgctgcctcctccttaaaaaagagaaagttctccatgactggagacactcaagatgctaagatgtcacagagttagcttcccctgaacaggaggctcccgtcctattcagtcagaaggaaagaaatgcgagagtctggatgaggcagccatctggggtattttgtgacttggtttagttcaggacattttctgtcttgtagagaacagggtccctctttgtccatgaaaccctgtccgtgcagcccagttgctgaggcaagctcctaccaaagtacttgctgagccaaccgttcattcattgagcaaacttccagggagtacctgctgagtgccaggtgtggtgcttggggatggggattatagcagagaacaactacagaaaatgttcctgctcttacggagtttacattgtagttaggggattcagacaataaccaaataagcacatgtgttaggtgggggtagatgatgggaagaaaacaagcaagaagaggtgtgatatagaagtgcttgaaaggaattaggctaacattgtttcagccaatattaggcacagattaagacaggaatgaaccccaaaaagcacctgtgggtggaggaatcagacaggacagagtttgaatcctggctgaaccactcaactttcagtgtatggccttcggtaagtcccttaactctcaaagcttcagtttactctttttgttttttgagatggagcctcgctccgttgcccacactggagtgcaatggcgcgatctcggctcactacaacctccgcctcctggcttgaagtgattctcctgcctcaacctcctgagtagctgggattacaggtgcccaccaccacacccggctaatttttgtatttttaggagagatggggtttcaccatattggccaggatggtctcaatctcttaaccttgtgatccgcccaccttgccctcccaaagtgctgggattacaagcgtgagccactatgcccgtcccagtttactttttcttttcttttcttttctttttttttttttttttttttgagacggaatcttgctctgtcgcccaggctggagtgcagtggtacgatctcggctcactgcaacctccgcctccctggttcaagtgattgtcctgcctcagtctcccaagtagctgggattacaggcacctgccaccatgcctggctaatttttgtatttttagtagaaacaaggttttgccatgttggccaggctgttctcgaactcctgacctcaggtgatccgcctgcctccgcctcccaaagtgctgggattacaggcaggagccaccgtgcctggcccagtttacatttctctaaaatgggaccagagctgggtgtggtagctcatgcctgcaatcccagcattttgggaggctgaacaggaggatggcctgaggccaggagttcaagactagcctgggtaacataataagacccatctctgcaaaaaataaaaattagcttgggtgtggtggcgtatgcctgtaattccaactacttgggaggctgaaacttggacctaggagttcctggctgcactgagccgtgatttcaccactgcacttcagcctgggtgacagaccaagaccctgtctcaaaaaaaaaaaaaaaaagtcggggggtagggggtgggtactagtaatacttccctggcagggccttgagggcattcgtgaaaatatatggaaagcccttgtcacaatgcctggcacatagtggtgctttatcattaggaactggaatgattaaattctgtcaaagacagttttaatgtaataggaagggggtggcacaggtggagtgttggagtagggggtggtttgcagttaatggaattttatcagcctttcccatttgtgtagtctgggcaggttaggatttccggggtggcttgaaggtggggccggaggcttgggagggacctatggatatctgcagggagggcgtgaccaaggctgcctggatgacggcgggggatggtggaatatatctccccctgccctctccacctgcatgtcccaggt

SEQ ID NO: 28960 - DNA, 2300 bp, Homo sapien
gggctcagtggctcatacctgtaatcccagcactttgggaggctgaggtgggtggatcacttgagcccaggatttcaagaccagcctgggcaacatggcaaaaccctgtctctacaaaatatgcaaaaaaaaattagccaggtgtggtggcatgtgcctgtagtcccagctacttgggaggctgaggtgggaggatgatctgagctcaggaagcagatattgtagtgagccgagatcttgccactgcactccagcctgggtgagagtgaaaccttgtctcaaaaaaaaaaaaaaaaaacaattgagatggggtcttgctatgttgactaggctggtctcctggcctcaagcaatccacctgttttggcacccaccccccgccaatgtgctgggattacaggcatgagccactgcacccagccttcttactctattatattttttaaagcagggtctcagtatgttgcccaggcaggctaccctccaactcctggcctcaagcaaccctcccgcttcagcctccttatcttttttttgagacagagtctcactctgtttcccaggctggagtgcagtggtgtgagctctactcactgcaacctctgcctcctaggttcaagcgattctcctgctgggattacaggcacgtgccgccacacctggctaatgtttttgttgttgttttgtttttgaatctctgtttttaaagcagggtctcagtatgttgcccaagcaggctaccctccaactcctggactcaagcaaccctcctgcctcagccttatctttcctttttttttttttttttgagacagagtctcagtctgtcgcccaggctggagtgaagtggcgcgatctcagctcactgcaaccccacctctggagttcaagcaattctcctgcctcagcctcccgagtagctgggattacaggcacatgtcaccatgcccggctaatttttgtatttttagtagagacggggtttcgccatgttggccaggctggtctcgaactcctgaccttaggtgattcacctacttcagccttcccaaaattctaggattacaggagtgagccaccggcccttaatcctttcttatgaagacacttgccattgaatgtaagcaccacactggtcattgggattatctcatttaagatcttaaatttatttacatctgcaaagacctttttttttttttttgatttagggtttcactctgtctcccaggctcagagcgcagtggcgtgatcacagctcaccacagttttgatcttcccaggctcaggtaatcctcccacctaggcctcccgagtagctaggactacaggtgtgtgccaccacacccagctaattttctgtagaaacggtttcaccatgttgcccagactggtcttgaacttgcgggctcaagcgatctcctgccttggcctctcaaagtgctgggataacaggtgtgagccaccatacccagctacaaagactcttttcccacataaggtcacattcacagggtccaagtagacatctcttttcaggggaccacagttcaacccactacaactaagcagtgccacacttttcttcaggtgggtgtggcttattggatgtttcatttttaggtgaccttggccccttgctgaagaagggatagacccatgccctctgcagaagggctgaggtttaggcaaggccaattccttcccctgtctcatggcattaacgttcctatgcccggtaggtgtcattctgctagcttggcttgttctctggggttggggggctcccagtgctcggcagttctggcaatatgtccctgcgtcgactcactgccacgtgatcttgggtaagccatgcctcctctttcagactcagtttcttcatctgtaaagtgaaggctcacgctccccacccctggatcggagatgctgggggagtccctaaataggaagccccatgtctgtccttaggtgggaattctgggcctcgctgcacggaggagctgctgatggcctcaggctcttgctgtggaccctggggtacacggcctcgccccatccactcttgaccctccaacagcaatggagtcaagccccaaatacttcacttgtttctttttatttggtgttggatccaggacaagggcagtggggaatcgaagcaggggcttccctagcttcatatcccccaggcccctgcgcctctggaatgtaccaacaaggggcaggggtttcagggggctcagcctcttcatggggcaggcctcagccctgggtttgtcacagtctggccttgaatt

SEQ ID NO: 28961 - DNA, 2300 bp, Homo sapien
gaaagtgtccgtcaaaggccgggcacggtggctcacacctgtaatcccaacactttgggaggctgaggcaggtggatcacctgaggtcgggagtttgagaccagcctggtcaacatggtgaaaccccatctctactaaaaaatacaaaaaattaggcaggtatgatggtgcatgcctgtagtatcagctacttgggaggctggggcaggagaattgcttgaacccaggaggcagaggttgcagtgagccaagatcgtgccactgaactccagcccgggtgacagagtgagactccatctcgaaggaaaaaaaaaaagaagtgtctgtcaaaggccccgtgcggcctttaatcccagcactctgggaggccgaagtaggtgggtgaatcccttaaacccaggagtttgattttttaaaaattattttgttatttttattttcttatcttgagcccaggagtttgagaccagcctgggcaacatcgtgagaccccatatctttaaaaaaaaaaaaaaaaaaaaaaaaagctaggtatggtggtgcacacctgtagtcccagctattcaggagactgaagtgggaggatcgtttgagcctgggaggttgaggctgcagtgagctgtgattgtgccactgcactccagcctggatgacagagcaagcaaaaaaacacattagtggccgggcacagtggctcacgtctgtaatcctagcactttgggaggccaaggcgggcggattgcctgagctcaggagttcgagaccagcctgggcgacatggtgaaaccccgtcactaaaatacaaaaaattagccgggtgtggtggcgggcaccgcacctgtaattccagctactcaggaggcaaaggcaggggaatcgcttgaacccgggaggtggaagttgcagtgagtcgagatcgggccactgcactctagcctgggtgacagagcgagactctgtctccaaaaaacaaaaaccaaaacacattaggaaaatgttcacaccaaactcaaagtggagactggggagggagtgaaaactggaagcacgcagtaaaggggaatttacttttatccctttcatttcttaaacaagaaaaacaggaaacctatacatatatatattgtttcacaatgactaattctgatggtaggaatgtgggcagtcattatattattcttttttttctgtgttcttctactttctttttcttttttcttttttttttttttttgagacggagtctcgctcgtcgcccaggctggagtgcagtggcacgatctcggctcactgcaaactccgcctcccgggttcacgccattctcctgcctcagcctcccgagtagctgggactacaggcgcccgccaccacgcccggctaatttttttgtatttttggtggagacgtggtttcaccgtgttagccaggatggtctcgatctcctgacttcgaggggccacaggactagtagagccaagagttgagggtccgggtggggtgatccggccgtcagaaatgcaaaagcctggaaagacatctccaaaggccaatctcaggttggacaatcgtgagctggggaagctgcaaacactgtgacctccggaataaccgctggtaatcagttacctctaacccttagcagaattcaggtccctctactactcctaacctggtggcctttcattaactctatgaagccagtttagttcgggggaagggcaattatcatttagactacgaactaatttctcccaaagttagcttggcccaagcccaggaatgaccaaggaccgtttagaggttaaaggcaagctgcgggttggttagatcagatctctttcgctgtcataattttgtaatataatttttgcaaaggcggcttcaggttttttgctaagacaggttttttgatcagatcaaattcttctgctacagcgctctccctaaaagcataggaaggcatttctgcatttccttcctgggcggaggaaaagccccgcctcctcaggctctgagtcccgcccggtcaccattccgattgacactccagctgaccaatcagcgcgctggctggagcgcgggtctgcccctctggacgcacatgcgcgctgtcctggctcgggagatggacggccgccgtgttttgggccggttctggagtggctggcggcggggcctgggtgtccgcccagtgcccgaggacgcaggctttggcaccgaagcccggtgattaagtaccccctctctcatgcgggacggaggctagggcagggggaaggcacgtgcgggatctggatca

SEQ ID NO: 28962 - DNA, 2300 bp, Homo sapien
atgttggccatgctggtctcaaactcctgacctcaagtgatccacctgcctcggcctcccaaagtgctgggattacaggcgtgagccacggcacccaggctacttttttcttttttcttttcttttctttttttttttttttttcagagacagggtctcactctattgcccaggctgtcctccaacccctgtcctcaagcaatcctcccgcctcagcctcccaaaacactgggattataggcatgagccactgtgcccctttacttttattgtcactaatcctcaccactaccctataaaacaagaatcattatcgtcattacacagagaagagaaacgggctcacagaagtcaagtgatctgtctaagctcaagcaagctgatatggggtggagttgggaccacaacccacatctgcctgctttctgtgccctctgtgcttgatctcatgtcatgggccatccattttgccaaagctttcgaaacatgccttctcccctccttttaggccttttctggaagtcaggctggcttgcagctctcaccccaagctcttttccccagctggggctgaaggctggggaggagcttcatgggggctggaaataaatgaagggagggctgggcgggacagggcagtatttccaggaggctgtgagggggaggtaaggagtttgttattgttttgggtttggggatttttttttctttgctcctggagagcaggttaggtagctcttggcagagttttgctagggatacgaagtgggtgaggctgaggcaagcagaatcctcctgcctcagcctcccacgtagctaggactagagcttctgcagtgctaagtgggaaaggggctttctgcctctgtggggcctggtctggaaagtcccccaaattgttaaaagcaaagagtgattgtccccagctggcaaggggacttttgttttatgtccaccccttgtgccccttgctctgcgaagccctacctgtgccgggagcttcgaataggaagaggacctcagggccaggcatccagggactgaggggctacagcagaaacagacccagaggcacccttggctaggaagagcaggatgaaggtgtaataattttgggagtggtctaagaagactttccttttaaagagtggaaagcaatgaaactgaggcttcaaggctgcaaaaatttcgtcctggatcagagaagggcactacaggtggagggaactatctgtgcaaagggttgggcccttcaagagttggagcacagaggtttaggagaaaaagtggtgacagatgagcccagggctatctgcttagacctgtgatctaatatgggtgccaacagccacatggcaatgtggctatttaaatttaaattagttaaaattcaataaagtaaaaaatacagctcctgtgccaggtgcagtggctcacgcctgtaatccccgcactttgggaggccaagacagggagatcacctgaggtcaggagttcaagaccagcctagccaacatggtgaaacccagtctctactaaaaatccaaacaaaacgaaactaaactaaaaattagctgggcgtggtggcaggtgcctgtaatcccagctacgggggaggctgaggcaggataattgcttgaacccaggaggcggaggttgtagtgagcaagatcgccccattgcactccagcctgggtgacaagagcgaaactcaaaaaaaaaaaaaattcagctcctgaatcacactagttatgtttcaaatactcaatagccacatggggctagtagcaatggtattggagagtatgtacaaggcatgcctctatcatcacagaatgttcttttggccactgtgaagcctcaggaaggggctcggattgctcaaggacccatgggagagaggaggctttgactgggctgcctgcctgtgaggtctctggactagaggtgagggaacggtccccagaagtgtgaggtggtgtgactcacctcctgccagcgtaaagtggactctgtccccatggacaggaacaaatcgggcaaggcttcttcagccctgagttgggttatctgctcagtgtgaccagagccaggggatgagaaacatggagtgagtgggactggggcaggagcagcagctgctgagtgaggctgagcctgagcacccggtggggagaggggtggggtctccagcttggtcttggttggcatgcatggggccggacaggagaagggctgggggaggtatgtgtgagttgggatagaagaatagggaggaaggttgctgaacaggggttggg

SEQ ID NO: 28963 - DNA, 2300 bp, Homo sapien
gatctgcccacctcggcctcccaaagttctgggattagaggtgtgagccaccgtgcccggacttttttttttttttttttttttttgagacagggtctcactctgtcacccagaatggagtgcagtggtgtgatctaagctcaccgcaacctctgcctcccaggctcaagcgattctcctgcctcagcctcccagatagctgggattacaggcacacaccaccacgcctggctcatttttctatttttagtagagacggggcttcaccatgttggccatgctggtctcaaactcctgacctcaagtgatccacctgcctcggcctcccaaagtgctgggattacaggcgtgagccacggcacccaggctacttttttcttttttcttttcttttctttttttttttttttttcagagacagggtctcactctattgcccaggctgtcctccaacccctgtcctcaagcaatcctcccgcctcagcctcccaaaacactgggattataggcatgagccactgtgcccctttacttttattgtcactaatcctcaccactaccctataaaacaagaatcattatcgtcattacacagagaagagaaacgggctcacagaagtcaagtgatctgtctaagctcaagcaagctgatatggggtggagttgggaccacaacccacatctgcctgctttctgtgccctctgtgcttgatctcatgtcatgggccatccattttgccaaagctttcgaaacatgccttctcccctccttttaggccttttctggaagtcaggctggcttgcagctctcaccccaagctcttttccccagctggggctgaaggctggggaggagcttcatgggggctggaaataaatgaagggagggctgggcgggacagggcagtatttccaggaggctgtgagggggaggtaaggagtttgttattgttttgggtttggggatttttttttctttgctcctggagagcaggttaggtagctcttggcagagttttgctagggatacgaagtgggtgaggctgaggcaagcagaatcctcctgcctcagcctcccacgtagctaggactagagcttctgcagtgctaagtgggaaaggggctttctgcctctgtggggcctggtctggaaagtcccccaaattgttaaaagcaaagagtgattgtccccagctggcaaggggacttttgttttatgtccaccccttgtgccccttgctctgcgaagccctacctgtgccgggagcttcgaataggaagaggacctcagggccaggcatccagggactgaggggctacagcagaaacagacccagaggcacccttggctaggaagagcaggatgaaggtgtaataattttgggagtggtctaagaagactttccttttaaagagtggaaagcaatgaaactgaggcttcaaggctgcaaaaatttcgtcctggatcagagaagggcactacaggtggagggaactatctgtgcaaagggttgggcccttcaagagttggagcacagaggtttaggagaaaaagtggtgacagatgagcccagggctatctgcttagacctgtgatctaatatgggtgccaacagccacatggcaatgtggctatttaaatttaaattagttaaaattcaataaagtaaaaaatacagctcctgtgccaggtgcagtggctcacgcctgtaatccccgcactttgggaggccaagacagggagatcacctgaggtcaggagttcaagaccagcctagccaacatggtgaaacccagtctctactaaaaatccaaacaaaacgaaactaaactaaaaattagctgggcgtggtggcaggtgcctgtaatcccagctacgggggaggctgaggcaggataattgcttgaacccaggaggcggaggttgtagtgagcaagatcgccccattgcactccagcctgggtgacaagagcgaaactcaaaaaaaaaaaaaattcagctcctgaatcacactagttatgtttcaaatactcaatagccacatggggctagtagcaatggtattggagagtatgtacaaggcatgcctctatcatcacagaatgttcttttggccactgtgaagcctcaggaaggggctcggattgctcaaggacccatgggagagaggaggctttgactgggctgcctgcctgtgaggtctctggactagaggtgagggaacggtccccagaagtgtgaggtggtgtgactcacctcctgccagcgtaaagtggactctgtccccatggacaggaac

SEQ ID NO: 28964 - DNA, 2300 bp, Homo sapien
aagctccgcctcccgggttcacgccattctcctgcctcagcctcccgagtagctgggactacaggcgcccgccaccacgcccggctaattttttgtatttttagtagagaccgggtttcaccgtgttagccaggatggtctcgatcttctgacctcgtgatccgcccacctcagcctcccaaagtgctgagattacaggcgtgagccaccgcgcccggccctactttgtctttatatagatttgcctattctagacatttcatataagtggaatcatacaatatgtatatgattcctgtgactggctttgtctactttctgtactgtttgcaaggttcctccatgtggtagtatggatcctttttgataaataatatgccatgtatggataggcacatttaaaaaatcgatttataaattgaacattcatgtgtttctaccttttggctattacgaataatcctatggatattcacatacaagtttttgtgtagacatatttttcatttcttttggatatgtatgtgtatatatatatgtgtgtgtgtatatatatacacatatatatgtaattttgtttggttttggttttgtttcttttcttttgtaaagacagggtctccctatgttactcaggctaaattttaattcctgggctcaagtgatcctcctgcatcagcctccttctgagcagctgggacaacaggtgtgctctgtatgacacacatacaccacacgcacacacacagaagtggaactgctgggtcagagatcttacactcttaaccactccacatttcagcttgtcttactctctgctatgatttaatatgtacattatcaaattgagaaaaagacaaaaaaattaaaaataataaaataaaaataaaaaattatcagtaatactaataatcacttcgatccattgagtgtttatgtttgcaaagcctttatttttatttatttttatttttttgagacagagtctcactctgtcacccaggctggagtgcagtggcgtgatctcggctcactgcaacctctgcctcccgggttcaaatgattctcctgcctcagcctcctgagtagctgggatttcaggcacccaccaccacgcacggctaatttttgtatatttagtagagatggggttttcgccatattgaccaagctggtctcgaactcttgaccttgtgatctgcccacctcggcctcccaaagttctgggattagaggtgtgagccaccgtgcccggacttttttttttttttttttttttttgagacagggtctcactctgtcacccagaatggagtgcagtggtgtgatctaagctcaccgcaacctctgcctcccaggctcaagcgattctcctgcctcagcctcccagatagctgggattacaggcacacaccaccacgcctggctcatttttctatttttagtagagacggggcttcaccatgttggccatgctggtctcaaactcctgacctcaagtgatccacctgcctcggcctcccaaagtgctgggattacaggcgtgagccacggcacccaggctacttttttcttttttcttttcttttctttttttttttttttttcagagacagggtctcactctattgcccaggctgtcctccaacccctgtcctcaagcaatcctcccgcctcagcctcccaaaacactgggattataggcatgagccactgtgcccctttacttttattgtcactaatcctcaccactaccctataaaacaagaatcattatcgtcattacacagagaagagaaacgggctcacagaagtcaagtgatctgtctaagctcaagcaagctgatatggggtggagttgggaccacaacccacatctgcctgctttctgtgccctctgtgcttgatctcatgtcatgggccatccattttgccaaagctttcgaaacatgccttctcccctccttttaggccttttctggaagtcaggctggcttgcagctctcaccccaagctcttttccccagctggggctgaaggctggggaggagcttcatgggggctggaaataaatgaagggagggctgggcgggacagggcagtatttccaggaggctgtgagggggaggtaaggagtttgttattgttttgggtttggggatttttttttctttgctcctggagagcaggttaggtagctcttggcagagttttgctagggatacgaagtgggtgaggctgaggcaagcagaatcctcctgcctcagcctcccacgtagctaggactagagcttctgcag

SEQ ID NO: 28965 - DNA, 2300 bp, Homo sapien
atgtgctcttgttacccacctacagatgttaaatcccaaggaactcaaatctgttcctctctgtccattgccacctcctagcccaagccacccctaggattgcctgaattactgcagtagccttcaagtgattcctctgcttcacccttggcccctgcaagccattctctacacagcaactagatctatctttatttatttatttacagacagtgtcttactctgttgcccagaatggaatgcagtggcataatcatggctcactgtaaccttgaactcctggtctcaaatgattctcccacctcatcctcccgagtagcctggactacaggcacgcaccaccatgccagttaatattattttattttttatttttgtagagacgggagtctcactatgttgcccaggctgatctcctgccttggcctcccaaagtgctgagattacaggcttgaggcactgtgcccccacctagacctatcttttaaaaatgcaaaactgtgtcattttcctggttaaaccttttagtggttccccaaaccccctgggataaagacttaactctttactgaaccctccaaatgctccagtcactcttaagtttctcagttctttgaagagccaagtgctctctggatttggggccttcacacatgctgttccctctgcctgaaaagctcttccgctccccacctctttagccaattcccactcaggcttcagacctcagctcaattgctgccactccagagagactttcctaaccctccaggtcagggagagaggcctcatttttcctccctcagcctcctgtgttttcttgaatttcttagcttcatgggtacaagttcttcccccgactgggctgggatccctcaggggaaatggaccatgtttatttctgcgtccccaggtcatagcagagcatcctggtgcatggaagatgctcactatacatgcttttttctttctttttttctttattcggataatataacttctttctttaaagtttcgcttagtattttgttgtggtaaaatgcacataacataaaacttactatgttaatcatttttaagtgtacagtttccgtggcattaagcacacacatatagttgtgcaatcagtaccaccatccatctccagaacttttttcatcttcccgaactgaagctctgtacccattaaacactagctccccattctctgtccacccctcgagcttctggcaatggtcattctactttgtctctacagataaagtttatttggaaataatttttctttcatggccttgacatttttgaagagtacagtccagctctcttctagactgtccctccgtctggatttatgtcatttcttcatgattagattcagttaggtatttttggcagaaacatcatagaagtgatgctgtgtcctcagtctattaaaagaggcacaagatatcagtttatctcattattgatcaaattaactgactatatgtttaagggagacaagccagatttcctcactgagagattccctgtttctctttgcaataattaaatgtgagaaacttattttgagacaaagtctcactctgcactctgtcccccaggctggagtgcattggcacaatctcgacttactgcaacctctgcctccctggttcaagcgattctcctgcctcagccacccaagtagctggggtcacaggaacccaccacacctggctaatttttgtatttttagtagagacgggatttcaccatgttgcccaggctggtcttgaactcctgacatcaagtgatccacccacctcggcctcccaaagtgctgggattaaaggtgtgaggctgtgtgaatgatgtgtgctccagggaaagtcatagaatatatcagtttccccctctgtaaagtgtggacagaagtatcctaactgatattacagcttaagaaagtaaaagtgttcaagcggcctctgggcgccagcaaaagaggctggggattaatttcctgcgcgctccacaagaggcggggctgggcggggcgggggcgagagggaacgagggcgcctgcgcggagaggagtgaccatagagtcggtcctccagagacagaggggccggaagttctcttcacggagccgcgcggctgcgggggcgcaaatagggtcagtgggccgcttggcggtgtcgttgcggtaccaggtccgcgtgaggggttcgggggttctgggcaggcacaatggcgtctcgagcaggcccgcgagcggccggcaccgacggcagcgactttcagcaccgggagcg

SEQ ID NO: 28966 - DNA, 2300 bp, Homo sapien
ggcatactgtgttagggtctgtgtcaggcagccccttttgggttccaagagcagaggaagatgaggctgtgtgagggaagaccataggatgatagagaattggtaccgggcacagtggctcatgcccataatcctagcactttggaaggttgaagcaggtggatcacttgaggccaagagttcaagaccagcctggccaatgtggcaaaaccctgtctctactaaaaatacaaaaattagccaggcatagtggtgcacagctgtaatcccagctactcaggaggctaaggcacaagaatcacttgaacctaggaggcggaggttgcagtgagccaagaacacaccactgcactccagcctgggcaacagagcaagactatctcaaaaaaaaaaaaaaaaaaaaaaagccaggtgctgtggttcatgcctgtaatcccagcactttgggaggccaagctgggctcagatcaccttaggtcaggagtccaggaccagcctggccaacatggtgaaacccgtctctactaaaaatacaaaaattagtctggtgtggtggcgtgcacctgtaatcccagctactcgggaggctgaggcgggagaatcgtttgaacctgggaggtggagattgcagtgacctgagattgcaccatttgcactccagcttgggtgacacagtgagactctgtctcaaaaaaaaaaaaaaaaaagagagagttgagttgcgagggcctagcaaaaggggagctccctgaactatagactttgaccttgtccaaatcattatccctctgcttccttatctctctatgaaatgaaaacaataattaacacttacctgtctcacaggtagggttaggaggattaaatataaaagtgttttgtgaagtgtgaaacagataaactacatagatgaaatgtatcatgacatttattcaattacacagcacatacttcataatatctactgctaggcttggagaaacataaagaataagagtttttatcttttcatgaactcaaaaagctagagggtacttttaggataatgggtaggatgcagccttcagacaatgaacctaaagacaggaatagaattggccaaaagcaggctgtggttaggccactgaaaggtggtctagattgaattgcagggggacaataacaatctcaagatgccttggctgggcgccgtggctcacgcttgtaatcccagcactttgggaggccaaggtaggtggatcacatagtcaggagttcgagaccagcctggccaatatggtgaaaccctgtctctactaaaatacaaaaattagccaggcatggggcaggtgcctgtactcccagctactcaggaggctgaggcaagagaatcggttgaacccagcaggtggaggttgcagtgagcagagattgtgccacggcactccagcctgggtaatagagcaagactcagtctcaaaaaaaaaaaaaaaaaaaaaaaaaaagatgccttgacctggtaggtgtgccccaaactttctttccagtgtgtgtgttaccaaggtgagggctgaagctgctcaaatgctccatgaaggggaggaagctgtgggatgatggggagggttcccacaaagatggagcctcgtcagcctttctccagcaccggaaaccacaggaaaccaggtcagtgtgtggggcccgctccctctgctccagggctcagctgtgagctctggggcttcctgagcagggcgtactgactagtgggtccttgaagctagaggcccctttggtatggagccctttgcctagaagagctggacctggctcatgggtagagagaactcggctatagtcctgagagttaaccagttgggaagccagggtacatatgggcttcatgtgcatcctagagtgctttttttcttccccactctaaatggtgcctcagtcacctctgtatctccagcacccagtgctgagtagtgcttaagagctcggctaattctctaagtgagggggtgaagcgcatgtctatgggagacacaagttccagagtgtgctgatgggtggatcagatctgcagtgtgtttcaggagtaggaggggctaagaaatgggtgcgtcccccaacctgatgctagcccctttcctgttacttctcacccacagcaggagccccttgtctttcaggtggggggcagtagggtttttgggggcacaagctttcctcagtccctccacttggaggggaaggaatgtggcctggctggctggttgggatcaaggaggagctttcgggcagggcggggccagggc

SEQ ID NO: 28967 - DNA, 2300 bp, Homo sapien
gcagaaatccagcctgcgctgtactcgcccagcctggagccctgaccctctcttcagaaggggtgcctttatctaattagcccataagcaccctataggctagggctgttttcggtaccaacccccagagcaaataaggggcgggggcgggggcggagaggcgagcaccctacggtatcccgagagggtggggagaagagggctgagcagtccctcagccgcccagccttcatctgttgcttcccgccaccaggcccgggcccagcgcggccagtgctcctcctgcacgcggcggactcggaggcgcagcggcgcctggtgggagcgctggctgaactgctacgggcagcgctgggcggcgggcgcgacgtgatcgtggacctgtgggaggggaggcacgtggcgcgcgtgggcccgctgccgtggctctgggcggcgcggacgcgcgtagcgcgggagcagggcactgtgctgctgctgtggagcggcgccgaccttcgcccggtcagcggccccgacccccgcgccgcgcccctgctcgccctgctccacgctgccccgcgcccgctgctgctgctcgcttacttcagtcgcctctgcgccaagggcgacatccccccgccgctgcgcgccctgccgcgctaccgcctgctgcgcgacctgccgcgtctgctgcgggcgctggacgcgcggcctttcgcagaggccaccagctggggccgccttggggcgcggcagcgcaggcagagccgcctagagctgtgcagccggctcgaacgagaggccgcccgacttgcagacctaggttgagcagagctccaccgcagtcccgggtgtctgcggccgcaacgcaacggacactggctggaaccccggaatgagccttcgaccctgaaatccttggggtgcctcgaggacgactggccgaaaagccgcattccctgcctcacaggccggaagtcccagcccagtccccgcgcgcgtccctcttcctcctcatactttcccttgactgagagctcctctaacccctgttctgatgggggagggcggtcttcccacttcctctccagaactccagaaagagcagtgtgcttatgcttcagtccaggctggagaggttggggccggggtagggaggcaggagccatgtcagttctgaaggagggtgaggcggtgggggattgcagggggcggctgagagaaaacctccttgggggccagggattccctttcccactctgaggctctggccagagggagagaggactctggacctaggaaaagaggcttttggctccaggtggtcaggacagtgggggttgggggtggggtgggtgggtgctggcggtggggaccaagatccggaaagatgaataaagacaaacatgacaaactaagaaaacacagtgtgcttctctagtgtggctggggagcctgcctggtggggtatgtgtcagtgtgctggcccaaatcctctgtgtccataccgcatggcatccgtcacattcttacaagcaatgcctccaaaagcaaaggaggatggggcaatctccttgatcccccccagtgattcttacaagaggagaggaaaacagaggcttcgccagatggtgtgtccatcatcacacagccggcccacagcaacagcacagatgggacccctgtctgccaggctctggggtcctgggttccttctactccccataccgcatttgagccaggcagtggtgaaaagcccactttctggtgccttttgtccgtgcttttagagctcctgtcccacaaagggttaccgaggcccaaagagtgtctgaagggaccgagtgtgcctagtaaggggagacttagtgggcccaggactccagggctgtgtcctccttagggctccgggggtgagtaagagctcccttactcagccgtgatgcattcgctgtcttcttcaggggcccctcccagccaggtgtcagcagagggagaggagagccaaagaaggaggaggtgcggccaccaccctagtccaaggctgctggctcccaagcctggtgttggtgggagggacagagaggggcgggaacagccagcagcctgccgggagccaaaacgaaagcactccgtgctggaagtaggaggagagtcaggactcccaggacagagagtgcacaaactacccagcacagccccctccgccccctctggaggctgaagagggattccagcccctgccacccacagacacgggctgactggggtgtctgccccccttgggggggggcagcacagggcctcaggcctgggtg

SEQ ID NO: 28968 - DNA, 2300 bp, Homo sapien
tttttaaacaaggtaacagtatgaggtcctcactgttgaatgagtgaataaatgttactgcctaacacagccataggacacagcagatgttcatgagatgtatgctgtgatttaaatggcttcattgccaaacacagtgcctgccacatagtcggtgttcctaactaaaggcttgatggataaattaatgtattacctctagtgcttagcatagagctatgcacataataggcactcttgaaatgtctgttgaaagaataaatgaatgtgtccttagaacttagcacattccccaacacatagcaggtgcttacacaagtgattgtggaatgaattaaaattaattatccaccaggcacagtggctcacacctgtaatcccagcactttgggaggccaaggtgggtggatcacgaggtcaggagtttgagaccagcctggcctaacatagtgaaacccagtctctactaaaagtacaaaaattagccaggcatggtgatgtgcgcctgtagtccctgctacttgggaagctgaggcaggagaatcacttgaacccaggaggcggaggttgtggtgagctgagatcacaccactgcactccagcctgggcaacagagtgagattccatctcaaaaaataaaaaaataataaaaatttaattatccaaggtctcttgtgcttgccatactgctaagacacaatggtaggcactcattaaaagtctgttgaatgggccaggcgcggtggctcacgcttgtaatcccaacactttgggaggctgagacgggtggatcacttgaggtcaggagttcgagaccagcctgatcaatgtggtgaaaccccatctctactaaaaatacaaaaattaaccagttagccggccgttgtggcatgttcctgtaatcgcagctcctcaggagactgagatgggagaatcgcttgaacctgggaggtggaggttgtagtgagccaagattgcaccactgcactccagcctgggcgacagagcgagactctatctcaaaaaaaaaaaaaagtttgttaatgaagatgttgccagtgcccagcattatgtttgctggaagaatagatgtgagcacctccaggttttgtaaaaggcaggaagacccagcaagtgtttgtgaaatacctgctgaatgagtgcatccccactgtccagcagagggccaggcacatgcccatggaggggacctgagcagacccccatttcctttccaggtgtggcctctggaacctgactccgttaggacgaacatctgccccttcagggagggtgagccgaccggcctggggctggggttggggtgttgcgagcgatgggtacctggcctgcggtgactgtgccctttccttgcagacccccgcgcacaccagaacctctggcaagccgcccgactgcaactgctgaccctgcagagctggctgctggacgcaccgtgctcgctgcccgcagaagcggcactgtgctggcgggctccgggtggggacccctgccagccactggtcccaccgctttcctgggagaacgtcactgtggacgtaagtgaagcagagggcacctcccgtggtgaggggagagtggggaaccgggggtccccttttgtgatcccacccattcctctctttccacagaaggttctcgagttcccattgctgaaaggccaccctaacctctgtgttcaggtcagaaaggggtgcatagtgctgggctggaggctggacctgggcagaccccccagccaagggggtcttagttcttgggccgctaaagcatagtggttgccagcttcctctatgggagttccactgcctactttagtagtgcgcgggaccctgggcaactcacttcacctctctgaacgtcagtttcctcatctgtttaatgcagatgataatacagtaactacctcatggagtggttgtgacaatgaaataagagaagtgcttccccttaggaatcggtacagactaaatgctccataaatgtagccacttttattattgctatccttattctatttccatacctgtagaatgggttgctctacagtttcaaagggtgattataagaacattcactcatccggccaggcgcggtggctcacgcctgtaatcccagcactttgggaggccgaggcgggcagatcacgaggtcaggacatcaagaccatcctggctaacatggtgaaaccccatctctactaaaaatacaaaaaattagccggtcgtggtggtgggcacctgtagtcccagctactaggaaggctggggcaggagaat

SEQ ID NO: 28969 - DNA, 2300 bp, Homo sapien
gtcttgaactcctgacctcgtgatccgcccgcgtcggcctcccaaagtgctgggattatagtcgtgagtcaccgcacctggcccaaatttatatttttaaaagatctctgaggctgtcatgaatcaattcaaggcaaatcaattggaggtaaaaaaaaaaaaaaaaagacagggcagggacaccaggtagttgcagacacccaggacagcaagatcaagggcccagcaaccctagcttaggggagaaaaacagctgacattttagcacttaagatgctcggcattgtgttaagtatgtattaacacattgtgttaagctttatatgtattaatatatttagtcctcacaccaaccctatgacacaggtacaactttacagaggagaaaactgaggcagagggtgacattacttattcaaagacccctaaacagatggagctatattcatccactggctctgacactgtgctgtggactctgggcaaatcatttcttcgttttttgttttgttttgttttgttttgagaggagtctcaccctgtcgcccaggctggagtgcaatggcgcgatctcggctcactgcaacctctgcctcccgagttcaagcgattctcttgcctcagcctcccgagtagctgggattacaggcgtgtgccaccacgcccggctaattttttgtatttttagtagagacggggtttcaccgtgttagccaggatggtcttgatgtcctgacctcgtgatctgcccgcctcggcctcccgaagtgctgggattatataaaggcatgagccaccgcacccggcccaattcatttctgttaagtctcagtttttcttctctgtggagggtaagtttctaactcttcttctctgggtctcccagacatccacaagcgctgggccctcgtgtggctggcctgcctactctttgccgctgcgctttccctcatcctccttctcaaaaaggatcacgcgaaaggtgagcgcttcccggctccccattcccctgggggaggaccagagtggctgtgggagttctccgagggaaagcggcggccgagctcactggctgcctccgcccctctcccctaacagggtggctgaggctcttgaaacaggacgtccgctcggggggtgagtgggagcaagcgctgggcggagggccgcccccggggagccaggcctgtgccagctcacctcttccctccccatctgttttctccggcagcggccgccaggggccgcgcggctctgctcctctactcagccgatgactcgggtttcgagcgcctggtgggcgccctggcgtcggccctgtgccagctgccgctgcgcgtggccgtagacctgtggagccgtcgtgaactgagcgcgcaggggcccgtggcttggtttcacgcgcagcggcgccagaccctgcaggagggcggcgtggtggtcttgctcttctctcccggtgcggtggcgctgtgcagcgagtggctacaggatggggtgtccgggcccggggcgcacggcccgcacgacgccttccgcgcctcgctcagctgcgtgctgcccgacttcttgcagggccgggcgcccggcagctacgtgggggcctgcttcgacaggctgctccacccggacgccgtacccgcccttttccgcaccgtgcccgtcttcacactgccctcccaactgccagacttcctgggggccctgcagcagcctcgcgccccgcgttccgggcggctccaagagagagcggagcaagtgtcccgggcccttcagccagccctggatagctacttccatcccccggggactcccgcgccgggacgcggggtgggaccaggcgcgggacctggggcgggggacgggacttaaataaaggcagacgctgtttttctacccatgtggcccacacgcgtctccgtttcagtggcggggctggcaaacgtcattccctagccccgcggccctttaaagcccggacaggtgcagctcggtgccgcctctggttggctggcgtggggtgacgtaatggcacatggcccgtcgccattggctgggcggcaagctccgccccctggactgcggcgcgggtgggggttgtgcgttttacgcaggctgtggcagcgacgcggtgaggagacggcccacggcgcccgcgggctggggcggtcgcttcttccttctccgtggcctacgagggtctggatccttctctgccggctcgtgggccgtgcctttgcccttctgcgaggccctgaatctgatcccttcccttcatatccggatccgggctcctccct

SEQ ID NO: 28970 - DNA, 2300 bp, Homo sapien
atctcaccatcttagaaaacagctgcactactcacccagttgctcaggcccaaaatctagtaagcatcttttattctactgtttctctatacccataatgaatctatcaccaggtcctattgttctctctgcaaaatatacccagactgtgacctcttcatcatgtcctccactagataccacactagcttgtgttgcctttgtacctagatgatgcacttgcctcccaaactggtctccctgcttcctccgcccttgccccttacaatccgtttgctacatagcagtgtgagtaatctttaaaggtgtagagaagacagtatcactttttctgctcatagccttccaagagcttcccattacactccaaaaaaaatctaaactcttttctgtagccctcgaggcttaagcctttgccttcaccttctagcactctccccttggctcactccactccagccacttctcaaatacaccaagctcagtcccatcctctgcccaattccctccctgtcacatagctcgcttcttcacttcctgtctctctgttcaaatgccaaaccttgaacaccttgcctcccaccgtcctgcagtctaccgtgcttcactgtttgttcttcatctgacataatattattcacttactcattcactgcttgtcttctctactagaatgtgagctccaggaagggggcattttgcttgccttgtttactgctatactatagatgttcagtgctatttgttgaatgaataagtgctccccaagagttcctagccctacaccagcagagcagagatttggcggggaggggaatatacaccccttcccccagcagccccttacctgtctttgtatttggacaaattctcttcctcccaggcagtgtttccacctccaaagttgtcccggatggttctctccaggccctggaaacagaaaattagtaatagctaagtacagtgcctggcacatgctagcacttcactgttctactgactaggaaactgaggcacagaaaggcaacctgcctagggccatacaactagtaagagaccaagatgaaacttaaatccacgcagatttgcatcccagagttccccactctaaatcgctgtgttcccctctaacgaggctgccggtgcacccaccttgttaaagctgtcaaccagtccccggcaggtatgacacggatggggctgaggcgggggagaagactggggaggtggagagggctggagccagataggtcctgggaggttgaggaagaggctgaggccccagagcatagctgggactaggcccttcgggggccatggggccatctttacccaggctggggacctgcagatagagggcgtggagaggcttcactgaaggagtcaggccccacgcgagaaagaaaaaggtctgttctaaggtgccgtggcgctgggatctgcgttattacaagcaaaagaggccaaactgggtattgcaggggctgtggggatgggtggggaaaggcgcataagatgcaattccagaagagaaataagttatcctcgctagcatggggtggagaggaaagtggcctcgctccttgacaagggggcagaagtcagcctcttgtctgagggtctgataaagaatattaggggccggatccgcagaattagggagaagagatcagattccaagtactgaaggagaggaggccagaggggttgtcttgggggaggtgtccggaaccccgggcttggagggaggagcccggatccggatatgaagggaagggatcagattcagggcctcgcagaagggcaaaggcacggcccacgagccggcagagaaggatccagaccctcgtaggccacggagaaggaagaagcgaccgccccagcccgcgggcgccgtgggccgtctcctcaccgcgtcgctgccacagcctgcgtaaaacgcacaacccccacccgcgccgcagtccagggggcggagcttgccgcccagccaatggcgacgggccatgtgccattacgtcaccccacgccagccaaccagaggcggcaccgagctgcacctgtccgggctttaaagggccgcggggctagggaatgacgtttgccagccccgccactgaaacggagacgcgtgtgggccacatgggtagaaaaacagcgtctgcctttatttaagtcccgtcccccgccccaggtcccgcgcctggtcccaccccgcgtcccggcgcgggagtccccgggggatggaagtagctatccagggctggctgaagggcccgggacacttgctccgctctctc

SEQ ID NO: 28971 - DNA, 2300 bp, Homo sapien
tagagaaatgagagatgcctttacaattctgaagtggctccaacaaggaaaacagagctggtcaggtcatgtgtgaaacgggcaaggcctgcaccctctcccagagtcaagcagctgaatgcaggccccaccatttaccagccattagggatggaatattcttcaaactgcaacacgtcagacacaactggggcctgagtattgcttttctgtgagagctagaggtaggaagccattgggagggagatgtcagctcagccctaggaagaattttttctttttcttttttaagtgaaatttgattttttatttgatactgggtctctttctgtcacccaggctggagtgcggtggtgcgaccttggctcactgcaacctctggctcctggactgaagtgatcctcccacataaccctcctgagtatctgggacccaggtgcgcaccaccacacttggctaattttttttttttttttttggtagagatggggttttgccatgttgcccaggctggtctcgaactcctgggttcaagcagtcctccagccttggcctcccaaagtgctgggaatataggcatgagccattatacaggccaaattttcttcttcttcttcttcttcttttttttttttttttttttttttgtcagtctcgctctactgcccaggctggagtgcagtggtcattgcactccagtgacacagcttgtggtcaatggacagagtggtcaatgcactccagtgacactccagtggccatagcttactgcaatcttgacctcttgggctcaaatgattctctggcctcagcctctggagtaggtaggactacaggcatgtaccaccacgcccagctagtttttttgtttttttgtttgttttttaatttaaaaaagtctcaccatcttgcccatgctggtcttgaactcctgggctcaaaatgatcctcctctctaggcctcccaaagtgctgggattacaggtgtgagctactgcacccagccctatctcatttttgataaccacatatatttcctgtgtggctttcccttaaggaattgagcctaataatggatgtttagtatatcaagaggtgttcaaagaaagaccaagaacattttgacagtgtctaccagccccatatgcagacccatagattttactaccatgcctcggctaggcaattatctggtaggtgcactagtgtacgtgcacagtgatgtgttaagcaaggaatggcccctgctccattatccctgcgagcaaaaggctagaaacaacctatgtccaattacaggggacaggataaagaacaataactagctgaccatatgctggaattctcaacagtggatacaagaaatgatatagatctatagatatttacatgaaaaatgtgccagaatatattggaaagtgaaaaagacaaattacagaaatgtgtacagtggctgggcacggtggctgacgcctgtaatcccaacactttgggggtccgaggcgggctgatcacctgaggtcaggagttcgagaccaccctggccaacatggtgaaaccctgtctccactaaaaatataaaaattagccaggcatggttactagggaggctgaggcaggagaaccacttgaacctgggaggcggaggttgcagtgagccgagatcacgccactgcactccagcctgggcgacagagcaagactgtctcaaaaaaaaaaaaaaaaagtatacagtatgatgtcatttctatttaagatgtacatgtaactgtacattgagaagaatctgaaggatacataccaagctgtaggtaggatttacctaaaaggatgtagggatatagaaaggaagtgagctccccgtcccatgaggtatgcaagcagaggctagctgccccgttttcagggatgctgcagaagacatttccacatccctcagagatgacctcggttccactctgagccctgacaatccctgagcgaggggaagtcagggttgacagaagagtccacccctaaggggaaagagttaagcagggctgcgctcctgtgggcgggctcgcgatcggcagcgccgggctctgttagccgagtctgagcatctcggaggatgcggcgcggcgatcggctgcagggacgcgcgcaaggtgaacacgggggctgcggcgcgcaggtgaggagctggcccagggagggggcgatggcgggaccccgacggggagcgtggcctgctgcccccgtcgcgggcgcaggcgaccaggcctgcacggcgcccacccccatccaggacactgcgggaa

SEQ ID NO: 28972 - DNA, 2300 bp, Homo sapien
atttttggcagagatggggtttcaccatgttggccaggccggtctcaaactcctgacctcaagtgatctgcctgccttggcctcccaaagtgctgggattacaggcgtgagccaccacacctggccaagagttatttattttttttgtgtgtgaaatctgatgccactttaaaatcagcagatccttaccccattccctttcactctcaattcccactttctggaagtaattattgtcaagtctttctggtacttctggttatttcttctggtatttatcctattttcacatcagatttatgcggctaatgttaattattttcagttttgggggttaatctattgactactatgaagataatatgaaaatgtagttcttctattactttccatatttttctgtagttttttggtatcattattctgcatttacaatactagaactgtgaaacaagtattcaagctgattcaagaagtgtgctgtgaggataataattccctctccagacattgtttctcctgcagtaagtactgcttggtttttcatttgcttaattttccatgcatctatcactaattcattccccttaatctttccttaaagtgaaaaacaattgaaagatttaatttcccattcagataacattttcagagattcacagaattctacagagacaacaaacaacatggtttcttcgacagatgaatgtcttgaaaaaaaagggagggagggaaaactgttacataagagatttaagagatatagcaaccaaatgccacgtgggggcctcgttgggagcctcagtcaaataaatccactgtggaaaagacattttaagacaattagggaaatatgaacacagattgagtcttaggacatattaaggtataagcatgtttgcatcgggtgaaataatggccttgtgggttatgtgtaaaaaattccatatctgttatgatacctacgacttatgtgtgaaatgacatacttgtgatttactttgaaaatatccaacttccctgctccctcccctcccacaaaaaagtgattttgggagatacattaaaaaattctgggccaggggcagtggctcacgcctgtagtcccagcactttgggaggccaagtcaggtgaatcacctgaggtcaggagttcgagaccagcctggccaacatggtgaaaccccgtctctactaaaaatccaaaaattagccagatgcagtggtgcacgcctataatcccagctactcgggaggctgaggcacgagaatcgcttgaacccgggaggcagaggttgcagtgagccaagatcgtgccactgcacgccagcctgggtgacagagcaagattctgtctcaaaaaaaaaaaaaaattctggtaaaatagtgataattactttattattatttatttatcgttttgagacagggtctcgctctgtcttccaggctggagtgcagtggtgcaatgatggctcactgcagccttgacctcctgggctcaagcaatccttccacctcatcctcctcggtagctgggactacaggcatgtgccaccatgcctggctgattttttttttcattttcttgtgaggcctcactatgttgcctaaactggtctccaactcccaggctcaagtgatcctcccgcctcaccctcccaaagtacttggaatgcaggcatgagacattgtgcctaacctattttactgttttagagacagggtctcaatctgttgcccaggctggagtgcagtggcacagtcatggctcactgtaatcttcaacttctgggctcaagcaaccacccacctgcctcaggctcctgagtagctgggactacaggcatacgccaccatgcccagataactttattttttgtagagacagggtcttgctatgttgccgggccagtcttgaactcctggcctcaagcaatcctcccacctcagcctcctaaagtgcaaggattacgggcgtgagccactgcacctggtcagtactttattctttttactgctgaataatacgccattgtatggctataccatatttcatttatccatctgttagctgatagacatttgggttgtttcccaccttgtggctactatgaatattcatgtatacataattgtgtagacatgttttctttttcttctttctttttttttttttttttttgagacagagtctcgctttgtggcccagtcggtagcccaggctggagtgcagtagtgcgatctcagctcactgcaacctctggctctcatgttcaagcaattctcctgcctcagcc

SEQ ID NO: 28973 - DNA, 2300 bp, Homo sapien
gaaggcttggtgtgaagtcctaaatgtcaccctgtgtgacgctgtaacgcacctggcactcttctcaacgaacgggtgggatggaacttgttaaagcctctgtttctataaaatgagacaatatgtacctcatagagttgctttgaagttttaaataagttaatgaatgtaagtacttcacatagtacctgatatagagtaaatggttattattcttcttggcataattgggaagaactaactgaaaatgttacagtagtgcttcctaaacttcagtcactctcatgccatgttagaatttttgtccaacgcttgtatcattacatatttaatactttttatatatcaacttttttcccatctatatgattttaaaggaatctttaaattaccagcaaatggaaatccagtattgtcacaaaaaagaaagtaacttaagtacagtagaaacaaaacaacattattaaattttaactagacactgttacctgtgaaaagttcttagcctgaggcttactctctttattaaaacgagaaattaatgtgagagagaggtgctaaagatatagtagcacttacctgagatgatttctgaaagtaatcagaactgactgaaaattgcttgtttttctaagagacaaggtctcgttatgttgcccaggctggtctcccacaatcctcctgcctcagcatcccaagttgctgggagaaaactattactttaatatgaggggctacatgtctagataaccacctataatcatctcaaattcctttatctgtatataaatattgcaacgaggggctggttgccatggctcacacctgtaatcccagcactttgggaggccaaggcaggtggatcacctgaggtcgagttcgagaacagcctggccaagatggtgaaaccctgtctctactaaaaatacaaaaattagtcaggtgtggtggtgcgggcctgtaatcccagctactcggggggctgaggcaagagaatcgcttgaacccgggaggcgtagactgcagtgagctgagatgacgccaccgcactccagcctgggcaacgagagcgaaactccgtctcaaaaataagcaaataaatagataaataaataaatactgcaatgaaatatgtgaggaagttgcctccactctagtggggggaaataattacaattccttacatctctaatggcagttttacagactgcaaagcgctttggtacttggcatctcagctgacagtcccaccaggcccgacgcctggaacagtaatttggtagaatgcagattatcacactcacttgactggatgttacaaagactaaacgctgtaacgcacctggcactcttctcaacggaagggtgggatggaatagttcataggtaaacccaccgagggtcggcgactaacctaaaggattaacagtactgtttttttcaacactcaatacgtcctagatcctgtgctaagggacttacagacatcacctaatttgattcctacctgtctatgaagcaggtactgttatcatccccatttcacagaggacaaaagtgaaacacagaggtaacgggtaaggtcaccctgtcagagggggcgcgacgtgaacctaggcaaattgacacaactcctgcacttttttgcccaaggtcacggcggtgtgaggtaggctggagaagggagggcgctgacctgtcagatacttgttcctgggtgagcttcttgtcgctctgcagcaggatggacacgtagtggcggatcatgcctacgaagaaagtgatgataacgatgggtaggaccacccagaggcggatgttggagtcgagcaacagttctggccctgccatcttcactgaaagctggttcccagtctggaatgggcgagcttctcttctccggggcacagttgcttctcttcggcttcgcctccgggccttctcaagcccctttgcccgtgtaccccagaactctcctgcgactgtgagccgagcttactgccttcagctgggctgcctggtcttccacttccggcgcgaacgttgacgtcacgtcgtggcgcacctcagtggcgtcagagcggcgtcgggcctggcgggaaagtggaaaactatcggcggtggcccaggctcggtggctcactcctggaatcccagcactttgggaggccaaggtggggggatcacgaggtcaggggatcgagaccatcctggctaacaggtgaaaccctgtctctactaaaaatacaaaaaaattagccaggcgtggtggaggcgcctgtagtcgcagctactcggga

SEQ ID NO: 28974 - DNA, 2300 bp, Homo sapien
aggggcaggctatctggccagtcgccacctcagattatcttccccagacagctaatgtttattagagcaactagggaagagagagaagagtgactggagggaggagaaagaaagacagtgggaaggcaagctagccaatgtcattacttttaagtctgcaatactgaaaatgcatagtacatgaacattaccttgtgttcagatactgaggcagtgttttcaattgcctgaaaaaacaggagagtcacaaaaatattatgacacatcagcgaaacacgttacaccttattcagcatgccctgttatctcatctaagagccaatgtgtccatatggcaaccatcagctatcatttccacttgaatgagttttgagatttttatttcaatctacctcagttatacatctgtcactaattgccactcatttcctccttgataatcaaagttccaaagatcccaccttaatccaggcttctgaaatggttttctcatatctaatagctgactttattacatcaaagagaataatacggttctgaccgctgctttcttgatttcctgaggaattacaagtagcagagaggaaaaaaattactcttctacctaccagaaaagaacttacaagatgtgaattcctgcttagtagccatgtaccctggagtaaatgacaacctcatgtataagatggctaataaacttgcactgtagtctgcctgggattgatctgaatggctaagaaaacatatgaacacatacatagccacatacatatacgtaatttgaaaaacgatataatactagatgtaaatatcataatagtaccattatttgtagttgtaagtattaagctccaactctgactgtgggatgtcagagaactgtgacatcctatgtgaggaaaagggtggcaattatccatgagctctttaccttgcttgtcctttactttttaactttacttggaaagcctgcaacagtgatggcaaaacacaatgctgcaggatccaacttctcccgaagctcagagattacctgcagaaagttaatattagctatggtgttctgctcattcatagtgggtaggtacagtccagtctctcaaccatgacaatctcctgaaagactgaggaagaaaaaattttaaacgttggacattttgaaaaatagagttgtgagaatagctaaatgcaatgtcgtagaatgtcatatccaaaatttcagaattctgtgaggtactacacagaaagagtaaatgtaacttatagcagcttatatagatcaatgaatctgttgaatagctccatttcctcttctcaatgctatccggattagtcaacattctcagttagtcaggactttcggcttccagacacccgcctttaacacgtgcgataccatttggcttcccgagaagcccaacagacgtgagatgaggccgactgcctggactagttcatcgggaagggggtgagggtaaaagcctttctcatttcctcattttaacgacgcagaaaggtacctgtggggactatcccatctcagggcagatgaggaagccgaggcttggggcgcggagccccagagaagaacgccgaccgcggcccggacttaagagattaggtcgcaggggagcggggcctcgagagactacgaccactgctccatttactcaccgagaagccgtccccgcctgtagttttctttctttttttttttttttttttgagacggagtcttcctctgtcgcccaggctggagtgcagtgcagcaatctcggctcactgcaggctccgcctcctgggttcacgccattctcctgcctcagcctcccgagtagctgcgactacaggcgcctccaccacgcctggctaatttttttgtatttttagtagagacagggtttcacctgttagccaggatggtctcgatcccctgacctcgtgatccccccaccttggcctcccaaagtgctgggattccaggagtgagccaccgagcctgggccaccgccgatagttttccactttcccgccaggcccgacgccgctctgacgccactgaggtgcgccacgacgtgacgtcaacgttcgcgccggaagtggaagaccaggcagcccagctgaaggcagtaagctcggctcacagtcgcaggagagttctggggtacacgggcaaaggggcttgagaaggcccggaggcgaagccgaagagaagcaactgtgccccggagaagagaagctcgcccattccagactgggaaccagctttcagtgaagatggcagggccagaactgttgct

SEQ ID NO: 28975 - DNA, 2300 bp, Homo sapien
gcggcgagcggcggcgggcggggcttttaacggccatcggcccctcccagcctggacaaagacacagagcgcggcctgggaggcggagctctgcgggcggccggggccgcctccttccaggcgctgctgccccaacacaggcgggcactctctgcgggtcccgcggctcccgcggcttccggcccactcagcgcctccagaggcctcaggtgagggtcaccccccgcagcttggggtcactcccctgagcccccggatcttcccatgggtcctttggaggcctgggttttggagtttgtccttcgttaagtgccgcccgccgggcgcggctgctccaggaccacaggtgaccgagtgcggccgcgtcccctgcgggccacccatcaagggcataggggagaggctcctcaaggcgcagtgaccagccctgccccgggctgaccctcagggtggggagggggcactaactcgggtcctctccccctaaggctccttcctcacctggggtgaagggctcccagtcctagcacctcaggggccttcctgtttcattcatgccaacaagtgaacattgagcatttgctgtgtgcagggacagagaagacagacacgctggccactgagtgggggagggagtctagtctatcagtgcagaaaactccccatagaggtgggggctatgacggaaacaccaggaaaagtgatggtggaagatgggggtgacctactgcagatggggtgctcagggagggcttctctgaggaggtgacattaactagattgacaaaagggatgatcaaggcctgtgaaagtttttttttttttttagacgagtctcgctctgttgcccaggatggagtgcagtggcgcgatctcggctcgctgcaagctccgcctcagcctccggagtagctgggactacaggagcccgccaccacgcccagctaatttttttgtatttttagtagagacggggtttcaccgtgttagccaggatggtctcgatctcctgaccttgtgatccgcctgcctcggcctcccaaagtgctgggattacaggcgtgagccaccgcgcccggccgaaagtcttttaagatagggaagagcagtgcccagtggggtgtcccagggataaaaatagggcagtaggtgaaggcggggggtgtgagccaggcaggcaggggggaccagacaccatgtgatgggtgcaggggtgggacccacggaggctctgaaaaaggcctgggccttagaagatggggaagcaggaggacccacttagaggccttcacaaccttctagggcacaggccagaatgcggtataggtttcagaagggggctgggtccctcacgctcttcttgaaccgaaagggctccaggttcttgggccctttccacgcagacatggttctggggccccggctacacagacacccttctgatggttgtcgtctgcagccagacagggggcgtgggctgacccgccccttcctttgccaagtggacagatgaagggagcctctgagggcaggattgctggactgtgaattggactgggagtgtaatccaaacgccccacgggccccgcctcttctctggaactcggcttcaagaaaactgggacaagggatggcaagagcagctctcagggcccttgcccctccaccccgtgatgcttctagatggttctcaggggccacctttttcaggaagaattctcgggttataggaaagtaaagggaggaatcgtgctttgagtggcactttgatcaggctctagactaggtgttggtttggtggggtttgcttttcctcccgcctcataccccttcacaaaacctgagtcctggctaggccgggagtgagattcctgtttctagattttcatcattccgtgttgcacaggaggaggtctggggggaaaggggacagatactagcaagtatatagaagatatatatgcaccaggctctggagcagctgctgacatctggtccagcggtcatggagacaggggcgggaccaggtggcagtgacgcagcggggggcgtggctcccaacggccaacggccccgcccaggctgggctgagtcggagccggaactgggaggtagagccagagacccgtaagcggagccgaacccctatgagcttgcccagtagggagctcaggatccccaagattggacaggcaaataagcttagtgatagtcccaccagtcttcccgagagtcacggtaggcatccgcttcccctgccggtccccaggcctgctctatcaggcaaccttggggacgga

SEQ ID NO: 28976 - DNA, 2300 bp, Homo sapien
ccagtttcttgttggctaggctgatgtcacagcctcaggctgtccagcttggacaacactggcttcctgtgatgattgtcgctgggcaagggacgtttctgggtctctgccactgctgctggtggtgtgggtggaggtagaggccacagcgtcacgctggggggctttgccaaaactgtccggcttcctctgcaggctggcaggggcactggcaggaacagtggtcttctgctgaatgctgaatatgggacaagctggctcgctgtgagcctgcttcagtgggagagagaaggtggaaacttcagtggatagagaaggacaggtgggaaccccaggaggaagggaccatggtctgatggtggactgcttcttttgtttgttctaaaatgaggtaggtggccataggatagtgaaacgctttttctttgattggcacagagatgttcttggcctggaatcccatggccaccatgagctgggtggtatgttggctcatggctctttgtatgttgtccgtggcatctcctaaccacagttcacccaccagtccctcaaaacttctttcagtgggggccactccctgggttctagtgttagtaacttttgaatgaatctttcaagttgaagggaaaaaaaatggtgaggcgtggtagcttcctgtgaaaatttgattcttgaggtccatcgtgttccctgaatagaagggtagggccccggccaccatatggtagagtatgacgccaaggccccatatgtccatggcagggcactggtacccccagcccaggaagagttctgagcaggaatggtggtcttctgccttcacttctcgccgtccttgggcagtcaaaaattaaaagtgggaacagctggctccctttgagccctctttggttccacaaggaaggcagactttgtcagatggggaagaacaggtgggacccccaggaggaagggctgtgctccaatgatggagcgcttcctcctctgtacttttctctaccccaggattaggtacgtggccatgggataatcacatatgtattttttgttggggagaatattgattccgagatgtgtgctgcttggaatcccatggccaccattaccagggttgtagggggcataggtgtccagggtctctgtatggtgtcagcagtgtcttctggccagcattgacccaggggtcccacgtcagctggtttagtgggggccactccctggggtcgaggctgaggaattgttttactagtgtttccagtggaaacgaagaaataggtgggcagtcatactgtcacatagcctgaggcaggaagggaccacgggtggggctggatgtttttcagcctccctggcagagatcactgacagagtggtcagcttggccaagtttctgcggtggctggcagaagagggagagggaggcagtccccagagcaggaatgccttcccttgcaggggaaaaaccggccatcctcccctcagagcctccttcactgcagcccgtgggaagtgagtgacctgggggatccgtgccccaggggctaacctctgggctctggcttagccccaccccggggaaacattcacagcccctcctgaagagagccttgctgcaggaagactctggcggcgggtgtgggggggtggtgcccagctgggagagttctgggctgttggtggcagtaccccaggctccaaactctctgggcctgggggcaattcccttccctgagtacaacagattcccaccccgccctgccctactgcccgccccgcagggaagtggcccaggagaggaggcgtggacaggtatcccagtgactccagtcggagtcagcttgggtagcatggcccgcggaagacagaccgggcgaacggggcgggccccaggctaccgagctgcagctgacaggcagtccggcggcgtcgggtctccatggatacgggggtggggccaggcggcggcgagcggcggcgggcggggcttttaacggccatcggcccctcccagcctggacaaagacacagagcgcggcctgggaggcggagctctgcgggcggccggggccgcctccttccaggcgctgctgccccaacacaggcgggcactctctgcgggtcccgcggctcccgcggcttccggcccactcagcgcctccagaggcctcaggtgagggtcaccccccgcagcttggggtcactcccctgagcccccggatcttcccatgggtcctttggaggcctgggttttggagtttgtccttcgttaagtgccgcccgccgggcgcggctgctcc

SEQ ID NO: 28977 - DNA, 2300 bp, Homo sapien
tttaattgtggtatggtttccttcctctaaaagtttacaattcagggttttttagtatattcacaaagttgtgcaatcatcgccactatctaacactgcggtgactaataggctggaatgcagtagtcataagcctatcataagcgtaagtagagagtctttaggggtgctaaccatctggttgtctcgatgcaggggacgaggcacccacagtccctctcccataagcctgccaagaagattgatgtggcccgtgtaacctttgacctgtacaagctgaacccacaggacttcattggctgcctgaacatgaaggcgactttttatgatacgtactccctttcctatgatctgcactgctgtggggccaaacgcatcatgaagtgagcaaattggggtttcctggggacaaggtgggtacgggcaatgggagagcccctgtctgttcacatggactcagccttctcagcacctgggtctggctttggtgctgacaaagcatagcctgtatcagacaacacggagcctgatgggctctcgaagtgctgtggacaacactggcgtgtgcccaggggtgcacatgttcctcctggtggaacctggatgcattttatttttatgactactttccactctagcaactacattttttcattgaaataggaagttttcctaagtagtcttctagtcagttttttaaaaatgaacatgtgttggccaggcatagtggctcacgcctctaatcccagcactttgggaggccaaggtgggtggatcacttgaggtcaggagtttgagaccagcctggccaacatggcaaaacccaatctctacaaaaattagctggacatggcagtgcatgcctgtaatcccaactactcaggagcctgaagcaggagaatcgtttgaacccaggaggtggaggtgacagtgaggcgagattgtgtcactgcactccagcctgggcaaaacagcaagtgtcttaccaaaaaaaaaaaaaaaaagtatgtgtcaaagatttcattgaattcattaattaatgagagaactagcaagaagttacaatcagttcaaaggagaattcaaaatcccacacatatataggtccagtaagaatgatgagataggctgggtgcagtagctctcacctggaatcccagcactttgggagttcaaggcaggaggatctcttgagcccaggagcttgagaccagcctcggcaatagtgagagagagagagagagacacacacacttacacacacacacggcaggaggatctcttgagcccaggagtttgagaccagcctgggcaacacagtgagagagagagacacatgcgcacacacacacacacacacacccctgggcaacatagagagagacacacacacacacacatacacacacacacacacacacacacacacacagtttgagaccagcctgagcaacatagtgagaggcatgcacgctgggagcagtggtagtatgtgcctataatcccagctaggtgggaggattgcctgagcccaggagtttgaggctgcagtgagatatgaccataccattgtgtactccagcctgggcaacagcatgaggccttgtctctaaaaagaagaaaaaaagagataaatgtatacatacaaaattgggttttttctcccatggggatgggagggatgaaataatcttccctccataggacagaattagtttgcaagtcttatggaccagagtcatttgtactatataatgaacttttcttaaaacttattttgaaagcctaaccaagtgtctcaggaagcatgagaatatgtgaggttagaagctgcatgccgttatggtgatgtttcccaaattctgccgctccagtggcgccctggggcatccttccccattgggtggatgtagccactgaggctgaagtgattgaatcagtccaaagccgcaaaacttgcaagcagcagagcatggctgctagtccatctttccgatagtctattcttctccagttccttcattcagtgtttcctgagtgcccactgtgtgcctggccctatgctgtaactacagattcagagatgaacaaaataccagatagaacaagttccctgagggcaggaatttttgtggccttcagcaccttggtgaatgctgacacatagtagttatttaaatgattgtagaataaatgaagacacaggcgatctctattcacatggggcttctgagaaatcctgctcaggatcccaagagttctaccagatcacatgtagctagaacatatcagaccttctt

SEQ ID NO: 28978 - DNA, 2300 bp, Homo sapien
gtgtaaaaaatggttctcgaacttgaagaatatactactgactttttggaaaggagaagacatagattcttaagaatatggaactctggtttgagaggtaccgagtttaaagttttattctaagacaatgtcatttaggcctggtacagtggctcacacttataatcccagcactttgggaggctgagatgggaggatcccttgagcccaggaatttgagaccaactgggcaacatagtgagaccctgtctctgccaaaaataaatagatgtctttcagttacaaattacaaagctttatctttataacagtacaaggacttatttttagatattcacaaaaataaaaatacaaaattaaaaatttcttgcggaatttgcaaacttcagataacacagatattgagtgtttagaaaatacaggataatttaagattgcttatttagggtcttaaaatacctcagggtcatgatattcaactccatttctacaaaactattcagcagcgtaaatataggagagctagatgaatttcttttgattacactgcctggaaaagtcttgaattatcgtagactgaacaagtgttttttcgtttgtttttctggagacagggtcttgctttgtcacccaggctggaccaaaaaggtcgaggctgcagtgattgaggctgcaatcgcagtggtgcgatcatggctcacttcagcctcgaactcccgggctcaagtgatcctcacacctcagcctcccgagtagctgggactacaggcacacaccactgcacctggctaatgtttaaatttttttgtagagacagtggtctcattgtgttgcccaggctggtcttgaactccagggctcaagcgatcctcccacctcagcctcccaaagtattgagattacaggtgagagccaccacgcctggctgtgaacaagttttttgatggcctaccatgtgccttgcactctgctgcatgctatggggtatagagtaaggcaaggtcatgaccctgcgctcagagtttctgttcaagtgataaaatatgcaaacggaaaaataatagatacttaatctagtgcaacaagagcgaaactccgtctcaaaaattaaattaagttaaattaaataaataaataaatactgcaatgaagtatgtgaggaagttgcctccaccctaggaagggaaatgataattacaattccttacatgtctaacagcagtgttacagattgcaaagcgctttggtgcttagcatctcagctaaccattggaacagtaatttggtagaatgcagattatcacactcacttgactggatgttacaaatactaaaagctataaagcaccaggcactcttcccaacgaaagggtgggatgggatagttcataggtaaacccaccgagggttggcgactaacctaaaggattaacagcaccgtttttgttttttgtttttaacactcaatacgtcctagatcctgtgctaagggatttacagacatcatctaatttgattcccacctgtctatgagggaggtactgttattatccccatttcacagaggacaaaagtgaaacacagaggtaacgggtaaggtcaccttgccagtgggggcgagacgtgaacctaggcaaactgacacaacgcctgcactttcttgtccaaggtcacggcggtgtgaggtaggctggggaagggagggcgctgacctgtcagatacttgttcctgggtgagcttcttgtcgctctccagcaggatggacacgtagtggcggatcatgtctacgaagagtgataacgatgggtaggaccacccagaggcagatgttggagtcaagcaacagttctggccctgccatcttcactgaaagctggctcccagccggtgatgggcgagcttctcttcaccggggcgcagttgcttctctctgacgtcgcctctgggccttctctcgcccctatgcccggctagcacagaactctgctgcagcggtgagcccagcttattgccttcagctgggctgcccggccttccacttccggcgcggaagttggcgtcacgtcatggcgcgcctcggtggcgtcagagcggcgtcgggcctggcgggaaagtcgaaaactacgggcggcgacggcttctcggtgagtaagtggagcaatggtcgtagtctctcgaggccccgctcccctgcggcctaatctctaagtccgggccgcggtcggcgttctcctctggggctccgcgccccgaaccttggcttcctcatctgccctgagatgggataatccccacaggt

SEQ ID NO: 28979 - DNA, 2300 bp, Homo sapien
catctagccaatactaccttcctttcaagtcttagttacctctttaggcagactacttcgctgttgctgaaggataaaacccatcactctccatctgagattcaagaccctccattatctatccccaacgtacctgtcctttaattcatgatttcaatactatatgttagggactgtgctaggtgctggggttacaactgtgaactagacagacatgatccctgtcctcagggaatttacagtatggtaacaaatagccttaatgtactgaactacagttatgtaagtgctataaaagtacaggttctatgagggcttactaggaaatttagtctagttgctagtaagggtggtaaagagaagcaaggaccatttcttagggacaatctccttgaatttttttttttttttttttagtagagacagggtttcaccatgtcggctaggctggtctcaaactcctgacctcaagtgatccacccacctcggcctcccaaagtgctgggattacaggtgtgagccgcccggcctaaagaagtgattttttttttttttttttttgagacggagtctcactctgtcacccaggctggagtgcagtggtgcagcctcggctcactgcaagctccacctcccgggttcacaccattctcctgcctcagcttcccaagtagctgggactacaggcgcccgccaccacgcccggctaattttttgtatttttagtagagacggggtttcaccgtgttacccaggatagtcttgatctcataacctcataatccgcccgcctcggactcccaaagtgctgggattacaggcgtgagccaaccgcgcccggcctgaagaagtgatttttaggcagggacttgagggctgaaacagcagttagccagtagaaggggtaggagaagaggagtccaggcaaatagatactcatactgaaacaaggagatgtggagttagaaatcagacagcagaggtgggggaagtgcctgaatcacatgaccttttaatcttgtaaatcagaaccttcgtggtctcagtgcctttgcacaaaggtgttcttttcatctgaagtgctcttatttgcctggaaattcctactcagatctaaacattcaatcgaatgtcatcttccttgaaaagtgttcctcctatccctaagggagtttgctactgcagcttccctgctccacagggtatacctaggggcccttacctcacactagactggggctctttgagagcaggaacccagtctcacttactcaatgtccctaatgcccagcatagttaccggcataaggaaaatttctgagaatattcagagtgaaaaaagctcgcagtgcaggggaaatgctaaaagctaacaagaactgtttcaagtgctttatatttaataattcatttatttcccacaaaactttttgaggtgggtaccattattctcatcatcacgggcagaactgggattctaactcggagtctggcttcagcacctgcgctcttcaccacctatacttactcttgatgattataatgacttctaataatggttaacatttacgaggtaccgggccctgtgctaaactttttatttatcgccgcttcggttaatacggataaccattatcagccatcttgcagatggaaaaactaagtcttgtcagcacgtccggcttccaggcacccgcctttaacacgtgcgataccatctggcttccagaaaagcccaacagaagtgagatgaggccgactgcctggattagttcatcgggaagcgggtgagggtaaaagcctttctcgtttccgcattttaatgacgcagaaaggtacctgtggggattatcccatctcagggcagatgaggaagccaaggttcggggcgcggagccccagaggagaacgccgaccgcggcccggacttagagattaggccgcaggggagcggggcctcgagagactacgaccattgctccacttactcaccgagaagccgtcgccgcccgtagttttcgactttcccgccaggcccgacgccgctctgacgccaccgaggcgcgccatgacgtgacgccaacttccgcgccggaagtggaaggccgggcagcccagctgaaggcaataagctgggctcaccgctgcagcagagttctgtgctagccgggcataggggcgagagaaggcccagaggcgacgtcagagagaagcaactgcgccccggtgaagagaagctcgcccatcaccggctgggagccagctttcagtgaagatggcagggccagaactgttgcttg

SEQ ID NO: 28980 - DNA, 2300 bp, Homo sapien
tgcggcctaatctctaagtccgggccgcggtcggcgttctcctctggggctccgcgccccgaaccttggcttcctcatctgccctgagatgggataatccccacaggtacctttctgcgtcattaaaatgcggaaacgagaaaggcttttaccctcacccgcttcccgatgaactaatccaggcagtcggcctcatctcacttctgttgggcttttctggaagccagatggtatcgcacgtgttaaaggcgggtgcctggaagccggacgtgctgacaagacttagtttttccatctgcaagatggctgataatggttatccgtattaaccgaagcggcgataaataaaaagtttagcacagggcccggtacctcgtaaatgttaaccattattagaagtcattataatcatcaagagtaagtataggtggtgaagagcgcaggtgctgaagccagactccgagttagaatcccagttctgcccgtgatgatgagaataatggtacccacctcaaaaagttttgtgggaaataaatgaattattaaatataaagcacttgaaacagttcttgttagcttttagcatttcccctgcactgcgagcttttttcactctgaatattctcagaaattttccttatgccggtaactatgctgggcattagggacattgagtaagtgagactgggttcctgctctcaaagagccccagtctagtgtgaggtaagggcccctaggtataccctgtggagcagggaagctgcagtagcaaactcccttagggataggaggaacacttttcaaggaagatgacattcgattgaatgtttagatctgagtaggaatttccaggcaaataagagcacttcagatgaaaagaacacctttgtgcaaaggcactgagaccacgaaggttctgatttacaagattaaaaggtcatgtgattcaggcacttcccccacctctgctgtctgatttctaactccacatctccttgtttcagtatgagtatctatttgcctggactcctcttctcctaccccttctactggctaactgctgtttcagccctcaagtccctgcctaaaaatcacttcttcaggccgggcgcggttggctcacgcctgtaatcccagcactttgggagtccgaggcgggcggattatgaggttatgagatcaagactatcctgggtaacacggtgaaaccccgtctctactaaaaatacaaaaaattagccgggcgtggtggcgggcgcctgtagtcccagctacttgggaagctgaggcaggagaatggtgtgaacccgggaggtggagcttgcagtgagccgaggctgcaccactgcactccagcctgggtgacagagtgagactccgtctcaaaaaaaaaaaaaaaaaaaatcacttctttaggccgggcggctcacacctgtaatcccagcactttgggaggccgaggtgggtggatcacttgaggtcaggagtttgagaccagcctagccgacatggtgaaaccctgtctctactaaaaaaaaaaaaaaaaaaattcaaggagattgtccctaagaaatggtccttgcttctctttaccacccttactagcaactagactaaatttcctagtaagccctcatagaacctgtacttttatagcacttacataactgtagttcagtacattaaggctatttgttaccatactgtaaattccctgaggacagggatcatgtctgtctagttcacagttgtaaccccagcacctagcacagtccctaacatatagtattgaaatcatgaattaaaggacaggtacgttggggatagataatggagggtcttgaatctcagatggagagtgatgggttttatccttcagcaacagcgaagtagtctgcctaaagaggtaactaagacttgaaaggaaggtagtattggctagatgtaagagttgaaatttgcttagcacctaggtttaggtagcattaatatggagatgtgagcccctctgattttggatagagcagttttctttgaacaatagctttaacttctcagaatttatcttctagagggtaacttctgtttcccgattttgctctaggaagtaatttaagtgcacaagacattggtcaaaatggtttccaaaagaagactgtcaaaatctgaggataaagagagcctgacagaagatgcctccagtaagtatctagtcatttgttgctttatttcctgtagcaatgtgtgaggcatgtgagagatataaagttcctgcttttcaagtgctgagaatcttcaaa

SEQ ID NO: 28981 - DNA, 2300 bp, Homo sapien
aggcaggagaatcatttgaacccaggaggcggaagttcctgtgagctgagatcacgccactgcactccagcctaggcaacagaacaaaactccatctcaaaaaaaaaaaaaaaaaaaaagatttgtctctgaaattaggttgaaaatatttttattggtttcatcaggcaagaaacttgggtttttagagaaggaaaactatggtaggaaactggtgaccagctcttcttttttctgcatagctgtggatcaaatagctttccaaaagaagctctttcagaccctgaggagacacccttcctatcccaaagtatgtatttttcccctggtatttttgcttgtgccagcataactctagaatttggaatttaaggacactggtataaagttgagtgggctagaatgatttttaacagcaaatattaaactaaaaattttattcttttttattttttaaatctccttaagataatagaagaatttgttagtggcctggagtcttacattgaggatgaagacagtttcaggaactgccttttgtcttgtgagcgtctgcaggatgaggaagccaggtgtggagaggaggcatggaatcttgctgaaattcagtctgttttgccaacttcatggggctggggagggagagcacagttgtttcaaatttcatttttggtgtaagctctgttttcctcagagtttaaactaagtttaaaattcctaagcttgtggttatgagcctaacaatcagtgttttacctatgctgacagaatttcaaatctctacctctcccttgcaaagagccatctgctcatttctgtatttcttgtctaacagggtagttcctctttaaatattatgtatttaaccaattttattgagaaaagatgataaaagcattaaaacaaggaaagcaaagtggaaaacagatttcttttttttttacagtatgggtgcatcttattctaagagtctcatcaaactgcttctggggattgacatactgcaggtaagactgtcactttttctgtgaacatttgatggaagaggtttgtggtgtatgctcaagtctaaatagcgggaacacaggatagagtagggttaattggagaatttgggtttgtagcagctttagcacagccctgttgctgtgatgggtttggtagggtaatgtctgtgttttaaaactgtgcttattagcctaatacatctggcggccccatttattctctctgcatctgattcctgttcttaaagctgcatcctgtgtatctctgagtatctggtaatctttatcatattcatatctacattatctcccatttagctttttagatgcttatgtaacttaattttgtccttttcctcctcctcgtctcttttattaagtagacaatacattgatatgatttaaatatctcaagttatacaaatgtatatagagcagaaaacttccctccaccccattctccatttttcctcttctcccctactgttaatcttttcacactcttaaactcttccttttcactggaaatcttgaagataatttagttattttaagtctaagagctcccttgttcctcctgagagctccccttgcaagttatttgataatcttttaaagtttgcattttgtggattaacagttattgtatttaataatattttaattatctgattattttaacgttgccttgataatcattttcagtttttcagaagacaaattaagtctttgtattccaatagcatattctaaaaatgaagacatattcgtgtggatatccttgtaataagatatcaactttagcaaagtgtttattccaggagctctagttggaaagagaattatacatttctttttttttttttttttttgagtcagagtctcctttgtcacccaggctggagtggagtggtgcaatctcggctcactgcaatctctgccttccccaggtccaagaggttctcgtgcctcagcctcccaagtagctgggattatacatttctattgtgtattttgagatcatctcctaactccctatgtcttcttttttagcctgccattatcaaaaccttatttgagaagttgccagaatatttttttgaaaagtaagtggcgttattatggaatgttcaaagtaccctgatgtacttaagttctctctgaaaaggttactctgaaaactattggtttctctgaaagtcatatttatcattatatttcttaagtgactactaaaattttactggagtgtctttgaagtttcatctattaatatgactttgtaaaaataga

SEQ ID NO: 28982 - DNA, 2300 bp, Homo sapien
acactgttggtgggaatgtcaattagtacaagcactatggagaacagtttggagtttcctcaaaaaactaaaaatagaatcaccatatgatccaggaatgccactggtaggtatatacccaaaagaaaggaaatcagtataccaaggagatatctgcactcccatgtttattgcagcactattcacaatagtcaagatttggaagcaacctaagtgtccatcagcgggtgaatggataaaatgtggtccgtatacacaatggagtactattcagccataaaaaacaatgagatcctgttgtttgcaacaatacagatggaactggaggacattatgttaagtgaaataggccaggcacaacatattttcacatatttgtgggagctgaaaattaaaataatttaactcatggagatagagtagaagtatggttaccagaggctggggagggtaatggtggttgggggactgggaaaaatgagggtggttaatagcttcaaaaatataattagatagaatgaataagatctagttgtttttgtatttttgagatggagtctcgctctgtcacccaggctggagtgcagtggcacagtctcggcttactgcgacctctgcctcctgggttcaagcaattctcctgcctcagcctcctgagtagccgggactagaagtgtgcaccaccacacccagctaatttttgtacttttggtgcagatggggtttcaccgtgttggccgggcttgtctcgaactcctgacctcaagtgatccaccttcctcggcctcccaaagtgctgggattacaggcatgagccagagagcccagccaagatctagtttttgatagcacaacagggtgactacagtcaacaataacttactgtacatttaaaaataactaaaatagtataattggattgtttgtaacacaaagaaatgataaatgcttgaggtgatggataccccatttaccctcatgtgattattatacattgtgtacctgtatcaaaatatctcatgtgcgccataaatatatatatacctttcccttttttttttttttttgagacagaggcttgctttgtcgcccaggctggagtgtggtggtgcgatctctgcttactacaacctctgcctcctgggttcaagcaattctcctgccacagcctcccaagtagctgggattacaggcgtctgccagcacacctggctcatttttgtatttttggtagagatagggtttcaccatgttggccaggctggtctcaaactcctgacctcaggtgatccgcgcgccttgacctcccaaagtgcttggggttacaggcgcgagccaccctgcctggccaccatttagattttaaatgtttgttttagtttttttctgtttgttagttatatatcattatttaaagtggttttatgataattgatcatacttaatatgatatttctgtgttatctctggccattttgctatgccaaaacaatgtcagatgacttgaatatgtcttataagcattcagccatgcttggtaattttggaaactagtttttagccaatggagtgactgaatttcaagtctaatggtggtgtgtaattggtacacattgagcttcagcctgctgtttgtttcagtcaccccagactatgtccctcctcttggaaactttgatgtggaaactttagatataacacctcatactgttactgctatttcagcaaaaatcagaaagaaaggaaaaataggtaagtatgttcttttcctcttgtcttgtgtctctaaataagcttcattgaattaacctaaaagttatgtgtatcatggcatcagtaattggaacaattgtataactgaactcttcctttattagatttataaatatactgtaatttagggttataaaattacctcttctacctctaggcagtttccaacaggttgttttctgagggcaatgatatttggcaaacatgattattaattacttgagtcacttttctctttttaatataaaagaaaggaaacaaaaaacagatggcagcaagacatcctcctctgacacactttcagaagagaaaaattcagaatgtgaccctacgccatctcatagaggccagctaaacaaggtattggaatgatgggtatccgtgaaggtttgtgacatcccagtgagattaacagaaacccagctttattctcggcattttacaaagaaaaaaaaattaggaaacagcgagccaaaactctcttaggcgttggagtaatctccttagtagcaaagttcagattagac

SEQ ID NO: 28983 - DNA, 2300 bp, Homo sapien
cgcctcggcctcccaaagtgttaggattgcaggcgtgagccactgcacccagcccaaattcttataacagtatgaagctctatctatccaataatttttaaacatacaattttgcattgaggactttcatttaaaaaacaaaacaaaacaaaaaccactgtgcaattaaaacctaaatgaaaacgactgttttcttttaaaataaaaatgtcagccgggctcggtggctcaagcctgtaatcccagcactttgggaggccgaggcgggcggatcacgaggtcaggagttcgagaccatcctcgccaacatagtgaaccccgtctctactaaaaatacaaaaaaattagccgggcgtggtggctggtgcctgtagtcccagctactcaggaggctgaggcaggagaatggtgtgaacccgggaggcagagcttgcaatgagtggagatcacgccactgcactccagtctgggtgacagagtgagactccatctcaaaaaaaaaagtcttttttattcaagagggaaataaagccagtgtggtggctcacgcctgtaatcccaccacattgggaggccgaggtgcacaggtcacgaggtcaggagttcgagacctgcctggccaacatgggaaaccccgtctctactaaaaacacaaaaattagctgggcctggtggcacgcgcctgtaatcccagctactcgggaggctgagacaggagaatcgcttgaacccaggaggtgaaggttgcagtgacccaagatcaagccactgcactccagcctgggtgacacggtgagactccgtctcaaaaaaagaaagaaaaaaaaagagggaaataaaaatgaactaactggggaaaaaagttttgtaattcaaaatcatttgtgtctcttccaagtctcactattctgtgcctctctcttcatgttctgacccgacatgccctccagactcttctccacttacctcttcttccaaaaggtgcacatgtacacacagtgggtgtgtgtcttctaaatcaggatcttgcctgactctattctcagaccctcagtctttctccatcagctttacccaaaaaaccagaacaaaggtgacaagtcttatttgtggtgtgtgttctatagtttgtaaaatgcaagggcaattctgggtgtacaagggaaggccaagtaggccattagttacttcctcccacaaatactgcacactgccagacatggcaatagccaggtactgggaatacagacatcagctgggtagactcctcccttccctcagccatccagggtcattattttaagtgatgattacaaagttgtcaaatcactccttcactaatatggcgaaagtgtatttctgcattataagaatgagacaaaatcattctttttgagatttttttgttttctttttgagctgggaatctcactacgttgcccagactggtcttgaactcctgggctcaagcagtctacccatctcagccacctagatagctgggattacaggtactctcaggtttaacgcaaggctgagaaaggttttctgtcaggaaatcaaggaaagacgtgcgtttcctcctgctcttgacaggtgaacatttattaattctctttctttgccactgggatcattcaaatagagcaacaaaacctgacagagctctgggtcactctgcctgagcacccactgagcagagtgtgatgagttgggactaacttttaacactaactacaggtcctgggacttttatgcaggcctctgaccatggccattgaagtaggggtcgcctgtcctctgtggcttgatcaaaggcacacaggtacacaggtgtggcacggtagggaggaggacaatggaggggacaggattcggaccagccctcctgaaggccaagtcctggacaaggcattccaatgaggtgggggcggggagtgtggccctgacgcctcccagtagggcgcctcgagcccccatccccgccgcggctcgggctgccctgccgtcctgggtcacaaaggcggttgccaggcgccacgaacagcggccgccactttggagcgtgagaccctcagagttcagcaggtgagccccgggcccggatggtgggactgggcccaggttcccaccgcatcgtccgcctcagccagaaccttctggtccccgcccccggatagggacccaggaggcccaagccccttcttccggcggggagtgggagcctctcgcactctcggcagctccagaccctcgggatctccgtttacagttcaggacctcagctgcactttggcgct

SEQ ID NO: 28984 - DNA, 2300 bp, Homo sapien
tgatcctcccacttcagcctcccaagtagctgggattacaggcacatgccaccatgcctaatttttctattttttgcagagacagggtttcactgtgttggccaggctggtctcgaactcctggccccaagcaatacgcccgccttaggctcccaaagtgctgggattaacagatgtgagccacacacccagccactgagccacattttttctttttaataaaaagcatttactggccgggcacagtggctcacacctgtaatcccaacactttgggaggctgaggcaggtagatcatctgaggtcaggagtttgagaccagcctgaccaacatggtgaaaccccatctctggtaaaaaaaaaaaaaaattagctgtgtgtggtggtgtgcgcctgtagtcccagctacctgagaagctgaggcagaattgcttgaacccgggaggcagaggttgcagtgagccgagatcgagccactgcactccagccagagcaacagaacaagactgtctcaaaaaaaagagcatttactgcatgccagattgtaagtattccctgaaatgagaataaagttgttcatattccactaccttagcaaagcagatagtgactttttttgtagatccttcttgtcctcaaacatacatttttccatagttgcaattaaagaaaaatgtgggccaggcagggtggctcatgtctgtaatcccagcactttgggaggccgaggtgggcagatcacttgaggtcaggagttggagaccagcctgaccaacatgctgaaaccccgtctctactaaaaaatacaaaaaatagccaggtgtggtagcgggcacctgtaatcccagctacttgggaggctgaggcaggagaatcacttgaacccgggaggcagaggtcacagtgagccaagatcgtgccattgcactccagtctgggcattaacagagaaactctgtcttaaaaaaaaaaagtaagaaaaggaaggaaggaagggagggagggagggtattttgtttttcccctcaatttattgtatgtgttttcatgttgcttgtgttcataattagcatttaaatgactgcataataggccgggcatggtggctcatgcgtataatcccagcactttgggaggccgaggtgggtagatcacctgtcagttcgagaccagcctggccaacatggtgaaaccccgtgtctacaaaaaatacacaaattagccaggcgtggtgacgtgagcctgtagtcccaactacaccagaggctgaggctggaggatagcttgagcccaggagttcaagcccaggagttcgaggctgcagtgagccatgatcatgccattgcattccagcctgggcgacagtaagaccttgtctcaggctgggcgaggtggctcacacctgtaatcccagcactttgggaggccgaggcgggcggattgcctgaagtcaggagttcgagaccagtctggccaacatggtgaaacaccatctcaactaaaaatacaaaaaaattagccgggcgtggtggtgtgcgcctgtaattccagctactcgggaggttgaggcaggagaatagcttgaacctgggaggcggaggttgcagtgagccgagatcacaccactgcactccagcctgggcgacagagcaagactccgtctcaaaaaaacaaaaaacaagaaaaaaccttgtctcaaaaaacaacacaaaaacacaaatttccttctgaaagggactgttccagtttgcagtgtgcccagctatttatgaccatattattttttagactccgtctaaaaaaaaaaaagacttgtatttaatgtgatttaatcgactgtgcccatctcactgcggacactgagtgcgcaacctgagcctggagcagttgagggagacggcaagaccccacgcgccgtgtaacgaccataacgcgcgtgcactacaacctcgccgccggcgtccaggcttctgtgttctatagcgtgggagtagagagcaaacgccggcgaggacgtgacgttgcacaggcctatcatagtgcccgagaattcgtgggtgctcaagaggatgggtgtggcctggcagcgcaggcgcactagaggcctgtagggtcggggcgcctgcgcagtcgctcttcctcaggcggcggccatggcgggacaggaggatccggtgcagcgggagattcaccaggactgggctaaccgggagtacattgagataatcaccagcagcatcaagaaaatcgcagactttctcaactcgttcggtcagcgggccagcaaggggaggcgggga

SEQ ID NO: 28985 - DNA, 2300 bp, Homo sapien
ccaccatgcccagttaatttttgtatttttagtggagataggggtcttgccacattgcccaggttggtctcgaactctgtctcaaaaaaaaaggtagattaaaaaaattataattaaaaaaattatgatgagttggctggacataaaaagaaaaaaagagctgccgggcgcggtggcttacacctgtaatcccagcactttgggaggctgaggcaggcagatcacgaggtcaggagatcaagaccatcctggctaatacagtgaaaccccgtctctactaaaaatacaaaaaattggccgggcgtggcggcgtgtgcctgtagtcccagctacttggaaggctgaggcaggagaatcacttgaacccgggaggcggaggttgcagtgagccgcaattgtgccacagcactccagcctggcagcagagcaaggctctgtctcaaaaaaaaaaaaaaaaaagctaactaaaaaaatagaaaaattaaaaaaaaaaaataaagacgggtctcattatgttgctgaggcttgtgctgacctcctaggctcaagctgtcctcccacctcagcctcctgagtaactgggattacaggcgcacaccaccacacctagcagtatggtactattaagggcactaactcgtttagagcatattattttaataacaataaattaagatttttttttttttgagatggagttttgctcttgttgcccagtctggagtgcagtggtgcgatcttggctcactgcaaactctgcctcctgtgttcaagtgattctcctacctcagccccttaagcagctgggattacaggcaggcaccaccatgcctggctaatttttcttgtatttttagtagagatgggttttcaccatgttggtcaggctggtatcaaactcctgacctcaagtgatccacctgcctcagcctcccaaaatgctgggattacaggcatgagccactgtgcccagccaattaatatctagaagccaataaaaaacgtactgagcattttcacatgtaatgtcataaaaagaagagctttttctgcctagtataccatcacttttgccactattactatatcatgctggtccttgcatatagcaggaactcaatgctttttttttaagcacctgtctgctattaaatccatgtgtcttttaaactgacggcaccagataacctaaaacttgaactttagaactacttctttttttttgagacagtctcgctttgtcgcccagcaggctggagtgcggtggcgtgatctcggctcactgcaatctctgcaggttcaagcaattctcttacctcagcctcctgagtggctgggattacaggtgcctgcgaccatacccagctaatttttgtatttttagtagagaccgggtttcgccatgttggccaggctggtcttgaactcctgacctcaagtgatccacccagccaaagtgatgggattacaggcatgagccactgcacctggccaaagatgttcgtttctattctaggatgcacatgctaaatcagagataaatccatatcaagatcaaatccagagctgaagcacagtgtcagcatggtaggattgggaggaactgagaagaggaaaagggcaatactaaatgaaaaagtcaagtccaggagaactttcagggggaaatttggcttgaggtagacttttttttttttttgagatggagtctcactctgtcgcccaggctggagtgcagtggcgcgatctcagctcactgcaagctccgcctcccgggttcaggccattctcctgcctcagcctcccgagtagctgggactacaggtgcccaccaccactcccagctaattttttttgtatctttttttagtagagctggggtttcaccgtgttagccaggatggtctcgatctcctgaccttgtgatccacccgcctcagcctcccaaagtgctgggattacaggcctgagccactgaacccggctatctgcttttcaaagagtagacacttagcttgtgccttataaaactaataatcttccttggattgtggctaaattgtgtgaatgctggtatttcaaaagactgtaagcatcatgtctgattcaatgctgtatgttttattggagtttaacatgcctacatagtaaatacttggtaaatgtgctgaatgaccaaatgattcccaagatgagctagtcagctgaaagtccaaacatggggacttgggctggtaagccacctaggctttgaatcaaacagctacatctgaaagttttatgttagaataataacgcca

SEQ ID NO: 28986 - DNA, 2300 bp, Homo sapien
tgtcagtgcttttgtggagatatccaactcctgaggttcactcatactgtcattttctcctaaggcatcaggtgatgagcctctctgatccagcattttgactacccttttcacatttttttttttttctgagacagagtctggctctgttgcccaggctggagtgcagtggcatgatcacggcttactgcagcctcaacctcccaggctcaagtgatcctcctgcttcagcctcctgagtagctgggactacaggtgcacgccactatgcctggctaattctttcattttttatagagacaggacctcgctatgttgcccaggctggttccaactcctgaactcaagtgatccacctgccttgggctcccaaaatctcgggattacaggcgtatagtgctaggccttcacattcttatatacccttctgtttccttagctgtgaaatggagataatgacatagccttaattcacgtgggatgcttagcacagtgtctggcacttgatagatttttttctttctacttgaaatttatttttgagctgggcacggtggctcacacctgtaatcccagcacttgggaaaaccaaggcaggcagattacctgaggtgaggagttcaagaccagcctggcaaacatggtgaaaccccgtctctactaaaagtacaaaaattacctgggtgtggtggcacacacctgtaatcccagctactccagaggctgaggcacgataatcacttgaactcggcagatggaggttgcagtgagctgagactgagccactgcactccagcctgggtgataaagcgagactgtctaaaaaaaaattatttttaactaatataaaactctctgaacccttctttttctgagctgcttctccacttgagtccatcccacatcattgaacatttaattacacagaattgtgtaccatcttccttgacccccagatctttagccttctatagtaccctgtctctttttgtcgtactagtcacagttgcactttttttttttttttttttgagacagagtctcattctgtcacccaggctgcagtgcagtagcacaatctcagctcactgcaacctccgcctcccgggttcaagcaattctcctgcctcagcctcctaagtagctgggattacatgcgcgcaccaccacgccaggctaatttttgtatttttagtagagacgaggtttcaccatgttgtcaggctggtctagaactcctgaccttgtgatcagcccacttcagcctcccaaagtactgggattacaggcatgagccactgcacccggccatagttgctattttatttgtgtgattgattaccgtatgacgcttttattgaagtgcagtgaaggcaggaaacatgaccggtttttacaatattttcaacacttatcaccataggtggtacatagtagggccttaataaatatttgtaaaatgaacaaagttaatgagtgtttatgtttgtagttttaattgctctgaagtaaatatctgattttccaatttccaccagagtgctctgcacatagtaggtctaattatttttccctctttactaatcacccatgccttgtaagaattcagttagttgactttttgtactttataagcgtgatgattgggtgttcccgtgtgagatgcgccaccctcgaaccttgttacgacgtcggcacattgcgcgtctgacatgaagaaaaaaaaaattcagttagtccaccaggcacagtggctaaggcctgtaatccctgcactttgagaggccaaggcaggaggatcacttgaacccaggagttcgagaccagcctaggcaacatagcgagactccgtttcaaacaacaaataaaaataattagtcgggcatggtggtgcgcgcctacagtaccaactactcgggaggctgaggcgagacgatcgcttgagccagggaggtcaaggctgcagtgagccaagctcgcgccactgcactccagcccgggcgacagagtgagaccctgtctcaaaaaaaaaaaaaacaccaaaccttagaggggcgaaaaaaaattttatagtggaaatacagtaacgagttggcctagcctcgcctccgttacaacggcctacggtgctggaggatccttctgcgcacgcgcacagcctccggccggctatttccgcgagcgcgttccatcctctaccgagcgcgcgcgaagactacggaggtcgactcgggagcgcgcacgcagctccgccccgcgtccgacccgcggatcccgcggcgtccggcccgggtggtctg

SEQ ID NO: 28987 - DNA, 2300 bp, Homo sapien
cattgtaaggagtaagtaaagtaacccaggtgaaggctacacatagtaagtgctcaataaatactagctattttatatatgtgtgtgtgtattttatatatatatatatatatatatatatatatatatatgtatacacacactataaattctgttccttgtaccctctttgtttatttagagacagggtctcactctcacccaggctggagtgcagtggtgcaatcttggctcactgcaatctccacctcctgggctcaagtgatccccctaccttagcctcccaagtacctgggactacaggcacatgccaccatgcctggctaatttttgtagagacagggtcttgctctgtttcccaggctggtctcgaattcctgggctcaagcgatctgcctgcctctgcctcccaaagtgctggggttataggtgggagccgccgcacccagccccttataccctatttaataatccagtttgtcctgcagtcccctgcaccatactctgcttttttcccagtaatagtatcatctaagataatgcaattggccacttgcactcccttttaccaccctctacttttattctttcttttctttctttttttttttttttttttcagagacagggtctcattctgtcactcaggctgcagtgcagtcatagctcactgcagcctcaaactcctgggttcaagagatcctaccaccttagcctcctgagtagctgggactataggtgtacactaccatgcttggctcattttaaaattttttgtagaggccaggcgtggtggctcatgcctgtaatcctagcactttgggaggccgaggcaggcggatcacgaggtcaggagttcaagaccatcctggccaacacagtgaaaccctgtctctactaaaaatacaaaaattagctgggcgtggtggcgcgtgcctgtaatcccagctactcgggagactgaggcaggagaattgcttgaaccgggacctgggaggcagaggctgcagtgagccaagattgcgccactgcactccagcctgggctacagagcaagactccgtctcaaaaaaaaaaagttttttgtagagataagatcttcctatgttgcccaggcttctactttcattctccaacatagcttatctgcctatttttattgcttgttgtctgtctccctccaggacaaggattttgtccttctcttcagaggtattcccagcacctacaacagtgcctggcacatagtagctgcacgatacatattagctactatagtaaagtctacctgactaccctatttaatagaatattccccatgctcaatctgaattcctgattccctttaaccaactttttttcctttttttttttttttgcaatagtgcttattacctttaagacactctgtaacatactatatttattatttattgttagtctttctctccacacctagattgtaagtcttatgaaagcaagggcttttgtaggcttttttttttttttttttttttttttgagacagagcctcactcttcacccaggctggagtacaagggcacaatctgggcttactgcaacctccgcctccagggttcaagcgattcttctgcctcagcctcccaggtagctgggactacaggcgtgcgccaccgtgcccggctaatttttgtatttttagtagtgacggggtttcaccatattggccaggctagtctcgaactcctgacctcgtgatccgtccgcctcggcctcccaaagtactgggattacaggagtgatccaccgcgcccggctgtagggtttcttattcaggtattaccaacacctagggagttgcctggcatacagtaggtaattaatggagtatttgatgagcgcatgatgcatggtgtagtgccgatggaagtggggtcagaaggcctcctgccgctgcggcagaattcccgtgtggccttctcccaccagggcctcagtttcccctcgcagttccgattctctggccggcgctggggtggagccggcggggccgtcgtgccgcccgtggccgctggggacgctggtgccctcccgccccgcccacttccccgccggtccgcccctggctagagaagccgcagcccgcagtgtccgacccagtcgtcccgcgccggagccggccccgtagcgtgccatggcctgctacatctaccagctgccctcctgggtgctggacgacctgtgccgcaacatggacgcgctcagcgagtgggactggatggagttcggtgagtgcggcccggggaggggaggggacc

SEQ ID NO: 28988 - DNA, 2300 bp, Homo sapien
aattaacacgttcatcagggatgtatgggagtgcatttcctcacatcctcagccacaaggtatattatcctgctttttttttttttttgagatggagtcttgctctgttgcccaggctggagtgcagtagcgtgatcttggttcactgcaagctctgcctcccgggttcacaccattctcctgcctcagcctcctgagtagctgggactacaggcatctgccaccaggcccggctaatttttgtttttttttttgtatttttagtagagatggggtttcaccatgttagccaggatggtctcgatctcctgacctcgtgatccacccacctcggcctcccaaggtgcggggattacaggcgtgagccaccgcacccggccccttaccttgttttttgattattgccaatctaacgagtggaaaattataattttatatgtactttttaatttaatttaattaattaattttttttttttagagacggagtctctcacccaggctgaagtgcagtggcgcaatcttggctcactgcaagctccacctcctgggttcacgccattctcctgcctcagcctcccgagtagctgggactacaggcgcctgccaccacgcctggctaatttttgtatttttagtagaggcggggtttcaccgtattagccaggatggtctcgatctcctgacctcgtgatctgcccgccttggcctcccaaagtgctgggatcacaggcgtgagccaccacacctggccttacatgtacttttttaatggttgaggtggagccatctttcttatatttaggagcgtttcatgatttgtttttgttcattgcttcctttgcctttttttttttttttccctgagacaggggtctcactttgtctccctggctggagtgcagtggcagtaatcttggctcactggaccctcgacttcccaggctcaagggatcctcccacctcagcctcctgagtagctgggactacaggcgcccaccaccacaccaggctaatttttgtgtttcactagagacaggatttcaccatgttgcccacgctggtctcgaactctttgcctcaagagatccacccacctcggcctcccaaagtgctgggattacagacgtgtgccactggacccagcctcctttgccagtcttaatactaagttattttattattttgggagaattgctacatcgaatatcagccctttgtcatatgtttcgagtatttttctgaatttgtaccttgtctttgattttttttcttttttgagacagggtcttgctctgtcctccaggctggagtgcagtggcgggatcacagctcactgcagcctcgacctcccggcctcaagtgatcctcccacctcagcctgagtagctggcatcacgcccagctaattttattttttgtagagatgggggtcgcaccatgctggccaggctggtctctaactcccgagctcaagccatcctcccgcctcggtcttccaaagtgctgagattgcaggcgtgagacaccgtgcccagccgtctttaatatttttcaccaggcggatagttcacatttttgtgtagtctttttttttttttttttggtgccttctaattctaattcttcccatttctgggtgtgtacttagtctctctgagccacagttttctgctctataaagtggggtgataatgctcagtacacggtttgctttggctcgatgagaaatccaggtctgaaagcttcaggtacagcggccggcgctgaggaaaacagcgttaagtgaggcgcgtcagcggacaccacctgcctgcacatctggctggcctcaacttcccgctgttcgagcccacgtgagtggctccgccccatctggcttctgaccaatggacgagcttcctaaggcgtaccgtcccgactccaaggcgcctggctttgaggcgggctgcgtcttgctcggagtcccgccccttgccgggtcgagcaatgggcgccttccgtttggcgcaggccccgcccctgtcgctctccggcctgcgggccgcagggctcgttccggagggcgggcgccacggaggccggagtggtcgcagttcgggcggaggccgggccaggcggggctgtagggctggggcaggcggcgggctgcccggcgggacagctgcggcagccggcggggggcgtcctgagttggcggtcgagggcgctgccagctcccgaggggccgctcgggccccttccggcccgggtctggttgggccgcaggagcagggcgggctgcggcgcccgggtctggc

SEQ ID NO: 28989 - DNA, 2300 bp, Homo sapien
tagtcctagctacttgggaggctgaggcaggagaattgtttgaacccaggaggtggaggctgcagtgagcagagatcatgccactgcagtctaccttgggtgacacagtaagaatctgtctcaaaaaaagagaatacaattctaagggaattgtcccttagaataaaatccattgtccttaggataaaatccaaattcccttggctactaaaaccttgctgcaatccaccccctacctcgctctccagcctccattctgggctcactactccatcataccacattgtgggcagtcatgcgaccactcctccagccctcccaccagactgctccctagaagctcatcactcccagacccaacagtgcgtggcccacaataaccctcaagtgcttctactgaaaccattaaattgggttcttgcaaaacaaggcccctttagccttaatgagagaaaggtgggtccacctacaattagacccacccagattagagaccacaccctcaaacctgagttccaggtctttaggacagccagggattcagcacacctgaaagactatgtaaagtaaatttcctgcctctcccagtaacaggtttcactctatctacaaattgtcagtgaagctaaattgaatcaactggtattattttatgctgtacccaagtctactgaaattgtatcaaggattaatggcaagattaacttgtatgagcaaagtcccatacttacctgatttgagacaaattcagcattcctacgctagagacagggcttttcaactcactgttatttgtgaatttaaaaagaaaaaatccacgtgcccacacaagagttcagacagtgaggtccacattgaaaaaaccaggggcacttagcctatgagtccccaagacaaacagtcaaatacagcctcctttctcagctacacaaaagaaaccaccaaggctaggcttaaaaacaaacacatattccttagggcctgttttaattgcttttgtaaagtaattttctctagaggcagcccatctgatcccaaataagactgtttctccactcctccacaggcagaacttctcacttcttaagactcagaccttcaaaatctaggatgcaaactctaaggggaaagtgatctgttttgttagtaaagaatcccaaacacctagaacattgcctggcacaaactaaaccctcaacacatatttgttcaaagccttgattgagtagatgagcgaaatgtatcttctctgtgaagcactccttggtctgctcaaagtacttatgaaaccctcttgcatgtttccattagggaattaacaatttaacctccaaaaaaaaaagaaaaaaaaaaaaaactagcaccaccaagcaaaaccccaacatgctggaaactatgactttggagaaaagctacaccaagaaccgcaattcttggttctgtgattcagagtggttcaaagtacaagggcacacaattctttaaactgacaactaaaataaatacattcttctcttgagcacataatccaccttctactgcagtgattctccaacggggctgcacgtttacaataacctggggagcactgaaaaatctggaagcccagaccacacctcagcccaataaatcagtttctctggagtaggaggcaggcccaagtattttaaagctttccaagtagttccaaagtgctgccgagtttgaaaattacctctctacttaacttcaggccacgcgcctggaagactgctaggtcttcgagtttggggggagtggacttctagaaagaccttccagaccttcaaggatgtaatgttttgtagtctccttccaccaaaattcccatccccaacctctcaagccatgtggaaggggcttcaccgattgcaaagcgtggcagccacctaccttaaggctgcaggcttcctcctctagagaagccatttcttccaaagaggcgttggcaggacgcagaggggatccccctgaagacaggaacccccgagtgttccgaatcaggcagcctttggaggcggccccgcccacaccagggcccaagaaatgtggggagaaggaggaggaggagttatttctgcggcgggatgagccccaggataacctccgcgagcaagccacatcgtcctccttctgggctttcaggcgcttggggctgctgggccctccagaacgcgacgcagacctctgagctggccggctggagggggccacatcacagggctcccggaggcagctgcgcttgcggggacacccttccgacgtgctgctccagttgtgct

SEQ ID NO: 28990 - DNA, 2300 bp, Homo sapien
ggccaaaaaagtaaacttacgcataaaaagaaaggctctcttccttccaagaatgctgaacacctttgaagtctctgttgctgcctcatcttttagatacaatcattgattatgtatttttggcatcgtcctgaactttgtttcatttccttcacagttgaatgtgcagttggctttgtccactcagtgatggtccttgtgactgttcttggcttttctgttgtttttccatctttctataggaagcttgagaccgatactcatcgtttgctttcagcaccttaattttgctttgttcatttttgtaaagtaagggcaaatggccaccggaatgtacagtgattaaagaagcaaactctgtcaaagatggtgattagtggccagccagtccctctcaggatcactgtattaaaaagtgctcatttgccagtgacatttttttttggttttggtttttttttttttttttttttttgagactgagtgtcactctgtcgcccaggctggaatgcagtggcctgatctcagctcactgcaacctccacctcccaggttcaagtgattctcgtgcctcagccttctgagtagctgggactacaggcgcccaataccatgactggctaatttttttttttttaaattttaagtagagatgagattttgccatgttggcctgtttggccttatactcctcatctcaggtgatccacctgcctcggccccccaaatgccagtgacatttgtagggggattcagattaaggtgggtagcttagttgaggcgtctcaacccttttctgtgcactctctcaagatgatttctgaacacacaactataagtgcatgagaacttaaatacgtgtgctcttatgctaattatacacaaagtaaaagttttttcacaaggagaatttttttctccagcaaatagctcgctcaccctaggggtacatacaccccactttagagaccctcaagttacagtggtatcattaaacgatccataaaggagtgggtttaagaaagctgatacaggaacatgtttgaaataatacattttctcaagggtgtcctccaaccattttctttgataaattatatttctgcccattgttgacttgaaattgtcctcacccctctaccaagttcacccagtgtattctgaaggaaaatgaatgaatatggaaacctctctcatcctaggcagtagagcgagggaagctgcactggctgagaggctgtggaaccggatgaaaaagcagcccctgagtcctgtggcgttggctgtgagtcggccacgtgcttgctgtgtgctttaggaaagttacttaatttctctgagctttagttttctccctcataagtaggcttgctgtgaaaatgaagtgaaatcacattaatctgcatgagcatttaacacggtgcctggtgtacatcaggggtgtgacagtgagtgctggctgctgtagtaattgaatgcttagctacgtgccgggccctttgccagctacagctcatgtgagacctcatgttcagtcttggcagtaacccagcaaggtaggcattttacatgtgaggagcctgagaaattcagtcttggcctggatcacagagctggtatccaaattcaggtccgaggccaaagcccagatctttgcactacaccttgttgcctggcacaggtgagagtgcccagcccatagtgggtgcgcaatatctgtttctatttgaatgacccaggcaggcggttaataatgcttgtgatttctttgagagagaagtaagttcttgtctttggtgggggaagcatcaggtgaccagcatttgtccagagcctggtacccatcctctcccaagcccaatcagtggtgctttctcaaaaagaaaccatctcctgaccactttggccatattgggcctttgctcctcttctgtagctattgataagagggctgtgggcagttagtgataatcaaggtcgtatcccaactaagtgacagagctgagacagttaagttccaggacaagtgtgttgatctctgtacccacttgtgccaggtgcctggggaggtaggggcatggctgtctgagggtggaggggtgagtagggggcctgcagtgtgctgtgacgcctgggaaggggattctaagccatttcccatcagccgtttactaagtagcctggggatcttgttaaaatgcagatcctgatagattagggctggggtgctgcccaagattctacatttctaagagtccctggatgacggtggcattcacagaccacagcttctatgtgag

SEQ ID NO: 28991 - DNA, 2300 bp, Homo sapien
ccaggggacatttcagttccccaaagataacacagctttgcacagtggatgtttacttgctggtggtcttatctaagatcaacattggcagctgtgcccggagaggcctccagggtccaggtaagtggaggcttcatgtctcaggaggtacctggtcaccacagttaggatttttctgtttggggatttttttttttatgggttggtggctctgaaaaagctgcaagtcttctctgaggactacagacctctctccaccctctccacattcagcctctctgggctccagggccaaaagatgtctacactcaggtggcagacaggcctgtgaagacctcctggtgacatgctcatatgttgctgggactaaaggtgggattttagccaccacagtgggttggtggtgagatgtttaccaacaggaggtactttgtccctcatgtccacttaaagattcagtccaacccggcctgtgcttctgctgtcccaagagactctagaaagctccaatcctccctgaggttgatcttttaagtcagggtaggtggtcattcggcaatcaactgctctactgcctcaatgtcctcctcactggacgtcctgccccaattccatcctgttcagcgcagactgattttcctggaacacaatgttcattatggagccagatggcatatcagaaagagcactgtattaggagtcaagagatccatgggggaatcccagcattgcccctgatggctgtatagctttggggaaagtgaggccctcttggcattcagtttttcttccagcgaaataaaggattcagcctcccagagctttaaagtctttccaactctttcattcattctatggtctctctctcctcaagaatcctcagtggctgccctcctgcaaaaaaagcccaaacttcttgggctagcagttcccaaggcatccatcacctggccccaaaccaccttcttatgtttttgttatgaccccatcgccaccctcccccaagccacccagccttctccatgctgccctgatgtactctacccacgccttcacctcccctctgcttgccgcaaagccctccctccaaagccctgccccgagttcaccacaggcctctttcctggagcctttgctaacatccctgccgcaagccccagcctaaggtgagctcctctcctgaactgctagaacttctctgcagacaactcattggcccttaggggttcctgcctgggcacccagttggatgaagcactccagaaaggaagaaattcctggggccgagggaaatgaggcagtggccttggcctatgctgggaagtcctatgggcctggtatgaaaccattgtcatctgcagggtgtttcacaggttagaagccactttccccccatcgcctcatttcaccctcaaagactctgggtaaggggaattatttgtggtcggcgtaaggccagtcaatgagagaggagccaggcccgtgctaagcgtagatcttccacctccaggtccaatgcacttccctctcagaagaggcatccgctaaaatagggaccaaagctgctggagggaggcaaggcaagctgctatgtgaaaaaacgccaggccaggcagtcatgtcacacctggcagaaatgactgaagcatagccactggctgaagttatccccacacccactctctggagaggatgatcaggagcagtctgctcaaccgggaggtgggactcctcctcgggaaggtgtagaatcaccagcctggctccctgcggactcccggggctcacagaggccagagcagcaacagcacatgggaaacaacggggcgctggactggggaggtctcagagctctcctagtgatgacagcctcattttacccagggagaaagggcgagtaagctaaggtcacacagcaacaaagctgcacccagaccccagagccactctcctccctccctcctccaccagggccatgcccacttggggcaccccgccaccgtgttccagggacagctggagcacatgcttcttccctcgccaacccagcaattccgcagggcatctgacctccactgttgacttctacccagaggacaagaacatttttagttcccaaggaatgtacatcagccccacggaagctaggccacctctgggatggggttgctggtttagaacaaacgccagtcatcctatataaggacctgacagccaccaggcaccacctccgccaggaactgcaggtaagctctctctactctccgtgtgcgtttgctgacaggtttattgtccgtgac

SEQ ID NO: 28992 - DNA, 2300 bp, Homo sapien
tatcattttataaatcccattgttctgcctatatgcccgtggcacgtgttcagtgattatttacaaatgtttgacctgccctgctccctactgagattcttgaggaagtcctggctcatttttatggccacatctctactgctttccctcagctcactgcctttcacgtatttgtgggtttgcctgggtgccgtggatctccaagggttctgtgaatagagttcaggggttgatgaattgggacagggggaaaaaaatgcattttcagtgactctgatatttagcatttccttcaattatggatgtaggccagaaacttcagtagtatttgtagtgcctgtcactttgtcaccagtagaattcacagatattgtcatcacacatcacggttacttagctacctcaaaataccacttatgctcatcacaactttgaaattacagtggttattagacctgccgctagggtttgttgcttgaagtgttaacaaagaagtacatgcatcactatctcataaattgctttataatattttgataacaggctgggcaaggtggctcacgcctgtaatccttaacactttgggaggctgaggtgggaggatggcctgagcctaggagtttgaggctgcagtgagccacgatggtgccactgcactgcagcctggatgacagggtgaaacccttctcaaaaaaaaaaagttgattactgtataatttataattgaattttctttataagcctagttctgtgtgttttgtacattagtctgatgagggtccataaccttccccagaatgcacagaaaagattaagagccatgacaggtgggtgctcagcatgtgtttgttcactgaattaaaaagcataaactaagtcagtgtccatttggggaaatgggcctagaagctcccctctgtctgagtgtcaaatgatcaagtgactgaggagccaaatcaagcttctctatgcaggagccccccaggcaggcagagagctgctgcagtgcagcgtgttggccaaggcagttatgtttgctgtgactctgtcctttctgctgtttttcttacattcaaaggatgtgaaatattggagggataaaaaaaattcccaccccattcttttttccccttagtaaaaactgtgctagttgttggaagattgagtctactcagtttcattagcagcagctttgtagggactgggaatgtcctgttgtcccagccagagggaggaggagacttgagtgtgtgcagcccacggtgaaggagtaaaccaggagcagcactaatagctaatgggtattgagtggcttttttctttccttctaccaagcattgttccaaactttatgaaagaattcttattgatgtctccattttcaggtaaagagacaaagatatccttgcctaaagtcaagagctagtgaatgggagaatgggtctggtctcctaaccactaactctaccatgctactctacctcttgagtgctaaggtgcaaaaccttccctgggccagagaaatggtcaccgtacaaagcctggcacagagcatgtgctcagatagcacctgttatcaggtgaatggataaagatcagaagagaagggaaagacatgcctttcgaacaaattaaaagagtagtggaaaacatcaaaatgaaaccaataatgcctcctcaggaagctgaccgtcgggaaggatgaatagcaattcagtctacaaatatttcctgaacacttctggctggaaaccttggaccaattaatgactatgctgtagacagcacatacagacagtgctggctgcagtctgggcaagtgaggctcctgcctggccaggacaggaaggctgacccagaggctcaactctctctcaaaggctctgtgaccttaggttgcttaacctcttaggacctcaggctcctcactgtccactgagcaccccttttgcaatggcattgtatagttctccctttgaagttcttaagcaattctgccctgatatatcgtctcagggagccatttagttctgtccaaagtagtgcctgcagaggcactgtgggttcctctggcctatctctccctttgtagtcatgagggtcctgtgtggcaagtggcctgggctcaccccatgtacggcaacatcctggcatcgtgctcctatgaccggaaagtcattatctggagagaggaaaacggcacctgggagaagagccacgagcatgcgggacacgactcctcaggtatgctgagcttggcagcagagcgggcaaggggaccactgggtaaaaaaggactc

SEQ ID NO: 28993 - DNA, 2300 bp, Homo sapien
atggatatgctacctactcgtatgagtttggtttgagaactagatgaggccaagtagtaatgacaaacatttgcatgctcactgagtgtcaggccccatgctaagtacttttctttttttttttttttttttttgagatggagtttcgctcttgtagcccaggctggcatgcagtggcgtgatctcagctcaccgcaacctacgcctcccgggttcaagtaattctcctgccccagactcccgagtagctgggattacaggcgtgcgccaccactcccagctaattttgtatttttagtagaggcaagttttctccatgttggtcaggctagtctcgaactcccgacctcaggtgatccgcccgcctcagcttcccaaagtgctgggattacaggcgtgagttttcattcaatatcttgtttaaccttcataacaactgttgagacagatgctatctttagccttatttaaagataagggaactaaggcccataggatgttggtaaataataaagataaggaaactgaagctcaaggagatgaagtgttttcaaagtttgcacagcaggtaaactaaggagataggatttagatctgaaaggtactatgtcctgcctccttccactgagaagcatgagaagtgcttcagaaacactcctctactgcctgccctccaagaaaccaaggcctgatacagtggagggagttcccaaagaaaaatcaggatgtgttccttgcgtagggaggtgagaattcccatctgagccagacagaatgagtgcctttgaatgggcataattgcccctggtggccatgggagtgcagctgatagtcctgaaactcccagggtgggacagctggggaaagggacatccattggaataggcagggccagcaagcagaagggaccagggtgttcagtggtgcaggaggcatggtgcctcagagaccatcaccctgcggacaaggatctgcaggtaggggccaggcctagttctgcatgctcagtcagcatcaaggaattcggttcacaagtggtgagagcagcgacacttaaggcattgtgttccttgggtggaaagtctgggaagctctgggcacactactagggaaaaggtcgagcagaagccccaaaacaaaggtccacaaaggatccagggccagggctggaaagagcccaaatatctgaatggaaccctgtgtgcaggccagagctgcatcacagaagacctgactggggactccaggcagtcagaggcccactcctttggcctgctcccatgcattagcatcaggtgctagggctgagctgaacccaggggtattcccctttagcccacagagcctaagaactgaatagggcctgagaggatggaggaagaagagggcagctaggccaactttttttctcccatacccaccctgcggaacaggaatggaagagcccttccctgaggtatgtaaagggtctgtgacaccagctgggcatggcttgctttgtccatttcagagagacactgcccataggtgaagtgagaatgtccacatgctagcttcctgcctgagggtgatgatactttgagatcagattgatttcagggagattctggtccaaactagactctgtgtagtgacagccctcaccccacccacccacccacccagcctgcaggcttcccgagctgtcctccctttgcagcacgacgcccagatggactactatggcacccgcctggcaacctgctcatcagacaggtccgtcaaaatctttgatgtgcgcaatggagggcagatccttatcgccgacctcagggggtaagtgctggcgagcccagggaagggctccaggaatggtgtgggttctcaggccctgcttcaagcgtgggagcaaagcatgggagcccagattcagagcaaccccaaagcacatttagcggagaggacgctgggatcccagccagcctggctgtcctcagcggacgtccccagggatgatgctgttaagggcacaggtggatacaggtgtgaatctcagctctgccactttatgtgtacccaccagaagaccttgggcaagtgactcagtttctctctcagagccttcatctgctcatcctcaaaattgggccaatgctacctcctatccagctagtgtatgcaaggccctgacacagggcccaggacacagtaagtctttagtgcaggcagctactgctacttttaaaagtggtaaacagtaccatttcgttcaagtttagccagtatgacctaaagtgtcacaaaagcatcaccgtaagaat

SEQ ID NO: 28994 - DNA, 2300 bp, Homo sapien
cccacctggtaagcaggagatccagcactgatacctagcagtcttgatgccagcatctgtactctaaactgccatattacagcgccttatgggccaaataccttacagcaaataccttaatgaataagatacagttctgttgcttgtcacaaatccccaatctcttcaacatcagtgtctacacaaggaaattcttttaatcacaattatgcctgatgcattatatttacatctaatatgcccttgtcctcattttccactcaaagaaagtgaggctcagagaaaagtgacttggccttatcacctagaaagtcagtggtgcagctatagagccaaggccagagcctgttccttgaagaacaggagatctggcaggacgcagcggctcacacctgtaatcccagcactttgagaggccgaggagagtagatcaccagaggtcaggagtttgagaccagcctggccaacatggtgaaaccccatctctactaaaactacaaaaattagccaggcatggtggcacatgcctgtaatcccagctactcaggaggctgaggcaggagaattgcttgaacccgggaggtagaggttgcagtgagccaagatcataccactggactccagcctgggcaacagagctagagtccatctccaaaaaaaaaaaaacaaaaaaaacaacaggagatccaagagatcccctgaaacctgcctttgttccctgctctaacctaaccaccaccccctcacacccctgcaacaatttctccactagagggcaataaaaaatcttgaaagctgcagtggggtagaagagttgcccagaggcctggcccttaattctaacaccctactcccctggcctcccctccaaagctccttgacagtttgggtctatcacattctctgagccttaacatcttccttcaagcagtgaccatctccagctagggtccttactcccagtttcagcagaggaaactgaaggactgtgacttgcccaaggggagccaaggcctcccccagctcatctgcctccttaatgtcacaaggggcccagggctagaccatatgtggctgaggcggggagcccaggctctgtcctccagtgtggcattctcactgcgcttgtggggagccttcagctgccctaccttgtgaagccagagacctggggttggggaccctgaggattaggtctggggctctagctgcaggagcctggctgagatccttcattgcctaggggggtctccttgatgggacttactcaggaccccaggggatcggtttggaaggggcagtcctatataggggttagggatggcagggccagaggtcccagcctctggcgaggggcattccctggcctcctctgccctggtcccagtccttgggtactgagagggagactacaacaaggaagcactaggacagtctacttactcctaagatgtcactcatcctacaacattcatcataagaccagtcgcacccagagccgtagtgaggcgggtgaagctgcagatagatagatgatagatagatagatagatagatagatagatagatagatagatagatagatttttttcttttttacaagagtgtctctctgttgcccaggctggagtgcaatggtgcagtcacggctcactgtaacctccacctcccgggttccagcgattctcctgcctcagcctgtagctgggactacaggcgcgcgccactatgcccggctaatttttgtatttttggtagagacggggtttcaccatgttggccaggctggtctcgaactcctgacctcaggtgatccaccccccagctcagcctcccaaagttctgggattacaggcatgagccaccgcgcccggccgatagttatattaatcctttctttcatttatggatctcaggaaaagggcagacttggtcgggagagtagacccaccagagcttcagattccaaagccctccgggtcagggtaactgcggcaaccagagccccagccctctggtctcgcacgtcactggaggataggggctgggccacgggagggcggggcgcgccctctggaaggcgcggaactgctgtgcgagccgagcgcgttgctgcccggaggctcctacgccacggcccgtcgggcccggcgccggaagtgagctgttccgaggcgccgccgggagctgccacgtccgagacctggagcagccaccgccgcaatcatggtgagtgttggtactgaggaggcctagcagggtgaaggccacggtcgcggccttcacgggttcctcggccg

SEQ ID NO: 28995 - DNA, 2300 bp, Homo sapien
tgggaaggacagccccaccgtcctgacagacagggtcccttgcaggtcatcgccaccatcccgaccagcagactcaagttcctcaaggaggcaggcaggctcacacagaaggaggagatcccggaggaggagctcaacgaggacgtggaggagatcgaccacgcggagcgggagctgcggcggggccagatcctgtggttccgaggcctgaatcggatccagacacaggtacaggaggctcttgggggctgggcccaggcctggccggggcgggccaggggatggaggtgagtgtgcttgtgctgccccccagggcccagctctggtgctgagggagggtggctacagaggggtcccggccagctctcaccagccacttgcacacccactcctgtggctgctaaggaacagcacggcctcctcagagaggtcccattgtgccctctcagggcagcacggggaagtggtaggggtcacacccaccatggtctccagggggatttccctgagagggtggggaagggtggctctgagggcagaggtgagtgaggggactgtcgctcagggctgggggcacccacccacaggggccgtgtgaggctggacagaagctgcaggccaggtcgcccagggtcccccagggcgtggtggtcagggggtccgccgcctccacgggggcttcagttgctctccccagcttcccctagggggtggagaggctctggggagcaaaggtcagtcatcctcaagcacacacagacacacatgcacacaccaagcacaccaggggagcacaggtgcagggcgtagccagccagaagcaggtttcttccccagagcagagagagcatggctgccacgtggcacacgacacacctgcgcgcctcccccgacccccccacacacataccacatgctctcacatggtccccttatgcctggagcaggtgttgtagctcacaagtgctgtcacagccctgcgaggggagggtcagaagggactctgtgggtctcttgcccagaccatctggggagctggagtgggagctcctccatgccccagcatgcttgggcgaagtgcagtgtagaagcagccacctggccaccatcctgccagctgtggcccagcacctcatttccatccgatgtagcagagagctcacctgggtcacctcccacccctctgtaccctgtcccaaacctcacctcatgtgaccttcacagccctgggaggtagatgtgactcccccagttttagaggttaccaaggtccaggagatggccccttctactgagctggcacagctggggtggggactggaagccggtttcagacccggaggtgcctgacacgggcctgggctcaccctccctggttagggccccgcagccacccctcccagcctgcccccacctcctgggaggtccaggacaactcagtgaatatgtccctggtgctgtcactgccctggcggcaaagccacgcaggggtctccagattacgggaggaagcaaggactgcgatttcttgagtgggcaggggcgcctgtcttgcctgcctcttgcggaatgctaacacgggtcaggtgctttgccacttacagataaccctgccaggcaggtggcattgacccttcttaagaacaagaaactcgactcagagaggtggcttgcccaaggtcagctagctagtaagtgacagagctggaatttaggccaagctctgtccacctcaggacccccaccacaccctctacctccacgcctgtacctgagggaggctgaacactgctctcttccctccagataccatgtttaatcactgcctcccccactggccagcccactggcccctgagccactagcacaggacaaaggccggaccccctgtgtcctcccggggaccctggggcctgcaggtgggcccagagctgagcagacgtttttcagagccttggagtgtgtctggtatttttgttttgatttaagtgacattgtcgttgttgccgtggctgcggctgttcttgtgacgttgccctgtcagtcatgtagccgttgtgctcgttcttctcgcaacttgtctcgttctctcctccgttgcagattgaagtagtcaatactttcaagagcggggcctcctttcagggggccctgcggagacagtcctcggtcaccagccagagccaggatgtagccaatctctctagccctagtcgcgtgtcgttgtccaatgctctttcctctccgaccagccttcctcctgctgcagccgggcgtgagtgtgactccttactgcctcc

SEQ ID NO: 28996 - DNA, 2300 bp, Homo sapien
tagaatttaccttggatggatgatacagaactcatcccacagtgcctggtacatagtagatgcttaagaaatggcaggggagtattgttgtttgtttttattcacattcttggtccctgcctcacctgcttctccgaggaatacattgttggggtcaaaactcatggattctgtggatggtgtgtgttccatccatggccaaggaacatggcctcttttgagtattgtaggtgggagcaccaagcgtgcagtttctttggtgtctcatgtctctgtgcctcttcttgaggtatcacatccattttatgttctattccataagagatctgttagtcccagtgtaaaaataatcttcctactgcatccctgagtaaaagcgtcccttgtgtaagacatttaaggtttctcctgtggctccagcacccagtgacccaagactgggaagccccaaatccagaaacacactggatttgaatacagtttataattagttctcagtaaactgggaagtagtcaggggtaggggtaaggaagagagactgttttgcccccaatttgcagatgagtgaaccagggctccaaaaactgaaggaacttgcccagggtcccacagccaggatttgaacgcaaatcgctccaatgccagatactgtgttcttagcggctgcctggcacagtccacccacccaccagggctcttcggagacaaacgcgggagcaccccctaggggaaggggaggagcccagggctatgagccaggagaccatctccttctgcactcctcagcactctcactccgtgcggctctggaagagtgctttttccctctctgagcttcaagttcccggctgggaaagtgacttagccctagaatgcctccagctctaaaatgtgtgaaagacgaaaaggttatgaaggtgataaggcaggggaggagttggagctgaggagggggtcagtcctgccttccttctctcagcccttcccctcaccgtcctgggcccaggatggccagctgtccatgactgcggggcagggccactccctgtgccagacccaaccgagctcagctggggccctttgtcacccaacgcttgctggggcctcggcctctggtgttgggtgtcggggtggattggattctctcctggcagccccacagatgccgcactcctgtaagggtggccgggcgggcagggagaagccagagctcccacctcctcctgggctccagagagggacgggaagccgctgtccctggtgctggtccatagggacccccctccccctgccaggtgagggctccatggacctgaactcatactgggaccaagctctgggctcaatgacattcttgtgactatgtatgacctggcttctttggccaggccaagggcctcgattaatatggtgggggcctgtgggtgcaggtgggggctttctcccatccccatgcctatgagacctgagtggggagggatgtgggagaagagtgtattggtggacacaggtggcatgggtggagggaggatttgtaggggcggggaacctgggaaccgtgtatttgggggagagtgtcccagattatttgggcatggggcgtgtgtaaacatgttaagggtagtgagagaaagagggaaatggagtctgggtgtgctcagagggcctgtgagcacagcaattcttgagggaaaggggtggggaggttaagttgtatggctcaaagctggtgcatggggcctgggtgttgacgtgtgtgtggcagtggcacaggacacaaggacatgccagaaggtatatgtcgggggatgtgtgtacacacagtgtgtgtgttgtgaagccagtgtgttccacagcacaacacacaaatagggagttagagtgtgttatggggctatgccttgagggtggcatatcgtggagtgcctgggttggcgctagtagcattggatttacagtgtgagctggtgtgttagggggcatgggtgtagtcagtgttgtttaggttgctgtgcgtgtgcctggggccttcctgagcacctgtcccatgtggcctccagtgcctggcctttgtcactcactctgtgcttgtcccacaggagccaccacccctgaccatgtagatgccagttccagggagcagcatgggccccactgaatggagactcctgggtctacagccctgagcccctccggcccctggacctcgtcccacaccggaggacacctcttggagctcaccaccactgtcaccagcccgcctcggccacccccaccccccgggacccggagtcggccg

SEQ ID NO: 28997 - DNA, 2300 bp, Homo sapien
ctgcttctcgggctattttgtaagcagggaaagcagtttaccgccaaagatgttgaagtaataatggtgggattcctggcacagacatgtaggctggcaacagatgggaggtgcaatgggcctttccgcctctgcccgtctttgcccaccctcgctccaacatctcggaacagctttacacgggcctgttttggggaacggagagcctgtgggccttggggaagggcagatgcttggccctggtccctggggtggagctgactagggactgctgacttagaagaccacctagaggggtggccagtggaatccccccaactacacccctaagaggggtagagttcccatctgcacccgcaagatgaagcagagatgaggctgctttggaagcccccagtcttgggctattggtgtggggtcgagagcctccctgaggggtgtcctgggctgctctgtcagaaccccagcagggagccttgcctggcctctgactcacacccttgccccagtggaggccaaggccttgaatgaccacccggcccttgacatcgtagcttcgcagcatcctccctgcgttgaggccaccctgcgggctaaggggcaggtgggcacccttccatggggctgggggctgaggagcaaggaggtctcagcatggcctactggtgggagacccacctcaggcgctcccaactgtctccctcccgtggcccctctgcacggccgggttctgattttggtgcagtgcagactttcagcttaacgagacaaattggtattctgtgccagcccagggatggagcggcagctcgggacgctcgggcgggcagctcagaggtgggcaggaggtgggggcaggggaaagaggcagcttctgcctggaactgcctcccggggccgcctccagccctgcccctgtcccccatgcacccctccaccctgacaggtgccctgagacactggtcctgaaggtccttccaccttcagtgccctccctccaagcagggtacccctcctggagggggcagggcagtggaggccaaggcttcagaattctagagaagcccctcgcccccggtgacctcctaaccttgctcttagggctctcctcccacccatctggagttgaaagagcagcaagtctggcagagattaggcaggaagaggtgagcagctggctaggggcttccaaccctaccgactcctcacccggggtccctgggttcccgtggaagtgtcagtcagcccacagtcggcctgcaactcatcatagatgtcctgaagattaggtgggtgtacagacatgcagacacccctgctggtgggcaccttcttgaggcaggcccttctgccaagccagcccccaccaccacacccccccgagggcaggtggggtcgcacacaggcagggcgggtcgcaggggtagcgcttcagggcagcagagagctgctgcgggctcagctccactggccctggaaacacagatgtgtttaaaatgtgttgagtcgacttctccccatttgcgacctttgcccctttgccccccaggtctgggggtgccttgactgcaaagaggggggccagagcccctgaccaaataagtcccccagaaagcaagggacgacttggggccatttgagcaaaatcctcccctctctgctcccgttctccccaccaccactctcaggacccccttccctccagcacagcccagccctaccctctccgtgcccttgacattccctcctgcttctggggagcgggcatattcctgggactctgccagcttcggttcctcatgatcccacgggaggaattaaaaccgcaaacaacagcgtggtggttcggtccacacaccccccccgccccccactctcctcccccgtgccccctccagaaccggccctccctgtgtccctccctccctccctcctcccgcccccatcccccagcctccggcagcggcaggggcggcctctgcctcccccgagattgcattttgccggcgagatgctctcctagaaccggcgccggcgcctccgccccccgccccccacccgctcgggcaggatggtacagtctgcagaggggcccgggcacgctggctgggctcagccgcggcaccagctgccgcaccgcgattacggggctgcccgccgggaaaccgtgcaggattggtggtgattttcatagccaagtaagtaccggcatcccccagcatgagaaaataaaaaataaaaagcgccccactccactctccccttcctccctcacccattttattttgtttcatttcatt

SEQ ID NO: 28998 - DNA, 2300 bp, Homo sapien
gagtttgaaatccctgccatcccccaagtccctacccaataatctataaatctcagagccttggcatacagtagatgctgaaaaagaactgtagcccccatttactgagtgcttatcctgggtgaggctgtggaacctatcaccttttaacagatgaaccaacgggctcagagttgaagctatgcccaaggtgagttttgtcactaggacttttgtggtgtcactcacttttgcactgagctacctctcatggtgcggcttttcatgcctattctttttgccttctcaatttgcttgctggtttcagaaggtttcataaaagatagtaattaaggccaagcctcagcattgtggctgggcagagactgagagaggagaaaggcatttcacaggaggaaaagaagagagaggaagacatggtacagtgctaagggtgtgctgggaggggcactggcaacccaggtggggaaggagtggaaagggcacttgaggccagagtgtgaaaggccctgcatggcatactggggctgtgagacttctgagagcactggggagctatgaagtgttttagagcaggactgggcatgatgaaggctagcgtggcagcagaatggaggcagagaggatggcgctgtgagagtccagaaaagaggtgtcagggacctgaagaagagcccttcaacagagagaagagcagattccaggccccgtcagggaggacatggtgctggggtgggctgagggacagtgcctggagctggccatctggaggcactgcagtgccattagctggcacgaggatggtgggaggagatatggattgggtgcatccctggggtgatgtcctctgggtgcccagggagaggacagggccgcggcaggagatgcaagtgctgcctgccaagctgagcgccaagcagcgagaagggagtgctctgggccaagaagggcctggagacacccctgtcacacctgctggatcgccttctccactggcctccctggccccctctctccttcctatgcctaagcctccaggcgtgaatgtcctctgccccatcccagggctgcagagagcaggccatgttgaattttggccctatgaatgggcatccctgccactcccaggaagcagatgttccagatactgagaccccagggtccccccaagctcttcaactcgtcagagcaaggcctgggaaggggaattactatggtcaggccctcccctccccatctcctcacttcctgcgagcagtgcatttggctttatataaagccaataaataaataaacaagccggcatgattaattgatggtatggagcagacccaggcactgggagtcaggtggcctggcttcctggtggagctcggcttttcaagacctggggcctgagccaaggaggggaagcctgctttggggaggtgctttcggtgcgtgtctggggttttcaactttctcctcaggcagggccactgtcctggactcctcctggccctaagcagggccagactggaggctggggggctaagcgtgtccttgcctgctgccctaacctttctcgcctctgagggcccttaggctaagctcccagggattggaccagcggtcccctcctccaaagcgggtctccctatctgcctactccacacccaattcactccacagccaattcgctccaccccgtgtggccagttcacaggctcgggtgtgctggggaggcttggggcaccctgacccctggggaagaatggggaggatgcctcccagggccaggctggctgtgggggtggggcggggacaggggcctgtgctgatggaggtacctggagacacgccccggggcaagactggatacccttccccgcagccccactggtgcgcgcggaggaggacgcgggcgggaccgcgcgctccggtcccgcggggcgctctccgtgaggagtttggggagggccgagggggagcgcgcggggaggagtgagcagggagggcgggagggggaggcgggcagagcgcagtgcagcggtggcagaggcggcggcggagggagggaggcgggcgggcggcggcggggccgcggggcaggcgagcgcggggcagccgcggcagaggagccgcagccgcagcggggccgggccgggccgggcgcgcaccagcggcagcggcggcggcagcggcggcggcagcatctcgctctcggagccggcgcaggtgaggcaggggcggccgggcccgggctctgggcctcttcccctctcgctcggtctcttgtcactttccctgctggcttccct

SEQ ID NO: 28999 - DNA, 2300 bp, Homo sapien
gcaaatgacttcatagtgtaggaagcccagccgctggattcaaagccagctcaagtagtgtagcagacactgtggtgtcctggtctagcccctcacctgaccccttcagtgcacatctgcctgactaccactgcctgccctgcatccctttcctgaggtctctctctggccctagagccactctgcccttccaaatagcaggccagaaatgctggagaattagctcttcctgggagcagccctgaaccagtgactgatgggagtggggtataaataccccagctccctggtccattaggcaggatagctttgaggtgcatgctctacccagtctcccagatgcccccagcagtactgagctccagttgccactcagggaccacttgataatacacctttcatgggcctccttcctatccttgtctcacttcccactgcccagctggtgttttctggaatctcctgccctcatacccttgtctcaggctctgctgctggaaggacccaaaagatgggagtcagcgagagctgtgttgtgtggccttgaatgcactaactgatacaaaactacatataaaactacatataaagcatggggagagtagacacaaaattcagcacagtggttacctctctggggtgcggggggaggggctggcaggggcagtcttggggttggtctattttctcagctgggaggtgggttcagggatatgtatttcatgattctttatgcctttcatgtacattttatattcctctttggaatgcatgacatagactccataataaattattgtaaaattatctggggaccagataaaacctatttgctggccgcatctagtccctaggccacctgtttctgacacctcccttacagataacaaaacttggactctgagggctttcagccacgatatattgcttcgttttacatttttacaaattgggaaatttcacatcaaaatagaaatgttcaactcccttgaaagacaatcagaagatcagacagggctggacccacgtttctacaggataacagctgccaaagctgcgttgctggggatttgctaggtggggcggagtgccttctgctccaaccccagagcagcatccgtccttcctgtgacctttctgtcctcccctatagacgtctgagccgagctcacaaatgggagaacctctccaatggttcacccatgcaatgccctcggtggagagcccagcacaggcccagtgctaaataaggccactccttgtcattgtggttagagaagataactccaacactcgagggggcagccgggcttagtgtccttgtcctgagcctgctgaggtgctgtgatgaggccaaggtcaccgtctggacagcagtgccatcaggactccacccagtccctggggcgtatctgcaggtacattgggcctcaactccagggagcaggggccaggccgagctccccaaggccttgggtgccccagcccaggccagctgctctgacagagcccacactttgtagccagaggcgaggcaggggcagtgggggagacctgccagacaggtggcatctcaggcctccgggatgagtgggacaaagggatgcgcttgagttccgcctcccagagcagctcctcccctggccggggaacggaggtggacttcggggcctgagaatccttgccagcggatggaggctttgtttgcctcgctgagtccccagaccaggggccggccggagagagggctctttcctgagaggctggactttcccacaggaacaaagtggggcttgttagccgggcatgaatcttggcgtgaagcggcccaggccaggctcggcgctgccaggcggcggctccgcgatatcaggcaaattccgccttccccacagctggggctgacagcaggaagccccagggaggctccggacaaaagcagaaaaatgggccacgtttattcattcactgaccagcccgggcctggctggcccgggggccctgtctccatggctacgggcggccttcagctctcctggttggctcctctgtgaccacagcccctccactgccacacaccccaacacatagagacacagcatcatgaaggcagaggctgcctcgggacggctctgccccagggagcgtggggccatctgagccaaacagaatagagggcttggacacagccccggatgtgagttgagctctgaatgtcaagaccagtcctgggtgagtgaggggaaggcaacaggttcaaatccacacatcagctaagcacctactgtgtgcggggcagg

SEQ ID NO: 29000 - DNA, 2300 bp, Homo sapien
cacctgtaatcccagctactcgggaggctgaggctggagaatcgcttgaacctgggaggtggaggttgcagtgagccaagattgtgccattgcacctccagcctgggtgacagagtgagactccatcttttaaaaaataataataaacaacaataatagctactgttcacagagctcctactgaggcttttaacccacacacccaccctgtgaggtcagaactcatgtgaagcccacttaacaggtgagaagcatgaggcaaagaggtaacagagcacctaaggggcagagcttgaatgcaaagccacatccatctgaattcagtatagtctcaccctgaacaccgcaggatctttgcttttaaacataacctaggcagcacatggggacagaggtttgggaggcacccacatttagttcagtggttcaagatatgagaaaggctgaatttaaggagagagaaaggagaaccagagaagcagggagagaaatggtagctgcgccaggcaatgccaagaaaaccacaccagtgggaattttaagaagcaaaggagggagcaatggtgcagaaagttacctagaggccaggcaggatagggatggaaaaggaaccgtagaatttgccaaattgagagggcgtccgggacttcacagcattttcagaggagtggtgggggtgggtgccagattgctgtgggccaaggaacgtgtgggaggtaaagacagggctggcagcctgtcaacttactctttcaagaaatatgatagtggggggaggggaaacgggaagatggtggaaggaagggctttctggggagatggaggttgggagcgacttgagcagttgtgagccagaatgaaaggagaagcggaaggcaggagtttgaaggcttcaaagcaaggagcctgtccctaagagagctccagagggagctccgagggacagatggagagtagggttggtgggggctcaatgtggctggacttttccaggcctgtgcaatggaagaggtggaagtgttcatctctgtggcccccagcagcttaatagtctttccttcttccccttttcctcttcctaccttcctcccttcctctctagccacaaacatttattgagcacatactatgcaccaagtcttgtgctaggttatgttgctattataatgaacaggacagtgtatatcatccttacaactaagtgaggagacaaatattatacaagaagatggacaaatgtgtgtaggtctacatattgtataatactaacaatgggtaatgttcattgggcactttcaaggtatcaagacctttataagcatttcttaataaccttttacctaaaaatccatcccctacattaaaacttacaagatactactgatattaccttttgcagatcaggaaactgaggcacagagggatcagatgactggccaaaatcacacaacttagattcacctgtttccagacgcaagcacttaactgccacacggtcctgactatgttgagagctgcggacaccagtatgaacaagacctgcagagtgtctagggctgggaagaagccacgaattcatttactgccttttcctcaaggtgtggtccctggaccagacatatcagcgtccctggggaggtagtcagacacgcaggctcttcagcctactgcgacctactagaccgtgatgtgtagtttaaacaagacccgcaggtgtctggtgtgtagttcaagttggagaagtctggtctagagcccattcctcttattagaaacaggaaaccgaggcccaagcatttgaaggttatggacggtggtagaactttggggtttggtgagtggagccggcctaggccggaatgggcgcttccactcttggcccagcaggccagtgggcagggccgcgggaaggacgggcgctgcaggggctccgcgcgctcaaggtgctcgcgggctcccgggcccagccgggctgaggtggcgtgggcgccctgcgggccgggcctccgcggcgcgtcccagtcccagtctccgcgctggtctggcccggtccctcagctccaccccctgcctccccctcccgcccgctcgcgcctcctgaaaagccagctcgcccggggcggcggcgcagagccgggccggcgcacgaggcagccagcgcggccatgacggcggagaaggcgctgcccctgggcaatgggaaggctgctgaggaggcgcgggagtccgaggcgccgggtggcggctgcagcagcgggggcgcggcgcccgcgcgccacccgcgcgtcaagcgcgacaag

SEQ ID NO: 29001 - DNA, 2300 bp, Homo sapien
gggacctgatatacatcaagactcactccactctctgtctctcagttctgctctcctctatgttggcttcattttaggtcgggtctgctcaagttctgcaaagatggctgccaacacctctatgcttaggagctttggtggagattgagtttctgtttgacaatagttttagcaaaagtcccagacagagttctcattggcccagcatatgtcacacgtcccctcattgaggtcagagtgatgtgctctgattatctgtgccctgggtcacatgtctgtctccaggaggagggagccccacccaaccatattgaatatgagtgaaggaggggaagtttcccaaatgaaaattgaggttctgtcacccaaagaagttgaaatgaatgtcaggcaagcaaaagtagccttcatttttgctacccttgtatctccactcaaagctatgccccacatctccatccagacagctcctactcatccttcagacctcagttcaaatggcgcttccttgaggaaaccttcccaaaccatcccacactagactggaatcccctgctggactagaatcccctgcatgtgtgctcctggcagagcttgtcattctgggtttgtgcggttatttgatgaaagcctgtctcccatactggactggcatcaccttgaaagctgtggcctgtcttgtccatcgctctgtccctggagcctaggacagtgcctggcacacaggtggaactcgggaaatatttatttgaaataccaacggaagtccacagcacatatgacctggtgatcagtggtgggaggtgaatgggtcaagaaagacaccaagattccctgctcatgagtgagagtgtggggaaacagaagaagtcagggtgaccttggtgagcactgccctgggggactcgaggatggatgaaagcagggaggaggccagattaggtggggtagaggacctgaggtccatcagcaaaggccatccctggggacaaagagaggaggggaagagtaggtctgggctggagagaaggaatcttttctctgagttcctggggaccccagagggaagggcagatgtggccccattcccagaagcctttataaaagagggtggggaggtcaggccttggcaaggacaagggaaggagtccctacgtgctggattgggattggctggaaaggggacttctctgggagaatccctcaaacctcaagaactgagagaagggtgtctggggctcctgccaccatccctgtttcccttttaagtaatctgtttccccatctgtccatccatacacacagccacttgtgtctccatgaccaaccgctggcagtggaagggtgtccttcccacccccactcttacacacactcccagctggtacccagagcctggtcaccccaggccaggcctgtgtttccaggtgtaacgggcagcagacgctgccctaggactagagcagggagggggcacgggcccaccccaacccacagcgacccacagagggcgaaaagaggacgaccgcagagagaaacggaaaggacaggccaacggaagcagtactgcaaggctggaaggagaaaagccaggaggggagtgcttgctgtgaaagacagggagacagagaccaagacggacaggcagacaggctggtgacccaggatgaggccggaaagagccatcaaaggaaggagaaggaaggagagagattggagcgggacggcggggcaggcgagggaaggagggggtggggagagggagggaggaagagaggggagaaagagggaggaagagaggggagaaggagggagaagagagcgggagaatgcgagaggaaagaagggagaggggaggcgtagaaggggagaggaggtgaagggaaaaggagagagcctgctggcggcgaagctgcaagaggcagctgcggagggagcgcgcggcgggcctgggggagcgctgggcgggggcgggcggtgcgggcagggctatacccgagctgggcgggctccgggcgccgcgggccctgccctccccctccatccctccggactcgctcccccctcctctcccttccccgcgaccctccgcccgccctcggaagaccgagacagcggagaggttgcgggtgagctgcgctgagcccaggagccgaggagtcgggagcgcagtagcgctgagcccgagcccgagcggccccgcgtcccgagcgcatcggagcggccgagccgcccggatgcagcgcctgtcccgggcagcgcagccccggccgcaggtaggaaagggcggccggcgtcgg

SEQ ID NO: 29002 - DNA, 2300 bp, Homo sapien
gcacctaaaaatagttaaatggtaaatcctatgttacatatcttttacctccattttttaaataactatatgtgagtgaatcagctaagaagaaatgaataaatgcataagtgaattgatgaatgcataatgaagataataataccatttatggaatacttagtatgtgctagtcattgtgcaaagtgtgtttcaactgagaagtgtttttatgaagccccaaccctggcaggccctgcttgcggcttttgggatacagcagtgagctaagttgctaccacgctacagctgacattttgtgggcgagatagtaaacaagggatattaaaatatcagacggtggtacgtgctataaaagaaaaaaaaggcaaagcgaaaggatggagaatggcttggaggaaggtgggagagctccttctgatgggcgtcatttcagtttcacagatgaggcatgggaggctcgagtgctccccaagggtcacacatctaggaagtggtccaggcaggaactgaagccaggtctgtcagagcccagccctggagctcctaaccacgccgtgaccacaccagggaacggtgttgtctcttggctcacaccctgaggcacgcacttcaaccctctgagggcctcaaagctgagtcccagggtaggagcggggtcttcctttcccacaggccgccggcttctggaggcgcagatggatcgtgtgtccagcaggtggcgccgcggcccgactcgggcgccccagcagaaccagcctgccagttgagtctgtgccaggctggagagcggggcgcgggcagtaggtacctgaagcgaggctcggccggaggcttcgggcagagatgtgctgctgtcagtcgggcaggccagctttagcggctcagccctgcaggtcacttccagttatgggacttccgcccactgtgagcttccccctctgaatgcaaccgggttgtccaccccttcctccaggctgcgggaaaacggcatgagcccacaccttcatccctttgagaggtgacagcgtgctggcagcccttgcttgctctcggagcctcctcggcctcgttgcccactctggctgtgcttgaggagcccttcagcccgccgctgcactgtgagagcccctttctgggctggccgaggccggagccggctccctcagcttgcagggaggtgtggagagagcagcgcgggcgggaaccggggctgagcgcggcacttgtgggccagcgtgagttccaggtgggcgtgggctccgcgggccccacactcagagcggccggccggcctcgggcagtgaggggcttagcacccgggccagcagctgcggagggtgcgccgggtcccccagcagtgcccgcccactggcgctgtactcgatttctcgctgggccttaggtgcctccccacggggcagggctcgggacctgcagcccaccatgcctgagcctcccccaacgccatcggcttctgtgcagcccgagcctctctgacgagcgccgccccctgctccacggcacccagtcccatccaccgcccaagggctgaggagtgcgggcgcaaggctcgggactggcaggcagctccacctgcagcccctgtgcgggatctactggatgaagccagctgggctcttaagtctagtggggacttggagaacctttatgtctagctaaggtattgtaaatacaccaatcagcactctgtatctagctcaggggttgtaaatgcaccaatcagcaccctgtgtctagctcaaggtttgtaaatgcaccaatcagtgctctgtctagctgatctggtggggacttggagaacctttatgtctagctaagggattgtgaatacaccaataggcactctgtatctagctaatctagtggggacttggagaacttttgtgtctagctcagggattgtaaacgcaccaatcagcaccctgtcaaaacagaccaatcagctctctgtaaaacagaccaatcggctctctgtaaaatggaccaatcagcaggatgtgggtggggccagataagagaataaaagcaggctgcccaagccaccagtggtaacctgctcgggtccccttccagtctgtggggtatttcctcttttgctgtttgcagtaaatcttgctgctgttcattgtttgggtccacactgcctttatgagctgtaacattcactgtgaaggtctgcagcttagctcctgaagccactgagaccacgaacccaccagaaggaagaaactctgaacacatccgaacatcagaaagaacaaactctggacacaccg

SEQ ID NO: 29003 - DNA, 2300 bp, Homo sapien
tgagtcctgagggaggaaagggtagaagatagacctaacacatagtttctaagaaactgatcttttgtttcgaatgtgggaagatcagtagtagaatgtagataaggcaatctaaaaagcatctcataagggggtagacctatgttttttcagggagcagttcggactctcaacagggcaataggcctttcgactctccctgatgagggtggatgcacggcatgtggtactcccattttctttaggttgtttgttggtttttctgcgcactctgaaacgatctgcaacttgtctagcaagggtataaattcctacgcatccataaactctgaggactgcatcacacatagcttgggggccccagtgagttccttgatgtagctgtgacaatacctctcgcatgaagggcttagacagcatttccttcttgtctggttgtacccatcttccctcgtgactttctttggctcctatttcttttaacttttctttttctctgggggagaaaacagggactgtagctggagggggaagataaggggttaggtggaaaatgggtgctgcttgagaagaggcaacatgtttagccacttggtcagctagattattccctcagctctcaaaggaaagattcttctagtgacctggaacatgaacaactgctgtctcttctggcggctgtaagttctctagtacttggattatcaagtctctatggactaagttttggcctttactgttaataaggcctcgctctgcccaaattttcccaaaggtgtggactactccaaaggcatacgtggagtcagtataaatagttccttcctggttttgcagaaattttaaggcttgatttagtgtaaacaactcacatgtttgctcagaccagtcattaggtagggtgtctccgtctactgctgagtacctgttatgccttttcccttttattacttgagaagaaccatctacaaaaaggtgtcttccggtttgaaagggagtttatctaaacatctatgcccaagttcttctggtctggggcatgggtttttttctgcgtttgaatttcctgttaagaaggcagcagggttaagtgaatcatctgtagttcggattaaatcatctttttctaacaagatagccttgtattttaaaattcttgagtcagtaagcaacctttctgccttctgatttaggatagttctgttctggtgaggtgtgctcacaatggggtttcctccaaaagttatttttctactttcttctgttagcaaagtagttgccgctacagattgaatgcatttggaccatccatgggttactgggttaagaatttttgacaggaagcctacgggttgggagtggcctccgtgcttttgggtaagtactcccaaggctacgcccttgtttacattgacgaaaagatggaatggctgcttagggagggtaaagctaggacaggggcagttactaatagatgttttaacctttctaccttttggatttctggtaattgccaaatgatggggtctggctcgtcttgtgtgagctttttgtatgagagttctgtttctagggcataagagtctatccatagacggcagtatctgactaatcctccttcaatccattcaagcccaattttccatttgcctttgtaattaaatgccctaaatattttacttcaggttctacaaattggagtttgtttttcgaggccgttaacccttcatcccacagaaaatttaagacatgggttgagaaagctgctacttcttttctatcatctcctgaaattagaagatcatccatgtactggaggggacatatgcacgagggcagggaaaatttctctaggacttgttctaatatttgactaagtaaatatggagactccgtaaacccccggggtaagactgtccatcagtattgctgttttcaaccggagtgagggtctttccactcaaaggcaagtaggtcctggctgccctctgctaatggacaagcccagaaggcatcatttaaatctattactgtactatctgattaatagctctaaggtcttgcactaaccagtatgacctgtctggcttctttaaaggcagtattggagtgttacagggagacatacaggatttaagaagcccatcatggagaagaccttcaattacaggttttaaatttaccctggcttctaaaggaatagggtattgctttctctttactacttccccaggggttttaaatttaacatgaatcagagaaatctgtaactttccttgatcccatcttttgaccatacc

SEQ ID NO: 29004 - DNA, 2300 bp, Homo sapien
gtttactgtggcaaggtcaaacacagtccttctgaattcccattctttgcctcataaatgattacagagctgcttgtctccattgaccagttggaaaaaatgcttattaaccaaacttgggttaagcttctttcctttccccaggctccttactttaacctactctcagcttgaactagcatactgtctcatgtgtccgtgtgaagagactaccaaacaggctttgtgtgagcaacaaggctgtttatttcacctgggtgcaggtgggctgagtccaaaaagagagtcagcaaagggtggtgggattatcattggttcttataggttttgggataggcggtggagttaaaagcaatgttttgggggtagggggtggatctcacaaagtacattctcaagggtggtgagaattacaaagaaacttcttaagggtgggggagactataaaagaaccttcttaagggtgggggagattacaaagtacattgatcagttagggtggggcagaaacaaatcacaatggtggaatgtcatcagttaaggctattttcacttctgcggatcttcagttgctgcaagccatctggatgtatacgtgcaggtcactggggatatgatggcttagcttgggctcagagactgacacacacaacccctactgagaataggttggcctcaagataaaacattctctaatctactatctgatcaagccaccccttcatcccacttcccatattcggttgtttccagccttgtttacctgcctttggggagggtggggggtgggggaaccctctttttccctaaccattgaaacatctgcggatgttttggtcagagtgatctcactattgcaatagtctccctctgctattgcacggttccttctctcccacctctctcacttcttgcagtaatcctttctttttttttttttttgagacggagtctcgctctgtcgcccaggctggagtgcagtggtgggatctcggctcactgcaagctccgcctcccgggttcacgccattctcctgcctcagcctcccaagtagctgggactacaggcgcccgccaccacgcccggctaatttttttgtatttttagtagagacggggtttcaccgttttagccgggatggtctcgatctcctgacctcgtgatccgcccgcctcggcctcccaaagtgctgtgattacaggcgtgagccaccgcgccgggcctgcagtaatcctttctaataagtatccttattagtctggatttgttttcttatttgccagaatcaaacaaacttcagattacgttcctggcccaaaagccctttaactttcagcaagccacctaacttttcttagattctgttctttcatatataacttggggatatgtttcaggactcttgtgaggattagagatgtaaaaccctgaaaacatggtggctagttaattaatagcagtcatcgctcttgttgttatgagtctagagtggtatatcagagttaatttgtgaaaggccttacaggccagacagagaaacttgtcataatcactgctgtatcttcaacacctgtccagtgctttgcacgcgcagagtatctaaccaagtattgagagggaataactttatctcactgacagtgaggagctgtgagaatgatggctggtttagaaaaggcaggttggtcactgtcgacgttcactggccttttcctactaaaattctcatctcctggctctccacacctgccaccctgatggcccctgtgctgcgtttgatgccgcctctcctggagaatgaccatggtgatcattcctgtcatcctctgaaatcaaaagagagaacgtgggcactttcttaaaagcctgaagggaatgtagacattccgacatctggtaagggagacgctctccatcgcttcccccgggggcgtcaccgccccctgatgccccgccctcctcacgactcaagttcctcccacttagctcggtgctaggggcgcatttccccggcatgcctctgctcctttgcgcacgcgcgccgcttcccagtggcaagcgcgggcaggaccgcgttgcgtcatcggggcgcgcgcctcagagagagctgtggttgccggaagttgagcggcggtaagtgagccgcggcgggcgagggtgtagtggggtcttgctgggccggttttggaggcctggagtcaaggggcgagctcgccagggagggcgagggtcacagcaagtctcaggatcctcctctgccagtttctgggtggtccttcctcctccagggactcactga

SEQ ID NO: 29005 - DNA, 2300 bp, Homo sapien
tgcacacacagatgaggatgttcaatctgaatgagaaaggaactggagattccagcagcaccctaggtctaggagtgaaaagctcccagagtcttagcactgtgcccttctgccgcaagctggactgagtcgattctgcggcagcaggcagatgcccgttctgcaaaggcatctatatttaggtagggacaccagcttgccaaggtaaagaagggcatgatgggcgtcgcctcagaatgctgttggtcttggaacagaggccctcagcatctgtcctcacatcttctgctcacaggcaggtcctgtgttgccctgtgggttagacatgctcatggaggagaggacacctccccagagccaaggcggtctggaacgcatcagggttcttcctgaatgtgcgtccttcatgccgggtggctacgtgccgccaggcagggactgcatactgcggtttcgtagtcgctgtgctaaggggagctgccacacgccgtctgttagcaggacatggagttgggccccaaatggccctagtggtgtcaaaagcagatgtcttcaacccacagtgggacgctgctccctcccagcgcagcctggtaggcctcttgaccacctggggggagtcactgtctgcctcgaggcacctggccactttgggactgcacagcaccccttctaccctagggaggagtagctcagctcagctcttcttccccaggctcagcccaatgcgcttcaggcccacgtaggcgcagccctgctgcggaggcgcctctgcctttccctttgtgacttcctggcagaagcctccactccagctgcaattcagtgctcatcttgcacattctcatcccaaggtctttgctcccttaatggccccagctgtatggtcctatccctgcccttgcgggtcacctcctcaggaaatctgtaaaggcccagcggattcttcctaagatgtgttgcttgggggccccccttgaggctgacatttctgctggaatatttcatccttcggggcctggacccgggccatgccctgctgagccttagctgagtgcccagccctttgccccctctagctcaggccagtctttgcaccccttcatcagacaccctgcctggtgtcatctgaggtgtcctttacctgcctggctggactgaaggctctcagagggaaaggccatctcgtgttactcatctctgtctcccagtggcacccagcatggtgcccaagtccctgtggaggaaccctggcttttgtgattctcaaagtcttctgcgtcggccctccctgagcaggtttgtatggcaatcacaggggccaggcaggtctcagagcaggctctctttgatggattagggggaggtggtgacagtgggacagtagccctgcctggggactctcaggccagtgaaccgaggggacagctacaagccctacaggaggactcagctcttcagcagtggacttgactgatgattgacagatgaggcacacagggtccctctgaggagggctcggccctctctcttttcaaccaggctccttggtaaagaagcgggggcgtgcgctggggggagaaccttgtgttctcagtcttaggagagctgttctcaattcccgccttcccaagagccctctggggcatttcagaactcccgtggacctgccagcttcgcacccttgcttgaatggtgaagcatatcagtcctttttaaagagtgtctgcagatcccctaaaacaggagccccaaagcttatgctccttagcagagaaaagatgattccatgtgggatgacgcagcgttgcctgccaaaccagccatcaggccatccagtgcagctgtgggcccaggagccccccaactgctggggcctccatctccatgggttctaaaggaaaggggcctcataactggctagttggggcaaggagaccaccctcccagcccagccaggctgttttctcagggctggtctgtgagggggaggaattagaaaggactgcccccgggccaggggagtgggattggaggagaaccgagaggttttcagtagattgagaggctcattaggggtgaactaggtagccaaagaaacatctttaagaactgcagttactgaatacagcccctcatcagcgctgaggttggtccacttaacctttggtccacttaaccttgctatcaatgtgggctcagggaatgtgcctgccaggacaggaagacagccttgggctaccggctccacctggccagcgccctgttcccacagcaggaccagctccttcctaactgct

SEQ ID NO: 29006 - DNA, 2300 bp, Homo sapien
tggtcagggtgggcccttggcgggcttagtgtgttcttggatgatttatttccttgactcttcagggctcttgagaatcttgcagttggttttcggtcacagttgctttgcaaaaactgaactgctgaacagagtggcctgactctctttaccctgtctccctctccccagcctggaatgggcctggctgcccacggcacacgtggcaagggcccctccttgtgccttggggctcctgagcagctttcctaggaggaagaacctcgaccccccagctatatctttatgggatcctggcctggactgaggacaaagccaggggccacggggtaccccaagctgcccattttcctgggaagggcacagtggccctgaccggagctgtcattttcggctggggttggtcagtcctgccctccttgccgtggctgctgtcagcacatgtcattcatgtcgtaaccattcgtggggctccttcctgcggcagcgtggcggggctgaggccatgcacaccaatccgagctgggctcgggcgccctgctgaggacaccaagcagccacgttgcctgtgctccagcagctccgaggtctcttcctggaagtctgttgggtgtcatcctgcagctcagagccagggaaatggcagtggggagggggcttcctggggtgacagcaaagctctgtgtccacaggcaggcaggacgcatgctgcagccctgtggggtgggcacggtggaagccttcctctgtgtggcagaaaatgtgtctcagatctctgggaactgggacaggaaagttcccagaggggcatgtatggggaggctacagaaagtgtccccccatttcatgtttgtgatagcagctcaggacagacaaacaccaagagggtggccttgggcagcagccagtgaggagaggcaagatggggttaagcttcgcacattgagggctgggcacagtggctcacacctgtaatcccagccctttggggggttgaggcggcggatcacttgaggccaggatttcgagaccagcctggccaacatggtgaaaccctgtttttactaaaagtacaaaaattagccaggcgtggtggtgggtgcctgtaatcccagctactcgggaggctgacaggagaatcgcttgaacccggaaggcggagcttgcaatgagccaagatcgcgtcactgcactccagcctggacgacagagtgagactttgtctttaaaaaaaaaaaaaaaaaaaaaaaaagtttggcgcagccagccttgggggttgctttcagataggagaggtggtgggagccctctcccccggggcagcctctgtctgaggacagtcacaggtgggtgggacagcgggtgaaggggttagtgacagggctcatactggccctgccacaaatccgcagcgtaacttccaacagggtgtttctggccttcattttccccatctggaaaataagggtgtgggggaggggagcctcgggatcccataaacgctcaccatctggaggcctggggcccgttctaggtggacgagtcccagcctgcactcaaccacagaggcaggggcaagatgcctgactccagctggggaggaggggtggtggagccagtcccacgagggctcacgggccaccctgcagcctgggttgtggggaggaggagaggatgcccagacactgaacatcttcacatctgcaggtgaccggttaaggcaattcgccccagctcaggtcaggagatgccctgaaggtggtctgataccagtcagccagcctgccctgctggtcccttgttagagagtctcttctgaagtggcctttcctgccttggatagactgacataaaggctggacagtgagctcatttcttcatcttccttgattccccctccctgtgctcgaaatgtctccccagttccccacatttgcgtgggtcaggacacgctcgctgcaaagaacaagccggctgagcacaaaagggagttttattgggaggaccctgggggggggtctcctagagcccaaggtcatgggtgcagccaggctcaggaagggcctggccatctctgagagctggacaggggcagggccctccttcctcctggctctgtgcgtgtccaggtctcggtattctgctctcttgctgctgcttgacccctgtggtcagccagtgtgagatctgctccaggcctcatctgtcggtccccaaccccctttccgagcctgtctgctcagcattgtgaagtctctcacccgaggccctgtccacaggcagaacgtggacattcagcc

SEQ ID NO: 29007 - DNA, 2300 bp, Homo sapien
aaggtggagaagatgaaggctttgcctagacatgctgcccaccacagacaccggccctgtggcatcagccgctcagggtcgtcacaccaggcccaccaagagactctccatcacctcgcagctccatcccaagctgccaggaggcctttccgacccaccagcaccatttccacccaccttcctgccccaactgcagagacacaggaaaggagcagtgcggagatgccggccaccaaggtctgtccccggacagtcctgccacgctggctttctcagtcagtaagcttctgaagcacagctcccaggggaccccggtccctggctggaccgtgcactcccgggaaggctgacactgcagcccccacgccctaatctccttggctccgcacgggtgaccacataccagatgttctaataactgtccatagagtaaataaatcattaaggtacacatagtatgtgtgagtccagttaacagcgtttgtggcaaatgacaagggagttaaggagatttcagagaaaatgactggtggcaaagacttttttctgaaaaagcaaaatttaaggaacatttaaatgttgggcataaacagtggtgagatgtcttctcccttttagtcccttcctccaacttctgttgtcctcctcacctcctccctgcttctaaatgtccccgagctcatccaaagcaccccacaacacacacacaggagtgaactcatcaccgtggcttctctccccttgtgagtgggagaattcactgcttcccagtgagcaacaaggtgcctgggtgtgtccccaagacatcctggtcaagctgcgtcactcctctgtgccaattttagacgggaagtgagggaagtggttgcaaaggaaggcctgggtgaagacgatgtttgccgaggtggcggaggctgaggcagagacaccctcctaagtacaaatggcaagaagtgtgtcgtgggcaggaaaaagctggcaaaataccggcattcggactgtcccaaagacagagatgaccctgaggctcctggcttcaatagcggggtccatcctcgctggcagggacacagggcagagactgtctctgccttctatgcgtcagcaactactgccatagcttaacattgcttaataattgaaaaaaagccaccaaaaagtcaagggaatgaaacccgagtgcgaatgccgccacagccagcatcactgccacaaccatccacccacgtaatgtttcccccattaactctccataaaggggccaggtgcagtgactcacgcctgtaatcccagcactttgggaggccaacgtaggtggactgcttaggcccaggagttcgagaccagcctgggcaacatggcaaaaccccgtctctacaaaaaatacaaaaattagctgggcatggtagcgcctgtaatcccagctactcaggaggatggctggagcccagtaagttaaggctacagtgagccatgacagagccactgcactccagcctgggcaacagggtaagaccctgtctcaggaaataaaaataaaatactccccacaaaggtagtgtccctctttttgctggttcagatttcagaaatcaactccatggacccggcaacacaggactcatttgctccatctattgcgagacagctgtggcttgcggtcccagcgtgagaagcctattggccgggcacagtggctcacacctgtaatctcatcactttgggaggccgaggccggcagatggctttagcctaggaattcaagaccagcctgggaaacatggcaaaaccctgtctctactaaaaatacaaaaattatctgggcgtggtgtcacgtacctgcagccccagctactctggaggctgaggtgggaggatcacctgagcccaggagatggaggttgcagtgagctgagatctgcaccactgtattccagcctgagtgacagagtgagaccctgtctcaaaaaaaaagttggggaatctctgagtaagtgattgacgttgagtatctttattatcatcagctctcatttattgaaggacatgcccaatcatatgctagacctcatcttagtaaattcactgccccactgcaaaataagcatcatctccattttacaaataagtaaactgagcttgagagaggctaagtaacttttctaagtttacaaaactagtacaacgattccaatatatattggactggctccaaagcctttccattttccgggagggaggaaaatacaaagactcgtgtacctaccactcagaactagcaaatgaaaatgtgctctcat

SEQ ID NO: 29008 - DNA, 2300 bp, Homo sapien
acatctggctaatttttgtatttttagtagagacggggtttcaccatgttggccagcctggacttgaactcctgacctcgtgattcgcccaccttggcctcccaaagtgctgggattacaggtgtgagccaccacgcctgaccattttttttttgtatttttactagagatgggctttgccatgttggccaggctggccctgacttattttttatatcattttattgcagatatatgtaccactaaaattatttttaattttatttttaacattacaaatagagtattatgctgtatgtaatcttttgggacttaattttttcagttaacattgtcaagatgcatctgtattgttgaggtcactgtaagtcattttaatttaggttactgtataatattctatgtgtctgccacgttccacttccagtccccctagacctttacaacaacccccctttttcttacagtaacttgagtgtgtctctcctttgcacaactaaaagagccagactaaaacgaccaggcttagatgttgccagagctaagtcacgctaatgctgatgtaaggcaaagagtgagattaatccttgcaaaggtcgaagactggtcacatccatgagaaaaggtcttctgtccccatgatttatttgcagagtaaggttcgctccaagcagtgatggaaattaaagaggcagctttaggacctccgcactgacccaaaatggaaatcatttagcagcaaacaaatggcaatgttgtcataaagatcaaatgagataataatacgtgggaacactttgtaaaccttgggccatttttataaatatgcagttgcactattattgttatcattattcatttgcgttgtctgggcatttcattttcctctgttcataaggtgcccacctggactggatttaagtcagaagagaaggaagatgtgagtattcattaaacgtctctgcgaagcctgtaaccccacaccggctcttcgaagaagcattatctctgttttacggatgagaaaactgaggtttgataacttgccccaaatcctataacaaatagaggcggagtttggattcaaattctgtctgaatctaaaaccctttttctgtcttaccatatttcctggaatctgcccaggcagtcctcattccttcctcattccctgtctgagtttggcaggatgaatctcctatttacagtctttctcaggatttctcttttcctagtccgagactactgatggactaaaacggagtctatgtaagagtacctttgggaagactgggaaccttccgagctttaatctgtgaatatttatccaggaatcaggaaagccaggggacctattcctaggttgacttgtaagttgggttgtcccatctccagaggccctgtatggactggaggagagtacatttcacaaggggccccaagtttcgggcaacacctccacctgctttaggtaaaccatttaatctcactgaaacatggaactacgcatacctgtctttgcatatccaacaggggctaagatccagtgagacaccgtgctgttccttgatatgatcagatgaggcaacagatgggaaaacagtttgaaaactgcaaagcattttttttttccagcacgaatgtaagctggtatttgttttcattgttatcattccctttcagcagagccctctcccagggaaagcccttacggtaggggctcctaataatgactgaggtttgagaacagccagaaggcaagcaacatgaagccttttaaagcaaaccagaggaagtccagtctctatttattttatgaagttagccgctggatatgttaagcaaatgttttcttaattgtggcagtacaagaaaacaacagggcaagggttgctggggatggcggggggcgggtatcaggcctctatcccccggccccccaccaccaaatccccagagaaagacaggaaaaaattaaagacaggccttttcttttcgtggtcacatgtctgccctgctgctgtaatataagaacctgcgccaattagaaacgttttacctcctcctccctgcccctccccgggcacatttcagagcagtccgggttgtggacgccaggagtttgccaaacacagcaaacactggtgtgtgagcggctgaaggggactctttccactccgatctccctccctcccagcctgttttgatttactaggacttcctcctccgggcgaggcgggggaaggacgccgccgagcgcctggagttgtgcgcgtgtgcgtgtgcgcgtgtgcgagtgt

SEQ ID NO: 29009 - DNA, 2300 bp, Homo sapien
gtttttaaagaatgaggcactaaaatacaggctggaagttctttgtgatatatcaggcttgtcaactggtgggcttgactataggattatgaggcaaagacctagctattttgttttgttttgtttttttgagatggagtctttctttgttgcccaggctggagtgcagtggcgcaatctcggctcactgcaacctccgcctcccaagttcaagcgattcttgtgcctcagcctcccaaatagctggaactacaggcatgcaccatcacacccagctaatttttgtatttttagtagagatgaggtttcaccatattggccaagctagtcttgaactcctgacctcaagtaatctgcccgcttcagcctcccaaagtgctgggattactggtgtgagccactgcacctggccaaggacctagctgttttattggaggatctcaaatatcagtgtctgtagaatttctccagagatcttctattctctggctagaggacagggaagtataatgtgtctgtctaccaactttctagaaactgaacaagggaaaagggctaggaattttctctaactataaaaataaaggtatccagaatcctccctatggcctataaaagcctgcatgatctagtttcgcatcagtttcttttcccaggaaacttacaagaataagactgggggactgagctacagctcccagtgctgtatctggccttgaggctgcaactgagactcatcttctcccatctctgctactcctccagattcccttcaccctcatctatcacttctgcttatctagacagggtggcccagaccctcatctcggaggagtctggaggaccctggctaccgcacttgtccactaaccatcaaaattgggcaaggggtactctaagagacgtgtatcagcaccccagctcctgatgaccagggccgattgcttctgccagtgtagtgactcattgccttgtctgctggacttacggcatgggattctaaattaattgggtggcagtcgtaacttaaagttaatgggatgcttactatgtcctctggtagaagcatcccttctctgggaactgggacctctagacccacagatctagagctgtagtgataggaagcaaagtgttcccaagtgggtccctgggaatgacgataagcaaggtcacttctctttctacccttggtccccaggcccatgtcttctgccagttgggaatatagtacagcgtaatggtgattgattcaggatgtgtagcacaactcatcctcgcaggacagtgtcttcaggctgtgccactgctctgagttgacacataaaattatctgccttacccttgcatcttttaggtctacaggtggtgctcatctctgccattcgtcctgggatatggttttattttttctttactcttttggccagggggagagaatggcagcttcatgcctttaatcccagcactttgggaggctgaggtgggtggatcagttgaggccaggagttcaaaactagcctggccaacatggtgaaaccccatctctactaaaaatacaaaaattagccaggcatggtggtgtgcgcctgtaatcccagctactcgggaggctgaggcatgagaatcacttgagcctaggagatggaggttgcagcgagctgagatcgcgccactgcactccagcctgggcaacagagcgagactctgtctcaaaaataataataacaaaatattagctttattgatgaatacctcatacaccataaaagctagtgtttatagtatagtcacagagctgcacagccatcaccacaatgtaattttagaatatttctgtcactccataccctttagccgtccccagctctcccctcacccaggcaaccactaatccacttctgtctctgtaatttttctgttctggacagttcatatgcatggaatcatataaagttttttccatatctgcttttttcttaagttgacatataataattgtatccatgtccgcttttaaaatgcaatttgactttcacagtttagctgaatgctttcactttcgttattttaatgagagttagtgtaaggaaaatgagaatttaccaaatttttaaatcatgtcacctggtattttatctttacactcatgctttcaagtgaaaattccagtgcattattttcctcaagagaaagcagtggcagataagtactttctaatttttttatatgtcactcaagccgttggaagcttcataggtaaagcataacttaaatataagtttattctaactaatccc

SEQ ID NO: 29010 - DNA, 2300 bp, Homo sapien
cctgagtgcctgctttcttcccatttccttctctcaccctgcaagccgctgtagaggacacttaaacatggtggtaaagaccttggcctttagaggtaggtagccctaggttcaaaccccgacttcaccactttcctgtgtgactttggaacatttactgctcctcttaggacctctgtttcctcgtatgaaaaatatcatcatcttagagaacctgcctcataggatctctggagtgatgaaaagaaacaagtataaaaagcctgggtgcagtggctcacgcctgtaattccagcactttgggaggctgaggtgggcaaatcactagaggtcaggatttcgagaccagcctggccaacacagtgaaaccccatctctactaaaaatacaacaattagccaggcatgcttgcttgaacccaggaggcagaggtcacagtgagctgagatcgtgccactgcactccagcctgggcaacagagcaagactcggtctcaaaaaaaaaacaaaaacagaaaagccccaaagaagtctaaaaagtgcctgggcatactaagtgcttaataatgacacctattattagtattattgtcaccgagtcctttcaattctttcttggttgaattttcccatctatcttctacctgataaactcctacccagcttccaggcctggctcaaaatgccatcattgtgaaacctcttctggtccctttccccaacacccagaactgactgacgttcccattggagggacattacattccggcactgtgctgggtacctggctgcattacccaaattctactctgatttgcagttctgtctcctctcctctacagacccctagctcctgcagggcagcaggcagctcagatctcttcatctcagtgcaggcccagagtgtgagtgcaagtaatcatttttccaattgatttaatcccatccctgctcctaagaccttggcctagccgtttccagttcatgggggaactatgataacaactgtctaatcagtcccccacaattcaggctaacatgtgaattacataagtccttgctcaaaacccttcaaggacagagcagaatttccgaaaaaatcccagagttggagccagacctgggtttagctctagttttgccacaggctgatgtgatcctatcacctggctttacctctctaagccttagcttggccatcagtaaaaccaaggccctcctgccacagggcactagagggtgctcagtgagaagtgcatgtgaaaatgtgtcaacattacctgaatgttagctattactatttctattatttttgagaggtagtgtattttggggaggaaggagagggtagttgaaaaagtttctgtcctggaagtcaaaccacctcctgaatggtaatcttcagcaagtttctccagttatacaaagaggagagctgtaagatttttctactcctagggtcctgtttcctccagaaactgcatttgaagcaccctttgtgagaccattccacaaggcaagggggcaaaaactgtgatccacccttgaaattaaatgcaagtatcagagaacgtctgtgcactcccatatccacccttgtatttgaaaagggctttagcgtgaagaagtctccgtcaaatcttgacggtggtattctctacatggcgggattgggcatcattttaattttgtgtttttccaaatcttcgaaatctgcaattttggaactagagcgatgatgggggcacaatattgtgaaggcactacatgctactacactgtccatttcagaacggctagttccatattatgtgagtgtcgcctcacttaaaaaccttcaatacgctcccgattttatagtcattctttaaaccgtagtttgaagagagaagtacagaggctatcaaggctcagggcccgcggagtcgggtgacgctcgcctccgccgatttgtccaagtcgcaacctagccgccagcctgtagggcactcctccgaccacgaggggacaatgcaaagcctcgcgttccccacactaaggcgagcaccgcctcttgcgtcttggaagcgcctgtgcgtgcgtggggcgtagcaagggacggaagctctgcctgtgcgaccgccgcccacccgagcctatctgggctgcgtcttctcgccgctgctcttcgtggcccaacgccccaatccttgcgtgtgcttgcagtcccaccccacactcagccttgtgtccctcgatccagtctccgacttccatttcccaccctaaaccgcctacccggtgtctgttccccgcccggtt

SEQ ID NO: 29011 - DNA, 2300 bp, Homo sapien
ataaacacaaaaaccgagttgggtaagattacagttcaattctcaaacaactgagtccttattacatgccaggtcctgtgtttggtgtgaagcccaaagataactaagacataatcctgtcctagaaaagcttacattctagtcaccagaatattgtatgatagtttctttggggtctatgacaaagccaagcacaggatatggaacacttagcccgccctggaggattgacgaaaggcttcctggaggaaccatcaacttacataccttctgcatgccttctctggctgcctgcctgcctgccttcttcacttttctactggtaaacatagctgcctcaagatccacctcaaatgtcacctcctctgagaggccttcctaagtctcagaggcagaatgagtccctccctccttaggcctcctaaccctctttgcccaactgtatgatagcatttctcacatcttatgtggttcctgtgtctatcctccctccatcccccagcccacatagatcatgaacttgcaatagacaagagccacttcccattcatttcagcctttccagctcttaccactgtgccaagcatgtagtagataggaagaccactgtgttattatagttgactggagacttctctgatagcaccggctcagagctggattgtgtatctctaggccctgagttgagtgccagctgggatacaggaagcaagaactgcccaccaacattagtgacaagccactccctgactccattcagcccagtacatacttactgagaaccaattgaaaaaagaattcaggcatcactactggaatacctactgctgtgtaccagatgctttacatacatgatctcatttactccatgtaacaactctggaaagggttacttattcctttttatcagctaaggagagaggctcacaggggttattgatccagggtcacatatcacccggggtagtctgctgtaaagcctatctgctgtgtcctgctccattacaacacaagggaaagtatatctaatgagagatgaaaactaaaggtccaagagtcacgcaagatttagagagtgcacatgggaaggtggccatcagaaatgtcttcacagaggtcaaggcaacgaataaaatggaaaaaacaagtagaaagatcttgaagagatgtccttcttggtatagcactggatgcatcaatgcatgctaggaaagaaacacggtggggttgggggatccttagatatccctcttggggtggagaccatgtctccagtcttctcttggttttctctcactggtcagtgaggagggggagagaagtacatactgttgttgtccctagaagtgcaggagtgaaaacacaccccacccctccttccatgacagagtacagaggatctgtttctcccctttcctctccctcgccttggagtaaggaggctgccttcctccctagaagaggtatttcttttttgtctcaccatagggtgtgtgtgtgtgtgtgtgtgtgtgtgtgtgtgtgtgtgcgcgcgcgcgcgcgcgtgtgtgtgtgtgtgtgttagtaacagcggattattcccttccccctcttctgggggctggggagatgacatctttctccccagcgttgggaaaggaggtggttcttttcctcctcactacagggtgttcgtgcttgtgtgcgtgtgtgcgcgcgtgattgggatgactcctttcgttctcacctccgcatagggaggctgacacctcttatccttccaaaaggagtggggtcggtttccttcgcctccatttcagctgggacacggctctttttctctccaaccaaaaagatggtggggcctctggttccttttccttcccctggggagaaggcctggctcccacgccctccccgcatagtcacgctcaggttgctggaggcctgggtcgccccctcctgcaagccccgagagtcgccagacgcgcggctaggtgccctccgtgagcggggcggggccgcctctgcggcgcggggcgggggctatctctggccccgcccctgccccgcccgctccctctccgcgagcctcgcgccgcgcgggttgcctggcccagaccgccgctgctgtctgcggggtctggtgccggggcctgagtctctgctggctaagccgacgcctcagccgcctcagtcgcctcaatctcgccttccgccctcgctctccctccgcgccaccggaccccgtagccccgcgcgcccccagacctttaagccagatgatgaacttcctgcggcgccggctgtcggacagcagc

SEQ ID NO: 29012 - DNA, 2300 bp, Homo sapien
gaaaactacttactataggatgccagtttctgagatttttctgttaatttcatttaatcctcaccttacaaggaagatatcattattgtcactttttacagagaaacaaaacccaaaaaggattaagtaacttgccaaagttacagtgccaggatttctctacatcccactgcctctcccatagattgaggctcctatataaggaggaaactgttctggttttctcttccttggccaatttggaaatctaggagggcagtggaaacttttaggcagatagaaaaagtggggctaggagggagagtgacttatgatggctttgggggcactctggcttcccctccgaccactgaggggacccagctcctctgctggctctgctacttcaggctggccctctcagaaggtaacacctacccctaatcacatcctcattggcttgcagtatgcaggcctcccctgcatcaactcactggaatccatttataacttctgtgacaagccatgggtggaaagtgaggcccccttcccccaggtaaaaggctaggatccagaccctgcatcttccaggcccctaggagggacttctggaccccaagatgcagtaagcccttcttgttttgtaaaaatgaaatttcagctgtcacacgccctggattgccaaggttcctggaacttgtgtctaattgtgaagtttccacgcctttacaccactcagagagctgaagaggggtgtgtgtgtgtgtgtatgtgtgtgtgtatgtgtgtgtgttaaccaaacagatctgtcacttctgatcttgatcttttttttcaccctggaactaacagctttctttttccttttgaagccagggagagcttggagtgtaagaaaaagatcaatggacaagtagtcaggagggctgggagctgccatggttaaggagggggttgggttcccaagctccacttgttcagcctttccttctgcgtggcctgaggcatctggaatcctagattctgcagaaacacgctaacagagtgtgattttagtatgttgccaatcacagaagagcatatgtgagacctttaccaagtgtcttttttgtggacctcccctttctcctcagtcacatgtccttcctacggcacacgtgtcctaacccacgtgcacccccggtacttgtcagaatttgactctctcctagccacacagggtgatcctgctattagcagctttttctgggtgatttcactgcttatcaactctctgaccgaacctgtgccccagtttcttcatctacaaactgggaataatagtagcacctgccaccactttgacagcctggttgttacaggctcctagtgtatgggttctcttaaagaaatttgtggccagacgtggtggctcacgcctgtaatcccagcactttgggaggctgaggcaggcacatcacgaggtcaggagatcaagaccatcctaactaacacagagaaacccgtctctactaaaaatacaaaaaaaattagccgggtgtggtggcaggtgcctgtagtcccagcaacttaggtggctgaggcgggagaatggcgtgaacccgggaggcggagcttgcaatgagccaagatcgcaccactgtactccagcctgggcgacagagcgagactctgtctcaaaaaaaaaaaagaaatgtgttccctgttttcttttcctaaactgtgccagaggccagggcaggaagaatggggagagcctgtggctagggctttgctcctcccgggatctgggatctggtgaggggtcacactctcacccattcacaatctgagcacattgccttgggccctgcatgaggagaacagcagggctccctggccagaccccaagttctcccttcagtttcacaaagcagctgccacatgaatgacgttttacatattgttctctgctagttcatgggagtggacaaatttggtgactgtgaggggagggtccctttcagctgatgactttgggttgtgtttctcaatatctttactatgactgctgttggtgtgaggagatactttgattgggttggaaaaggctctgccttgcacagctgtgtctctgagcacattgctgtctctgaagttggtcagggcaagccactgggatttggggagcagaagtggacctgtcaatgaaagcagcattccagacaaagcaagaatggcaccaccgtttattgctgccagtctatctgaaattccgtgagtctttctgggtttttggagataagtgcaccagagttaaattaaatcatttaatttccagg

SEQ ID NO: 29013 - DNA, 2300 bp, Homo sapien
ttctttaaagaactagtccaatctacttgctttacagattaaaaaactgagacccatggaatgacagtgagttcccagggtcacagagcatattagtggcagtgctacaagaaccctgtactcttatttggtataccctacatctttaaaatgcactgtcaattttctctgcattagacaaaacctgggcaggactggccctcagacaaagagaattaaaaaaagaaagtatctctgaaagagtgaactttactatatgtagatgtactttaataaacctgtatttttattttaaaaacacatctttggcatcttgatgtccctgtcagcatgtaccctcttggtacctacaaccttcaaaggcccagctttcctgtaatgatcctggttgttttctccctctttcacactcttcactgctcaccaataccccaatctcaccaccaaacaaggctttgcatgtgaaggcccatttcttcccagcttggggtttgaaagagagccggtagaagaattcagtatgtttataaatgcagagagatccttaggggagcgaactctacactgaggtagccatactttaacagaggagcaacaaaaccttaaaagaaggattatcctctaagggcaagatttcaagctgctacaaaatggtgatgtaagaagtaatattgtggagtggaaggagcactgggctagatgtcaggagacgagtactctagtcctcttctgccacggactttctacaagtcactgtatctcactgggcctcagccttcacatctgtccaatgaagagatcagatgggatgctttctgagctcccttcaaatagtacatcagcctctatcttggtctgaacattgtatgaagaaccagcctggatgctaacccgggcatttcatctttcagtcagactcagctctctttcaattcccttcttttcaaatatcactaacaccatcaaaatgaaaaggtatcctttgaaggaaataatgttgaccctgatgaaaagtcagactcctatgggaactaagatttgaacagatactgggggtatctggcctgaggatctcagcattcctggttgaggccagccaaggatgggaagaagaacttcaaagggctttagaaatcacgtagttcaactctactttatgaagaaaaaactgaggcccagagaggcaaaagtcacaaagctacagtgacagtcagaattggaacccagcctcccactatccagtccagcaccatgtggaaacatcccacagcaataatcccatggagatttgggatttggaggcttgcaacactgtgcccaaacagcagacaaggctctggtcacagtcacccccaagtcccctgcttctttgttttttcttttacttttttttttttttttttttttttgagacggagtctcactctgtcgcccagactggagtgcagtggcacagtctcagctcacttcaacctccgcctcctgggttcaagccattctcttgcctcagcctcctgagtacctgggactacaggtgtaggccaccacgcccggctaacttttgtatttttagtagggacggagtttcatcatgatggctagggtgatctcgaactcctgacctcaggtgatcaacccgccttggcttcccaaagtgctgagattacaggcgtgagccaccacgcccagcctgcttctttgttttctaagctgtcccaccttctagaacatgacagagtctccagtgagaagggacatgcaataaaaatcaatgtagtctagggcctcgagagggctttgaggtccaaggtttgccctaagtgatgggacactttgtgttttgtacaccaagagcgctgtctccagctatctggagagtctgaggctctgggagtgagaaagggtttctaaagcactggctgcttctttgacatctctccccaccccccaggcaacagagccaagacacacacaccccaactttctctgtcctgttctattactgtttgctgttgctttggagcctcataaatagggcattgaaagcacttcctgcagctgaaagaagccctgagtagctcgtctcattcccagcgtgcagctcagcaaggggtccgtccttctctgtcactgtctcttttgcctgttgtaattctgtctgcctctctgggactctgcctgtctcactctttctgtctgtgcctctcctcactcttgttctttctgcctgaatcacagccctcagtttttctgtcctcatgcatttgtctttgtggctctttccgtctttctgcccttga

SEQ ID NO: 29014 - DNA, 2300 bp, Homo sapien
ttatatgaattgtccagaataggtaaatctatagagaaagaatatctctatctagagttggtggaatgactgttaatggagagggggttcctttttggagtgatgaaaatgttctaagggtagatttggtgatgatggcacaactctgtcaataaactaaaactcattgaactgtacattttatttatttatttttgagatggagtcttgctctggggctgaagtgcagtggcgcaatctcggcttgtaacctctgcctcccagggtcaagcgattctactgcctcagccccccgagtagctgagattacaggcacgtgccaccacgcccagctaatttttgtatttcttagtagagatggagtttcaccatgttggccaggctggtcttgaactcccggcctcaagtgatccacctgcctcggcctcccaaagtgctgggattacaggcgtgagctgccatacccggcctgaattgtacattttacttctatggtatttacattttagattatattaattattcctcaataaagctgtgattttaaaaagcaggctaggcgcagtggctggtgcctataatcccagcactttggaaagctgaggcaggaggatcacttgagcccaggagtttcagactagtctaggcaacatgtcaagacacagtctctactaaacaattaaaattaaaaaaaaaaattagccaggcatggtggtgtgcacctgtagtcccagctacttgggagcctggggtgggaggattccttgagcccgggaagtcgaggctgaagtgagccgtgattgcgccacagcactccagcctgggcgacacagcaacaccctgtctcatggaagaaagaaagaaaagaaaggaagaaagaaaaaaaaaaagcagattggaactctggaattaacaagaagtaggacgcacggagcacttccgcctgagtggagactgtggatccgggtcaacctgactacctaaatcacaggccaataaatggtctttcagtggtcagtccctgtaagatccgtggctctcagcttcttatcttaggggctgtggaggaaggacatgattatgttgatttaagcgctgaatattttcccttgtgatacccatcctcgcaaaactttgcttcaaccacaaacgaggaccttctgtaccagaggggcaataaccacaatgaagctaggaagaaatgcagagcaccccagcatacagtccataagcttcctgaagtggggggcctcaggcatcgctgcctccccaaagaggatcaggcccagaacagtatgctccagaaataagactggaaaaagggaaagaggggcctcaagtccaggagaccagcggctttctgaacgcgcacctgccaacccactttggacaggtcacgatggacagcgtggcaggaaaagaaaaggtcactgtctacccaacacatgagaaactgtttctcgtgcctcacgtccccactccgtccccacccatgttgtctgagtccctcggtgtcagaaacactgctaagaaatttaagaaattctgttaatgagtttaagaaatgtttttaatgattaaaagtcagtgacttgtgaataaccatgtaacttacaaacgcaaggaactctgaaagtgtgcagcaccaccgatcagaagagaaaaccaagggacccgaaatatgctttaattaaattttcttttaaaatgtcactggaaagaacatcttgggaagacggcctggccgatcgccgtgtgaagggcaagccactctggccgagagggagccccacacctcggtctccccagaccggccctggccgggggcatccccctaaacttcggatccctcctcggaaatgggaccctctctgggccgcctcccagcggtggtggcgaggagcaaacgacaccaggtagcctgccgcggggcagagagtggacgcgggaaagccggtggctcccgccgtgggccctactgtgcgcgggcggcggccgagcccgggccgctccctcccagtcgcgcgccgccgcccccgcccccgcccccgcccccgcccccacccccacccccacccccacccccagccggcgcccgcgcccgcccccgcgccgggcccggctcggcccgacccggctccgccgcgggcaggcggggcccagcgcactcggagcccgagcccgagccgcagccgccgcctggggcgcttgggtcggcctcgaggacaccggagaggggcgccacgccgccgtggccgcaggtcagagtacgggtgcccgcggcgctcgggaaccggctg

SEQ ID NO: 29015 - DNA, 2300 bp, Homo sapien
acctaaatcacaggccaataaatggtctttcagtggtcagtccctgtaagatccgtggctctcagcttcttatcttaggggctgtggaggaaggacatgattatgttgatttaagcgctgaatattttcccttgtgatacccatcctcgcaaaactttgcttcaaccacaaacgaggaccttctgtaccagaggggcaataaccacaatgaagctaggaagaaatgcagagcaccccagcatacagtccataagcttcctgaagtggggggcctcaggcatcgctgcctccccaaagaggatcaggcccagaacagtatgctccagaaataagactggaaaaagggaaagaggggcctcaagtccaggagaccagcggctttctgaacgcgcacctgccaacccactttggacaggtcacgatggacagcgtggcaggaaaagaaaaggtcactgtctacccaacacatgagaaactgtttctcgtgcctcacgtccccactccgtccccacccatgttgtctgagtccctcggtgtcagaaacactgctaagaaatttaagaaattctgttaatgagtttaagaaatgtttttaatgattaaaagtcagtgacttgtgaataaccatgtaacttacaaacgcaaggaactctgaaagtgtgcagcaccaccgatcagaagagaaaaccaagggacccgaaatatgctttaattaaattttcttttaaaatgtcactggaaagaacatcttgggaagacggcctggccgatcgccgtgtgaagggcaagccactctggccgagagggagccccacacctcggtctccccagaccggccctggccgggggcatccccctaaacttcggatccctcctcggaaatgggaccctctctgggccgcctcccagcggtggtggcgaggagcaaacgacaccaggtagcctgccgcggggcagagagtggacgcgggaaagccggtggctcccgccgtgggccctactgtgcgcgggcggcggccgagcccgggccgctccctcccagtcgcgcgccgccgcccccgcccccgcccccgcccccgcccccacccccacccccacccccacccccagccggcgcccgcgcccgcccccgcgccgggcccggctcggcccgacccggctccgccgcgggcaggcggggcccagcgcactcggagcccgagcccgagccgcagccgccgcctggggcgcttgggtcggcctcgaggacaccggagaggggcgccacgccgccgtggccgcaggtcagagtacgggtgcccgcggcgctcgggaaccggctgctggctgggcggggagtgctcagggagggggcgcggagggctggggccgagggtctgggggctagggccgaggaaacgggaactgacggggtcccagacggatgagagctggggagaagggggtctcggctgaggggtccggggctgaggcagggtcatggtccggcaggacccggactgacgggtcgcgggcgggcggctcacgggtgaccgggtgaaggggtcttgggctgagggcacccgggctgagggtcgcgtctaccggagcgcgcactaggggcggagggcgcgggcacagagagccgcggccggtgccgactcgagtggacgcgagccggtgcgtcccggcttccaggacagcccccctcgggagagcgccgggtgggcgcggagccggggacacggggacctccgcgtccccggcggaggtgcgcaagcgtcgggagccgctccgggggaactttggagcagggtgtctggacccggggaagcgaagatccgcgtgcgtccgtcctgaggccgcgcggcacccctgctgaggaggaggtcccgttcgctgtccagagcccaggggcgaccgccgcttggggaccgggggaccgttcagcgaggggcgcgcttgtagctggccaggccctgtgccctgacgcgttgtgctggccctacgcccggcggaggggctggggacggggactgggtgcctccgtgcctccgcggatggagcgcgcagccaggacccccagccgcaccccggggggctggaaaggcgaagtcgctgctttgtgggctcctgcaagtgccaggcgctgaccactcctcctgggagcctaactgaggggggtagaggcagcagaggttaacagaaatctcaggtcccttggtggaaggtgggtgtgtagtcgtggtactttacgcctcggtgtttagggaggagcctaaggtaaggagtcagaaacggggagtaaccgagctgcggct

SEQ ID NO: 29016 - DNA, 2300 bp, Homo sapien
aagttatttcttaagtgacccagcactgcagtgcaactatcattaacataaaatatgattaaataatccacattgtataactgttttgttagtaatgtagggatgctttgcgtgttgcttggtttgtgtatgctgccaaaagtgtaagcaacatttactgagctgctatgtggcaggccctgtgtttattaaaattgtagtttttgctaattgactgttttttgacacatccgtcttgttcatcattgtctacctagcacctagctttaggcttgccacatattatattggcaatgaatatttgttgaacaaacaaatgcatgaaatgtaatgagtaagacaggttttcgctttcaagtaaaacatagtctgggggaagacggaatgtcagaatgtggtgggtgctataggagtaggtgttatcagattctgatgctatggaataataaattgttaaaatatgtaatcttatgtttcagaagctaaagcacagtatgggaactattagaggcttagaaggcctcactacccactagactcagaagttgaatagtgtctgagaaaaaagagaatagaagtaacagtagatgaagagtccagaagtgagaccctttgaggacatgaggacaggtggaaggactgcatctgtgtgttgccaaagagtaacagagactggtataggacttgagttcaattcagtcatatccttaagtattgtgccatcgtgtctggattactttgtagtataagtaaatttccaagcatggggaggaaaggagaagctcctttattgagaattcaactgaatatagagaaaactaattttacacaactgtaatcactgtagtcatttggacaaattagcaaacccaagttttgctttaacttggattgccttaataaagatgttttggggcttaatggcacagttgctcaactcccccactttattccgtgatgttcagacccagccagcatttccccatcaggctcttgcaccatgattgacagggacacttttactagtccccttgaagaatgaatagttactcaatggagattaaccagatatatatttattttactcagaatatcacgataagtataattcagagaattattgccttctaatatactgccctgtgtgggggcgtctttgaaagtccgcaaagtcactgcaattctaataggccactcatgtgacaagacctgctcccacatcggtaatttggcacagctagtatttctccttgccaaaaagggcaaaggccttgagcaagaagccagctttttcctgattacaaaactgaccacaattcctcgccaacctaacagcgtaagtctatttttttctggtggtgtgttattcttctcatagagaactccattttttcattatgacatagcacttatcgtttaaacatcaattgatgttcaaacatcagctggtgtaacattgctgcagttgctattgatggataagctgaagtttttaagaaagcaaacccgatgtataaaattgaaaccatatcaaacccttcttcattctctcagctatttaattttacagaatttagatagcagtcagtatcattttgggcttcacaaatcagtagagtaagtaccttaggaatataacatttcagtagcatgctgataccaacgtttaaactatggatacatatttgaattccaaatttttcttcaaataatgtgattagagattcaaccaggaatagacaccgaaagaaaactttgcccaaataagctttctggtatttcataagcaagagatttaagttttccatttaagaagcaattgtgaattttacaacaataaaaaatgcaagtggatattgaacagtctctgctctgataattctaaatacagtacagttcacgcccctcacaagacactgaacatgtgggtcaccggcgagacagtgtggcaatattttccctgtaatgtaccaagtcttgccaaagcagtgaacattatgacacaactttttgtcacagctggctcctaataggacagtgccagccaattcaagcccagtcctttctgtgtttattcccatctctcccaaatatttggaaactgatgtcttgactcatgggtgtattcacaaattctgttacttcaagtctttttcttttaacggattgatcttttgctagatagagacaaaatatcagtgtgaattacagcaaacccctattccatgctgttatgggtgaaactctgggagattctcctattgacccagaaagcgattccttcactgatacactgtctg

SEQ ID NO: 29017 - DNA, 2300 bp, Homo sapien
atttgccaacttttctattacacaaaagcattataaatacaagtagaatagcaaaaatttcatcctaaagagaaaaatattttgggcttctaatttcaagagagtaaaattgtcctggaaccctgtgcacactttaaaaacaatcattaacagattgcatcaaactagaaacttcttcaccacaaaggaaataatcaataaagtgaaaagccagcctacagaataggggaatctgtacatctgatatgaagttatggattgcaaatcgtacatctgatatggaattaatattccaaaatatgtaagaaactcaacaaactcaattgcaagaaaacaaataacccagttaaaaaatgataaaggaatatccatttctagaaagaagacatacaagtggccaacagatatatgaaaaggtactcaccatcactaatcatcagggaaatgcaaatcaaaaccacggtgagatatcatctcacacccattagaatggctgttatcaaaaacacagaagataagaagtgttggcaaggatgtggataagagggaacccttgtacactgttggcaggaatgtaaattggtatagtcattatggaaaacagaatggactgcctcaaaaaattaaaaatagaactagcatatgatctagcaatcctacttctgggtatatatccaagggaaatggaatcagtatgttgaagagctatctgctctcccatgttcactgcagcattattcgcaatagccaagatatgaaatcaacctaagtgtcaatggatgaatggatttttgaaaacacagtatatatctgtatatatatacacacatacatatatacacatacagatgtatatgtacacacccaatagaatattattcagccttaaaaagagaaggaaatcctgtcatttgcgacaacagagatgaacctagaggacgttatgctaagagaattaaactgggtggtatttgacacagaaagacaaataccacatgatccacgtggaatctaaaaaagtcgaactcataaaagcagtgagtaaaatggtggttgccaggagctggagggtgagagcaatggggagatatcagccagagtttcagttatgcaggataagctctggtcaccttctaaggtgatcatctgctaagtataggtcaccttcagcatggtgactatagttagtgatactgtatggtatatttgaaatttgctaagacagtagatgttaagtgttctcactacacatattcatactcaaaaaggtaactgtgaagtgatgaatatgttcattaccttgattatgataatcatttcatagtaaatacgtatattaaaacatcacattgaataccttaagtgttttgtttgttttttggttttttgggtttttttgttttgttttggtttaggttttttttgaggtggagtcttgctctgtcacccaggctggagtgcagtggtgtgatctcaccttactgctacctctgcctcccaggttcaagtgattctcctgtctcagtctcccaagtagctgggattacaggcgtgctaccacacccggccaatttttgtatttttagtagagatgaggtttcaccatgttggccaggctggtctcgaactcctgacctcaggtgatcctcctgcctccgcctcccaaagtgctgggattacaggtgtgagccactgtgcctggcctgtataccttaagtttaaaaatttttgtctattatactcaataaagctggacaaaattttaaataaataacagcagtcattaacagactcaattgatgacctaatgtagaagttaatgagagcaggcctgttggcaaaaaggcatttatatggatacactgtatgtatctgcactgtttcaggatcctctattatgatacctgggtaaagggtgacttcctttctatcataaaacagcctagacagcactaagaaggtggttatgttcttttctgttgttgtgagcgcccagatgagattactttgccaaagactcttttcatttctctttctgaaactctgtgagattgctgtgttctctaggacttaacttcacagctagtctatttttcctttcagaaatgaccatggttgacacagagatgccattctggcccaccaactttgggatcagctccgtggatctctccgtaatggaagaccactcccactcctttgatatcaagcccttcactactgttgacttctccagcatttctactccacattacgaagacattccattcacaagaacagatccagtggttgcagattac

SEQ ID NO: 29018 - DNA, 2300 bp, Homo sapien
tgatccacccgcctcagcctcccaaagtgctgggattacaggcatgagccaccgtgcccggccagaagtgatgatttattggactgttttctctacttttgtgttgtatgtttgaaaataaccatatcaaagggtttaaaatgcacttgagaaagtcttggggaaaatttctttcttttttaaaatttacagattttttttctttttttaatttctttttttatgtttttgggaggggaatttgagatcccattatcagcaaaccccaaatccttccacgagctgggatgggatttaagagacctggctctagtctcagccccacctcagacctgctcggttatctctgacaactcacagtgccactggaactgttttcttatcagttaaataaggaagtttaactggacaacctctgaatccctttcattgttaaagccctctaattctaaaaccagtatttcttaaattggcatgttctggtcggatattacagcctctcttcagctgtctctcccctgcccaatccatcctgttaccatatcctgtgactcttgccaattttctccctttcttttgcaacattcttaccacaaagctctttgattttggtttatctaaaacctgaactccctagcctagcagtgaaggtccttgcagcagaggacccactgaatgctgcgacatgatctcactctaccaagagcaagcccacagtgcagttcaaaaagggccaggcaggatgcagtggctcaagcctgtaatcccagcactttgggaggccgaggcgggaggatcgcttgaggtcaggagtttgagaccagcctggccaacgtggtgaaaccccgtttctactaaaaatataacaatcagccgggcgtggtggcaggcgcctgtaatccgagctactcgggaggctgaggcaggagaatcacctgaacctgggaggcagagattgcagtgaggtaagtgagctgagatggtgccactgcattccagcctgggcgacagagccaggctccgtctcaaaaaataaaaagggccagaaaaacagggacaacacatgccatgccagactactgcagagcacagaggcaagtcacccaagcaggtctgggaaggcaagaagtctcctggaagaggtgatatttgagctgagacctaaaggctgaccaggaattactgcagctaacagaggggagggaacatagaggcaacagcatgcgtgaaggaatggaggcaagaacattggcagaagtccaaaattcaacatccatcatcacatctagcaccatgaatctctccagcagtatttgccacacttccttgccatcctcctttgcctcctgcttagtctgtgtggtggaactcctgtgattcatatttgggaaagtatatattggactccccacagggctcctttaaaataaccaggtcaggagaaacttacacttcctattgcactccagttttgctcatctcccgtaattctgatggcccatttttcagtaaactcaagctcagaaaggttgtcagtcattcaagctcacgcagccagtgaggggggaaaatggggatgcagagcaggtggacctgccgcctattgtcccttaactgcacaggcagtctgggcacacagaggcttctggccaggtgtctgccagagaaaacgtccttgcaagttccccgcatgctgcagcgtacacaggtgcgctgctgtgatcctctttctacattgagaaagatgagatcagtttcctcagggccatttaataaagtcctgtcggtcgcctcaaacatcccatccaccgagggccgaagattctaggtctctcccacctcccacgtgactatgtgacatttgacgggtaactgcatctcatctgtaaaatgcgtcttgcaggatcgttctggcttccgtacaatcctgcagagagcagcaaagcgcgcacgcagcctccgcctcatactccgcagtggcagagctggcgcacagaacacccgccagccggccgtgcgcaggcgcactccgccaagtcccgacgggagctctgcggctgcgcactcggctggctttgcggccgcactgcttgacggcagcggtgtccgccccacggccggcgttgccggggtaacggcgagcgcgtggggccaagaaaggtaagggccctgggcgaggaaagcgcggccctttccgagtttggtgttttgcagcgaaaggaaatctcgctcttccgaaagtcctccagggcgagagaggaaagggcctaggtactgtgctggggtcgcacagccggccg

SEQ ID NO: 29019 - DNA, 2300 bp, Homo sapien
tatagacagctttgggattcttaggaatcagggttaagcaaccactagtctctttttaggtacagcagaagccaatgtccttgttgaactgtgtgagatatagcagtttgtaaactatgacatattcagtctttttttttttcttttggaacatttcacaaatttgcgtgtcatctttgcacaggggccattctaagtatatgtgctgccgcatcgagcactgttcagtcttcttaaccaggtaaaagaaggtgaaaagtaaagttacatctgccttctcacaagccacgtgttgtcttggatgcctttcagactaatcactgaaggtcgaggcaaaaagcacttgagtttcacaatgtctttgaccttctgatcagatttccaacatctggtagttctcacatcacatgaacacatcccaacagcctaggcatgaatgctttgccctattgttttgcctataattttttgtaacttgggaagtgttttgtaacttgggtgttagcttcaagttttagaaacttaacaagaattttatcaataaaatctactctgcaaagtattgtgaggaaaagggccatttctgttagaatatgtggatgaatctacataagccaaatcatttctctccttatcctgtgaaagggttagtaggcactgtgatgaatatttattgaaattctcattttgctttccaatgctaaacaagttatttgtattatgaatggcatatctatctgaaaacattatgagatccaaaattgaaaataatacaaaacaagctgagagcggtggcttacacctgtaatcccagcactttgggaggccaaggcggtcggatctcttgaggtcaggagttcaagaccagcctggccaaaaatttgtgttcaaaaatacaaaaaattagctgggggtggtgacgcaagcctgtcatcctagctactcgggaggctgaggcagaagaatcgcttgaacccgggaggcagaggttacagtgagccgaaatcgtgccactgcactccagcctgggtgacagagcaagactccatctcaaaaaataacaacaataatacaaaaaaaaaatcttgataaaggatggccattttcttgtttatttacctaaatcacttaatctatcagttttaaattagataaattttcatagtttgttaaactgggggttagttttttttgtttttttttttgttttttttttttcaaataaagcaaataaaatgaaactatattgtaaaagcaaagaaacaagaagtaacatatgcttgttgcagaacacttagaaaatgcagaggccacacgcggtggctcacacctgtaatcccagcactttgggaggccaaggcgggcggatcgtgaggtcaggagatcgagaccatcctggccaatatagtgaaaccccatctctactaaaaatacaaaaattagccaggtgtgttagcagatgcctatagtcccagctacttggaggctgaggcacaagaattgcttgaacccaggaggtggaggttgcagtgaaccaagatcacaccactgcactccagcctggcaacagagcaagactccatctcaaaaaaataaaaaaagaaagaaaagaaaatgcagaaaagtataaagaagaaaaatatttatctataatgcaccattcaataatactgctgtaaacattttggtgtgtcaccttccagtctgttttatgtgctttgttgttttttcaattttgaaattcgagtgctgtttctaacagtatttctgtcttgcaggtatcagcatagtgttgagtgggcagcagagctgatgcgtagacaggggcaggatgagagtacagtgcgcagaatcctcaaggattacacgaaaccgcttgagcatcctcctgtgaaaaggaatgaagaggctcaagtgcatgacaagcttaactctggaatggtttccaacatggaaggcacagcagggggagagagaccttctgtggtaaacggggactctggaaagtcaggtggtgtgggtgatccccgtgagccattaggctgcctgcaggagggctctggctgccacccaacaacagagagctttgagaaaagcgtgcgagaggatgcctcacctctgccccatgtctgttgctgcaaacaagatgctctcatcctccagcgtggccttcatcatgaagacggcagccagcacatcggcctcctgcatcctggggacagagggcctgaccatgagtacgtgctggtcgaggaagcggagtgtgccatgagcgagagggaggctgccccaaatgagga

SEQ ID NO: 29020 - DNA, 2300 bp, Homo sapien
tcacaccactgcactccagcctgggcaatagagcaagagtccgtctcaaaaaaattgtgttttaatcattctttataatattaacacaatagaatgtgaatcctgggaatttataagaaaaatgttcattttaaaatacattctctatgacatgtagtgcttccatttgttctgtatatattgtatttctttctctttagttggtgcaaagaaacaggttaatatgcagaagaaatccatataggatctttgagtatttgcaactcagcctagaagaggtatgttttcaacatattattatttcagccatcggtctctgggcctgaactacactatatgtgaacctacctcacagtgtagttctgtatgtaattcaattattgaatattgtaattcagtattgaaatcactatgggtagctcccaagtaggcctgcctttcactcctcagcctttatttcatcagttctaagatatgtgtttgcaatcattccacagaagattcgaggggtttttctgagtacttcttttctcattaagattttagattgttaggccgggtgcgggggctcacacctgtgatcccagcactttgggaggccaaggcaggaggatcacctgaggtcaggagttcgagaccagcctggccaacatggtaaaaccctgtctctaccaaaaatacaaaaattagagtgattgctcatgcctgtaatcccgactactcaggagactgaggcaggagaattgcttgaacccgggaggtggaggttgcagtaagccaagatcgtgccattgcactccagcctgggtgacagaatgaaactctgtctcaaaaaaaaaaaaaaaaaaaaaggctttatgttgatggctaggtgtgatggcttatgcctgtagtccagccacttgtgtggctgacgtgggaggattgcttgagcccaggaggtcacgtctgcagtgagccacgattgcactactgcgctccagcttgggcgaaagagtgagactctgtgtcaaacaaaaaaaagaataaaaagatttcagattgttaacagatgctgactggtgatgccgggggtaggggggtggaaagaagaaaaaagtggatttcggattggctgaatattttgttactaattttcactagctttttcaaaaatactataattcatataccatacaatttatccacttaaagagtacaagtcgctattgtttggtatattcatggagtctctacttttcatatactgtgctacatgattcagatcatgtagtgactgctagttaagtaaatggatttatttccttctgcaggatccctctacttaatgcagtagctacattcttgaaagttagcttgggcctggtgccatggctcacacctgtaatcccagcactctgggaggccaaggcaggcagatagcttgagcccaggagtttaaggtcagcctaagcaacatggcaaaaccccatctctacaaaaaatacaaaaattagccaggtgtggcggtgcatgcctgtagtctcaactacttgggtggctgaggtgggagggttgcttgagcctgggaggtcgaggctttaatgaaccgaggtcacgccactgcacaagcgagatcctgtttcaaaaaaaaaaaaaaaaagtggctaaaagtggccttccataaactgcatcatattgtcccagtgacctggagttcctctaacctgtggtcactttatgctcagaccctcttttcttgcttatgttgatagtgcacacagaaatgtcttttctgcctttgaagctaggaccgcttcttgggctcccctcttctccaggagctctgtgatggctttctttgatagttcctgcagtgtccagtgtggttcttggcatacaggtaggtcccaagaagtgctatggaacacatccatgttggtaattttatagctgagaccacaggaaagtaattgtgggggccgggcgccgtggctcacacctgtaatcccagcactttgggaggccgaggcgggtggatcacgaggtcaggagatcgagaccatcctggctaacatggtgaaaccccatctctactaaaaatacaaaaattagctgggtgtggtgtcacacacctgtaatcccagctactcgggaggctgaggcaggagaatcacttgaacccgggaggcggaggttgcagtaagctgagattgcaccactgcactccagcctaggtgaaagagtaagactccgtctctaaaataaaataaaatagaataaacaattcaaaattccttttctcggttgcaccagccacg

SEQ ID NO: 29021 - DNA, 2300 bp, Homo sapien
gatcgtgaatgtattccataaagaatgagataagctgaattttaaaaataagtggcatgggctgggcgcggtggctctcgcccgtaatcccagcactttgggaggccgaggcgggtggattgcctgagctcagaagttcgagaccagcctgggcaacagggtgaaaccccgtcgctactaaaacacaaaaaatcagctgggcgtggcagcgtgcgcctgtataatcccagctactccggaggctgagacaggagaatcgcttgaacacgggaggtggaggttgcagtgagccaagagcatgccactgcactccagcctgggtgacagagcaagactccgtctcaaaaaaaaaaaaaaaaaagacgtgtaatttttatgagcatgaattgcatggatcaaatgtgttatgagttaaaatgcaatattcaagacactgaaaacaaaatttccagtatacttccaaattcctgagaaaaatttcaaaagttctaaataattggaagtatataccatgctcattcattggaagactcaatatttttatagcaaagtaaaaaaagaacatacagctatacatacataacatggaaagatctcacagataaaatgttggtcaaaagaaggcagacaaaagcgtaggtactgaattattatttatatgaaagtcaagaacagttaaactaatttatagtgatagagatgaacccaagcaatgacctttgtaaagtattgcctgggaaggaccataaggaagcccttctggggtgtcgataatatccagcccccacccaccccctgcagcctcgactgcagtgaactatgctcaaaggatccttccggctcaacctctccttactccagcattttgaagtttagtcgagcatggtgtcgcgcacctgtattcccagctgctggggaggttaaggcagaggactgcttgaactatgatggcgccactgcactccagcctgggcgacagagcaagaccctgcctcaaaacaaaacaaaaaattctttattttgatctgggtggtagtttcatgagtgtatgcatgtgcaaaaattcatagaatgtgtttggtgcacttatattgtgcatgttatgtatctcgagtttttaagcaatgagaaaccattgtaagattaaaaggtgaatgacatgatccgatttatgttttaaaaatagatttttaccaggaacggaagccagaagaccagttaaaaggctatcgcatggctggccaggcgtgcacgcctgtaattccagctacgtggaaggctgagaggcaggagaatcgcttgaacccgggaggcggaggttgcagtgagccgagatcgccccactgcactccagcctgggcaacaagagagaaactccgtctcaaaaaaataaaaaataaaataataataattaaaaaaaaaggtatcgcatggtgctaggtagaagggacggtggaaagggggcagaagaggacgcattggacagaggtgtgggagcagaatctgcagggtatagagagctagagggaagtgtcaaaaataacttttggggtttccaccataggaaatggaagacgagcagcacaagactggcaggaaagaaaatgaagactaaaacttgtggaagtagagatttggggaaagagcagttgggagagagctaaggaatttccttaagtgggaggcgaggtccggcgggaacagttgaggcagggcctgagaagggtgcccagtgagtgcgagtatgaatggataggggcatccgggattaagaggagaggctggagtttccccaggagtggtgaagtgcctcgaaggaggcgggagatccctaaggaatactcttggcgatcggggcagaatcgcaggcactaacagtaggcatcgggataagactggcaggactaagatgccagccaggctccgccccggaggcttggaagtgcgggacaccgagagcagggatgccgggacagccggcccgatccccggtgcggaaccaattgtgacgacggctaggttacccgccggcgctacaaaggtgccacaccggaggggcggcgtgcgccggcgtgcgccggcgtgacgcggctacgcgggatgggccgggccagggccaaggccgaggcggcagcggctgcgagaggcggcggcacgacgacggtccctcagcccagccaccatgagcaccaagcagatcacttgcaggtcagtgcgctggagccaggagcttcgggccgctcccccaggccgcaggggggccggtgcgcgccagtgctgtggtccgggaacctgaggct

SEQ ID NO: 29022 - DNA, 2300 bp, Homo sapien
ctgatattctgaaacatctgaaacaatgtatgagaaacagctttcattaaaaactacaagtacccatacaacctttctgtttctcactttcagtacggtgttcaataaattgcatgagattattctacactttattgtaaaatagattttgtgttagatgatttggcccaactgtaggctgatgtaagtgttctaagcataagtaaggtagcccaggctgagctaggagaatcgcttgaacccggaaggcagaggttgcagtgagctgagactgtgccattgcacttcagcctgggtgacagagagactccatctcaaaacaaaaaacaaaaaacagtggctttattgggatgtaactccatcattagtcaaggagcatctgtgtatatcttttgataccacactatggtatttgatcctcaccacgaccagttaagtgggtagtataatcttcattttatagggaaaggtagcaaggcccagggaagttggttttgtgacatgttcttaagtggcagagctgggtcttgagcccagatcttctggtttcgttagtcatgccctttaagctccttgagaacagagagaacagtttttcacagagtgttttctcaattatgtggctcacattgaacatatctcaaatcaggaagatatatcttcacatagaaatatatgggatcatttgtttttctttcagaaaagctgtcattgaatcagttgtagtgcctctgaaatcactgttgtagaatcaaggaaatatatagatctctctccagtgcctaatagagcctttatacataatatatgcctggtaaatgtttgtatgctaagttcaagaataagctgattttataaagcaaaatgtgcttctaaaagttgtatgcctgtgcttgtctctgcaggtattttatgcatggtgtgtgtcgggaaggaagtcagtgcctattctcacatgacttggcaaacagcaaaccgtccaccatctgcaagtactaccagaagggctactgtgcctatggaactcggtgcaggcaaggactctgcaacagattccagctgtgacactgatttcatttggagaatgggtcttgataagggggaaattttaatgtaaaagtaatatggcaacatcacaaaaagtatggcaaataagtttaaaacctcagtttcagtaccctaaaactaattttcttttctttttttttttgagatagagtctctcactgttgcccaggctggagggcagtggtgcgatctcagttctctgcaacctccgcctccagggttctcctgcctcagcctcccaagtagctgagattacaggcatctgccactacgcctggctgattttttttttttttgtatttttagtagagatggggtttcaccatgttggtcaggctggtctctaactcctgacctcgtgatcctcccgcctcagcttcccaaagtgctggaattacaggcgtgagccaccgtgcctggcctaattttcattttttaaaactacttttcagccttattcttatgaatatatagttataaaattgtacacaattccggaaacttgttcatgcttttgtagcaaagagccgatcttttctttctagactgcaaagcttccttccctcctttttctctgcagtgcagtgggagatgatggaagtaggcccacgttggtcttcccctgtcaatgagtgccaagagagacagtcagggagagatcattggcccttgtcagcattttggggactcctgctcaaaagaatactgggtcagtcaggcatcaggagattttagctcaacatctgtttggaactttcaggttctctgtgtggtctggtgctgtgtgtctgtcccactcaagtcccacagagacacttaagcataggtgatagatagcaaatgtccccctcacaatgaattgccaagcatctgttaataatcgataatcctgttagagtttaaatattggaaaagatggccgccttcttcacctcaacaagtgcagcagaaggagggccattggcatctggggagtgtgggagatgtgtgtgggtggcatgtctgtaatgcatctgctgtgtgttttgtttagatatgaccacacgaggccctctgctgcagctggaggtgctgtgggcaccatggcccacagtgtgccctccccagctttccacagtcctcaccctccttccgaggtcactgcatccattgtgaaaactaactcacatgaacccggaaagcgtgaaaagagaacattggttcttagagaccgaagtgagtaagcggaagcc

SEQ ID NO: 29023 - DNA, 2300 bp, Homo sapien
gatggcagggattttgattactgttaattttccaatatccaaaataatgtgtggtacctaataggctctcaatatcgaaaagtaatagtgcacatggcattctgtagtattaggtaggtatcttgtgttcctgtgtttgcgtaaataagatcatacattatgttctgcttttttaacttaatggctttttttttcctttttttgcgacagagtctggctctgtcacctaggctggagtgcagtggcgctatctcggctcactgcaacctctgcctactgggttcaagtgattctcctgcctcagcctcctgagtagctgggattacagacgcgcaccaccacacctggccaatttttttttttttttttttaggcggagtctcactctgttgtccaggctggagtgcagtggcgcgatctcagctcactgcaagctccgcctcccgggttcatgccattctcctgcctcagcctcctgagtagctgggactacaggggcccgccaccacacccggctaatcttttgtatttttagtagagacggggttttactgtgttagccaggatggtctcgatctcctgacttcgtgatctgcccgcctcggcctcccaaagtgctgggattacatgtgtgagccaccgcacccggcctatttgttttgtattttttagcagagacaggtttcaccatgttggccaggctggtctcaaactcatgacctcaagtgatctgcccgcctcggcctcccaaagtgctgggattacaggcgtgagccaccacgcccagccatgtcttttttttttttttttttgagacaagagtttcgctcttgttgcccaggctggagtgcaatgacgcgatttcggctcaccgcaatctccgcctcctgggtacaagcaattctcctgccttagcctcccgagtagatgggatgacaggcatgcaccaccatgcccagctaatttggtatttttatttttttatatttatttattttttcgagacggagtctcgctctgtcgcccaggctggagtgtaatggtgcgatctgggctcactgcaacctctgcctcccgggttcaagcgattctcctgtctcagcctcctgagtagctgggattacaggcgcccgccaccacgcccggctaatttttgtatttttagtagagacggggtttctccatgttggtcaggctggtctcgaactcccgacctcaggtgatccgcctgcctcggccttccaaagtgctgggattacaggagtaatcccaaaaaaagcgccgggccctttttttgttgttttttaaattcagtaactatctagttcattcttggatggatgacaacccagattggatgtgtagcagcgttctcttaaccagtttcctattaatcttcatttcatccccagtgtttctccagaatgcaaataatatggcattaaatatcttcacacatagctttttgtgtatgtgtatacttatttctctagaattagtgtctagaagtgaaactgccgggaggaaggatatatacttttaacatgtccaagttccactgtgatagcgctgcgagggcacacaacaggtttcaatataccttggaccaaaccggatattatcagtttttttaacttgttgctaatgtgatgggggaaaaatgaactcggaatttacacacaaggaaaagaccgtttaaggttcagggactgtccacatagctgtcaagtggcggagccgtgatttggtattaaagtgcccggagaggacgcgtcaaagttggacactgtgccctgtgtcctgaggcacgtctggtgatcgctgggccttgcaatgctgggcaggcaggccttcctctccccttctaggcctctggccactcctggctggccgaaagccggttcttctcgattaccgagtgcctctcctgaaagcaagtcagcgtcgcctaacctcttcagcttcgaaatggcggccaccagatcgctaggccacgccccgggggcggggcctgagttcaggccagagcgatggatgcccgagccaagttagaagtcgactgccagtagggctcgcgcagaatcggagagccggtggcgtcgcaggtcgggaggacgagcaccgagtcgagggctcgctcgtctgggccgcccgagagtcttaatcgcgggcgcttgggccgccatcttagatggcgggagtaagaggaaaacgattgtgaggcgggaacggctttctgctgccttttttgggccccgaaaagggtcagctggccgggctttggggcgcgtgccctgagg

SEQ ID NO: 29024 - DNA, 2300 bp, Homo sapien
cggtcttgaactcctggactcaagtgattcacctgcctcagcctcccaaagtgctgggattataggcgtgagccacggctcccaggcaaaattcttatcttaaacacaggtttggtcatgtccctctcaggtggctccccatccctctcaggatgcctggctgctgaggccctgcctctcttgcttcctcctctcccctctccatccccaaggcccccactctctggctgttcaggattatttgcagatcctccacacaatagtgctcctcacctctaagccctcacacatggctccctctgcatggaatatccttggaacacttcttgggctaacctttcaggtcactcattcattcaacaaatgtattgagggccagatgcagtggcttacgcctataatccagagctttagggggccaaggccggaggatcgcttgaggctaggagttcaagaccagcctaacatagcaagatcttgtctctacaaaaaatataaaaatcagccaggcgtgggggtgcatgcctgtagtcccagctcctcagcaggctgaggtgagaggatggcttgagcccaggagtttgagtttgcagtgagtgatgatcgtgccactgcactccagcttgggcaacagagcgagaccctgactcaaaaaaaaaaaaaaattagtgagcacctactgtcagacatgatcctaggtcctgtagcaaagcaatacgtaatgagaaaatagacataacaagaaaatatgcagcacagcagatggtgagcagtgaagcaggcagagggaaagctggtgtggggttactactttaagcaggatggtcagataaggcttcatggagtaggtgacttgtgaggagagagctgaagtgagcggggggccaggtggctttctagggggagagcactccaggcagagggaacagccagggcaaaggccctgaggagggagcccacccaggggaactggaacatgttccagtgttactggagcagagtgagggaggaagtcatgggaaccaaggtcagagagggccagaggtgtggggaagatctcgcaggggcttgtaagaccttgggttttaccctgagtgcagtgggagtgtggcagctgctgagcggggagggacatgagctgctttgggtttgaacaggaccccctggctgcctggctgatgagaatagccaggggcgaggcggggagcagggagcccagtgttgacactggctggatcaaggtgacagttgaggagtggagagaaggggctgaattcaggctatactgaaggcaggaccaacaggattttccagatgggtcagatacagagtgtgagaaagcaaagtgtcaagatctgggggctgagcttagggtatggaagacccctcttcaggaagtcctcctggggagcccacagctcctgggccttgcctgtttccctccaaggctgggggctcccgtggtaggacttgtttcctgtcctgctgccacagtgctggataagtgagaggtgagaggtggaggcaagctgagctggggccctgccctcggctgtgtgaggtctgacactgctcctctcacctctctagggacctgtgttttcccacttgcacaaggcgagtgggtgctctccaaaagtacttctagctgtaacccagtttcctccctaggagtgggcactgccagtctcctgagcccccaggccctctctcctgctccctgcccaacctcagcctcctgggagcattggaatatcttccttcccctctgggacgcgcagggcaggttgggacacgtggctggggcctgagtcagcctcaccaatgtgggtggagggggtacctgggacacgtcccctccttccttcccagagcttggtacagccaagggtggcacagctgcccccatttcactgtctcctggagtctgaaggcatggctgtggccctgaggcaggaccaggcatgtagctgccccacctgcccctccgcagtgttgtagggaagagtcaagtcagacaggaaggcctggggctgatagcaccagcaggaaggaatgccatcccagtgagcgagtggggcccagggacaacgtcacggtagtcccgccctccttgctgtcacaggtgcagcctgtcctctccttcccctgaccagcccagcatccacatagtctacacagagctccccttgctgcccagacaagctgaaggaccacaggtaatgggacatggggctgggtgagcagtggggtggagtgtcagcttttaaggaaatcgggagaaagagtgtcctcaatag

SEQ ID NO: 29025 - DNA, 2300 bp, Homo sapien
ttcttaaacacatcaggctggttcccaccttgagacctttttttttttttttttttttgaggcagaatcttgctctgtcgccaggctggagtgcagtggcgcgatctcgtctcactgcgaactctgcctcccgggttcacgccattctcctgcctcagcctcctgagtagctgggactacaggtgcccgccaccacgcccggctaatttttttgtatttttagtagagacggggtttcatcgtgttagccaggatggtctcgatttcctgacctcgtgatcctcctgcctcggcctcccaaagtgctgggattacaggtgtgagccaccgcacccggccaccacctcgggacctttgcacctgctgctccctctgtctgggaagcccttccctcaaaactttgcccagctgcttcatctgttgaggtcttagcccaaatgtctcctcctcaaaaagtgccctccctgacctttgctgaagttgcccctccacgctccaggaactctctattttattttctgaagagctcttattttccttatctaatcactttcttccttcttgctgatttcctacactaaaatgtaaagtccccagggggcaggggccgtttgtgtctaacaccctgctgcgttgcatccttgttgtacagatctgcactgtccattatgatagccactacccatagtgggctatttaaagttaagttaatgaaaaataaatataattaagaatttggttccccagtcacactaattccatttcaagtgctcaatagccacatgtggctagtggctatcatattagatactatactgaagatgtagaacattttcaacattgcagtgttctattagctttggtctagaacctacgtacctcataataacaggtgttcaaggggggtgtcaatttaataaagattttttttttttttttgagacggagtctcgctctgtcgcccaggctggagtgcagtggcgcgatctccgctcactgcaagctccgcctcccgggttcacgccattctcctgcctcagcctcccgagtagctgggactacaggcgcctgccaccacacccggctaatttttttgtatttttagtagagacggggtttcactgtgttagccaggatggtcgtgatctcctgacctcgtgatccgcccgcctcggcctcccaagtgaataaagatttcttttatccttatcttatgagtgagaaaaacatagcccagagaggttgtttcattatcccaaggtcacacagccaggaaggagcctagcagagatttgaagccaggcttgtctggctctgaagcacacactactccctttcccatccagcagcctcctggctgtttatggaaggattgctgcgcaggatattaagggatctgcagtcaatcctgactccatcccagattcattggctgtgtgaccctcagcaaatccctttgcttctcggcctcagttgcattgctaaaaaaatgaagaaactgaccctgccgtcctgagggttggggatgcgaggcagggggccttgtgtgactcagttcattccccagatcctgtctggctcaggggcgggcaagcatcgtgggtgaggggtcttttggttggcctgaccagctttggttgatagctcctgtttcttgaatgcctacagatgagaaagcggaggtaaagtaacttggccaaggctacacagcagaagaggcagaagtgggattcgaacctgagactctatgatattacgtccatgccgcaagacagagctggcacctacgggaataacaaggaggtggtggcagggtagtgagctccccgtctctgggggtgtgtgcaatccggcgctgcgctgtcagcagggcaagggctggggccggggccaagaccaccaagccaggcccaggcccgcccgcctcccgcggccgccacggccaaggcgtgagcacggggcggggcgggagctgctatttctgtctggtgagcgcagcccgcgcagctggcgagggagggggcgcccgcgccgccatattccctcccgccggccggctccgcggcgcgcagccaccatgagcaccgccgccttccacatctccagcctcctggagaagatgacgtccagcgacaaggacttcaggtgcagcccgccgccggcccccttctctccttcccgctctgaagccgggggccttcttcccctctcgaagcgccagcccatcccccatgaccatgcagccccctgcctcttctctcttctccctgcattaagctgcccccctccccacaggccca

SEQ ID NO: 29026 - DNA, 2300 bp, Homo sapien
tttgtagagacagggtcttactatgttgcctaggccggtcttgaactcctgggctcaagcaaatctcccacctcagactcccaaagtattggaattataggtgtgaaccatagtgctcagccaatttgcacaataatcttaaatacaaaagctaagcaaaacaaatcaagagcatctttaaaaactaggcagtctgggaggcaggggctgccgtgagccgtgagatggcacctttgcattccagcctaggtgacagagggaggccctgtctaaaaaaaaccaaaaaccaaaaaacaaaacaaaacaaaaaacatctaggcagtagctcgtgcccgtaatcccagctactcaggaggctgaggcgagagaatcgtttgagcccaggagttcaagaccagcctgggcaacagagtgagaccccatttctaaaaaatgaacaaagaaaaactaggcagtttcgcccagtggttagaagcgtggagtttggagtcaagtctccaaatttcatcttccacatatgcaaaatggagacaataataggggtacgttatagaattgtggtaggcatagtgaactccatcgcatgttagctgttttcgttactatttactgtctaaattcggtgatgaaattattaggaagtctctgtcttgttctcttctgaccactaagaggcgcacttcggagtagaagaaacgcgggcggaaatagcccaaaagcggattggcttcgacttctggcggaagtaaattcctccctccaccaggtcttattagctcagaaagaattccaaatttctacgtagtcccaaggataggtagaatacatttctcagtcctattcctagttattattgtctattaaaacatgtatactcagaatttttgcggcattattttttgacgtgtctttattttatttaaaagagccggagccggaagtgcttgcctttttccctgctaggacccaggggttacgacccatcagcccttgcgcgccaccgtcccttctctcttcctcggcgctgcctacggaggtggcagccatctccttctcggtaagtgttaatccgtggcaatccgcattcctgcgggattcatctggccccgtcgcccagtggtgcggaggcctccccttcagcgcggtagtgtctgtgggtattgttattgtcagcttactggagcgtgtacaggaacagaacgaagccgccgagttgatagggctttgcgtcccagagcctcctgccctccgcctgtattcagagctgcgggctgcttgtttgttccttggcggtggagggtgctagttgaggccagacttcggggtctcctgggggccgtgggacgaccaggggtggcccagcttgacagctttcagctgggatctgtggatcccagcgctcaccaatgtcggcccacgtgtattcgttcatgccatggccggcttcttccgctgcagtctctggcccgagggctgctgctgcgggaccgccaaggaaagacgagctgtaggtcggctggtccagctgcaggcagaaattctggtagtatctctgggaatatgaagatgcaactgcccccaccttgccttcgaggatatcatgggccagaaggcagagtcgttttgaatacgtggttcattgagtacccactctgggccagttgatggctgcgaagagagcagaaggggtgctgctgtaggaaatcaatggctcggaagaccacactgaggaaggtgtgagttgatactggaagatctccaggtttgaggcatcttcagaggtatatggtggttttgtgtgtgttgagggtgtggtagcgcagcagctccctagggaattagaaggttttattgaacatttaccctgtgacaggcactgcaggcattcagcgcgcagtgtcatcttcattttacaggtgaggaaaagactcaggttcaagtagatggtcaaggccagtactaccggaaggaccatctgggggttcggacactggtggggtgggatttgctgccccttgcaaattgagagtgtcttggggtcagttttgatttgctcagctgttggcattctttgggctctgagtgggtgaggtgacccttgacctcctgggatcgcatctggagagtgcctagtattctgccagcttcggaaagggagggaaagcaagcctggcagaggcacccattccattcccagcttgctccgtagctggcgattggaagacactctgcgacagtgttcagtccctgggcaggaaagcctccttccaggattcttcctcacctggggccgcttcttc

SEQ ID NO: 29027 - DNA, 2300 bp, Homo sapien
agcccagctctagacttttagagaaattttaatagtattttacaccacagtgattcctttttttaaaaaaaatttatgtccctagcatgtacagtaaacactaaagtgattcctaaagaattcttcccttttatcacttccagtaggcctctgtgaaaccaaatctacctccgcttacaagaaagatgctgggctggccttctctcaaagtctttccaaacttttcttggcattgacttagacaccctaggaatctaacttgagaaaatgttttcattaaaaaaaatctcaggaagtaaaacctcctgaatgattactgagttgacataaatcttatgtgtatattcttatcagaaaaaaagtatcttcattttgtgggacaccaattcatgtattattattattttgagacaaagtttcgctcttgttgcccaggctggagtgcaatggcgcgatctccacttactgcaacctccacctcctgagttcaagtgattctcgtgcctcagcctccctagtagctggaactacaggcatgtgccaccacacccagctaattttttgtaactttagtagagatggggtttcaccatgttggccaggatggactcgaactcctgaccacaggtgatctgcccacctcagcttcccaaagtgctgggattacaggcatgagccaccgcgcccagtcgctgggtcttacagtaactttatgtttaacattttgaggaaatgctattcttttccaaagtgactgcaccatttcatatttgcactagcactgtacggacattcccatttctctgtcctagtgagtgtgaaatggtatctcactgcagttccagtttgtatttccctgatggctaatgatgtggatcatttcatgtgttcattggccacagagaaatgtctatttggattctttacccatttttcaattgggttatttgtctttataggtttgttgttgttgagacagagtcttgctctgtcactcaggctggagtgcagtggcattatcacagctaactgcagtctagaactgctgggctcacgtgatcatcccagctcagcctctcgagtaactgggactacaggcatgcgccaccagccccagctaattattttattttttgtagagacagggtcttactatgttgcctaggccggtcttgaactcctgggctcaagcaaatctcccacctcagactcccaaagtattggaattataggtgtgaaccatagtgctcagccaatttgcacaataatcttaaatacaaaagctaagcaaaacaaatcaagagcatctttaaaaactaggcagtctgggaggcaggggctgccgtgagccgtgagatggcacctttgcattccagcctaggtgacagagggaggccctgtctaaaaaaaaccaaaaaccaaaaaacaaaacaaaacaaaaaacatctaggcagtagctcgtgcccgtaatcccagctactcaggaggctgaggcgagagaatcgtttgagcccaggagttcaagaccagcctgggcaacagagtgagaccccatttctaaaaaatgaacaaagaaaaactaggcagtttcgcccagtggttagaagcgtggagtttggagtcaagtctccaaatttcatcttccacatatgcaaaatggagacaataataggggtacgttatagaattgtggtaggcatagtgaactccatcgcatgttagctgttttcgttactatttactgtctaaattcggtgatgaaattattaggaagtctctgtcttgttctcttctgaccactaagaggcgcacttcggagtagaagaaacgcgggcggaaatagcccaaaagcggattggcttcgacttctggcggaagtaaattcctccctccaccaggtcttattagctcagaaagaattccaaatttctacgtagtcccaaggataggtagaatacatttctcagtcctattcctagttattattgtctattaaaacatgtatactcagaatttttgcggcattattttttgacgtgtctttattttatttaaaagagccggagccggaagtgcttgcctttttccctgctaggacccaggggttacgacccatcagcccttgcgcgccaccgtcccttctctcttcctcggcgctgcctacggaggtggcagccatctccttctcggtaagtgttaatccgtggcaatccgcattcctgcgggattcatctggccccgtcgcccagtggtgcggaggcctccccttcagcgcggtagtgtctgtgggtattgttatt

SEQ ID NO: 29028 - DNA, 2300 bp, Homo sapien
actgggtcatgtgtaccctatcctctcccagcttcctacccctaccctaaccatgacagatgccagatgtggctgtggtctttgagcagtgcagcctagtgttcttctccttccagaaccctctatgtataggtacttttgtccatcttttttattatggccttccttgtgagtgtgaggtggtattgcggtcttgatttacagttccctaaagattagtgaggttgagagcatcttttcatgggcttattggccacttgtagattgtctttggagaaaaatctactcagataccttgcctgtttttaaattgggttatttgccttattatttttgaattgtgagcgttctttatgtactatggacactagacccttactagatacatgatttgcaaatatttccccccattctgtgtcttcatttatttttaacagagcaaagaaaacatgggaagctgagaagaggaatgtggagatgggcagtgaaggggcactgggttcctgctcagcctcttgcctcggaacccaggtgctctaaactggcataaggggcactgggctcctgctcagcttcttgcctgggaacccaggtgctctaaactggctttaggggctgccctcctctgctgcaagctgggccacctcagcccccttccttcactgtccccctccaaatgaaagattcagaagggcacaagacaatgcccctgccttgatggcttcttgcagcttcctgactcccgtaggcctgccagctgcctggccctccaggagatggacttgtaggtgggtggcccaggacaggtggggttttgattgttccatatctgcttgctgtctcccaaccacgtctaggcattccacaggtgtgggcgctgggcactgtatctgccttcatggagcccaaggacagataataaacaagtaaacatacaaatggaggactgcaagccatgagcgctcatagtaggaagagcctgggagaggaggaaagagtgagggaagccgtctcttagttggcccagttaagctgagcctcagtttactcattggtaaaatgaggccaggggtaactccacctacttcacaatgttgccttgaaggccaactatcactaaagaactctaaagtgctaattagtattactttaagcttgtcataggtgcttgaagggtgtctctgggtggagaaagggtagggggctgggtgggcttagggagaaagaagcaactttccattagatcttcccccaaaaagccgccaaaagggtggtaccaacctcaggatagggcccattcccttctctggggcgcatcagagccccagaaccacacggttcggtccaggcaggcaaaggccaggttttataaactgaaggcaaaatcgggataggcagatgttgagtaggcatcagcggagtaggctctggttgggggtttggcgctgtgcatttgttgtggttacacgctggagaggaagacatggctcccgggaggcgccagtgttggaggggctgcgcaaagtcctccttccagaacagaggcttcgcgcgctgggacctggatgcagtgtctgggactccgcccttgcgctctgcaccccgcgcctcggctcggccccgcccctgcgcgtagccccgcccctgacgccccgcccctgaccccccgccccctgtgcttcttccgcggcgccgtgtggccacgcctcctgtgctctcttccccacacgctccgtgcagtctcgcccccgcgcgcagccccgcccccagctcgccctccggccccgcccccagctcgccctccggccccgcccccgccctgccccgcccacttcagggccacattcctccggcccggcctcgcgctgcgccaagcgggcggcggcggaggggcgggcttggctggcctggggctcggacttggggccggagccgcgggagccggcggacgctggaccaggagccccgacgtgatcgcgtggcgggtggtcgggtctccgggtggccgggtgtcggccccgggatccggcggctcgctggcgggagtcggcggcctctgctgggcctgggtcccggctcccggcccggcccgctcccactgcggccgccatgtggtgcctgcactgcaactcggagaggacccagtcccttctggagctagagcttgacagcgggtgagggcgcggcgcggggcgagcggccttcccgggtgctgagcggtgggctggcgcaggctgtggggatgcctgtgcgggagtgcgggtgaccgtcgggaccgggcgcccggcgtgcgagagaaa

SEQ ID NO: 29029 - DNA, 2300 bp, Homo sapien
tgctaaatgctaaaatcaacccatctgctccagttggtgttaaatgtgatttgcaatggaagaactcttccaaagagaccagagaggagagccttggtttgggctttgcctaacctagattctagtcttggccctgctggcttctaacttgctttgcatcgttgggcaagttccttcctgtctctgatcctcagttcttgtctgtgacataagagagcaagatgagcccttctagctcggatgctgctgcctggtggctctgcagtcacagcttggagtccatgcctttccccacccttatcacatgtacctttctattttaaatgtggtcacctgtcatagagaagggtgcaaggacaaacatgcacagcttaaagaaaaataagaacatgcgtgtgaccactgcatgggtcaagagactgagcattgcccaaagcccccgtgtgcccctccccagcctgctcctcagagattgtcgtcatcctgactttgtgctaataatgtccctcttgcccttcctgtcgtaccacctatggaacagctttttacaatataattttgcttttattatttttgagctgaatataaacaggctgtggatatttgttcaggtctggctccttttgctcaaagttgcatctgcgagattcacctatgcaataagttgctgttcattcttttatttttattgtatttatttttatttttatttttatttttttgagatagagcctcgctctgtcgcccaggctggagtgcattggcgcaatctcagctcacagcaacctgcacttcccgggttcaagcaattctcctgccgcagcctccccagtagctgggattacaggctcctaccaccacgcctggctaattttttgtatttttagtagagatggggttttgccatgttagccaagctagtctcaaactcctgacctcaagtgatccacctgcctcggcctcccaaagtgctgggattacaggcgtgagccaccgcgcccagctgtccttttaaataaatagtatttcattgtatcgacaggccacagcttatgtatgcagtctactgtgatggaccacatgggttgttttcagtttggggctgttgctcttgaacctgtgtcccagcacacatggcatgagctgtctctggggcacatactggctgtaaagcaagcatacagccttgccccaaccccacactgggcattgtcggtctttgtcgttttcactcacctggtgggtgggtaatggtttcttgctgtggtttgaatttgcatctccccgatgaggttggggatcttttgtttgtccattggctgtttggatttcatcattggtggagtgcctgttcatgcctttcacccatcttgggctgtctttttatttctttacgatttggaggcttctttgggtgctacagattctaatccttcgtcagttatccacattgtagacctcttctccctccctcctgcctgcctttttcactctttacagggtgttgggataaacttctcaatttcagaattcttaattcaagtagtcaactttctcactttattaacatttttcgtgttttgagaaactcattcctaccctgtaatcatgaagattctcgttattcacctttcacattaggtctttaatccacctggaatagattttcatctacggtctctctctctctctctgacacatgcacatgtgtgcacatgcacggccccaggtgcacacatatacccattcccaggtggcccggcaccatttggtgagaaccgtgttcttttccctacctgcactgcccccagcacgtaccatacctctcgctacaaggcaggcagtggcccaactgcaggctgtgggctgggaggtggtagggacagggcgagggcaaggcggacagccctccccgcccccagcaggaccagctgctgctcctgccaaacaggtctgtggggctgcagtgtcacgtgtctggctggcgctgactcgggagctggcggattaagcaggggctcagggtttatgacccgcactggccgcagcaccagatgggggacggctgagggagctcatctgtgtgggcagcagaggaggcctgagaagccagccaggctgcggctgtttgtggcaggaggcccccacccacagcactggaccaaggtaagggaagggtgggatgggccagccccactattagtatctctagctggaaaataaaatgtcccctcccaagctccttctatcttggtctgttggggcagctgagatctgggagatgccacagcccacagcaa

SEQ ID NO: 29030 - DNA, 2300 bp, Homo sapien
agctgagtttgggatgggcaggaggtcctgggcagagcagagcagagccgccacttctctggctctgggcactgcctggagcacacataaattcccttatggctgctttcccctttcacccgtgggcctcaccattgcctcagccctgccagcctcacctccctctcctcggttcccatctctgctagtgactgccgccccctctccctgcatcgagtcttcgttcaggggatgaagacctactctgtgcctgacactgtgccaggtgctaactatccattcccacatccagccagctagcgcccaccctgtgaggagcactgtcccacagcacagaggaggacctgagtccaaggctttgcgttactggtttcctcaccggagttgtgggtgaggctcttcttggcaagcaccacagggcagcacttgtcgccgagagctcagagcccagcagcaaggcggcatgggcatgagccactctgacacatgggaagaggctttcttccgctgatcagcaagtagtttgctgagcacctattgtttgctgccccgggctagaccctggggatacagcagtgagtgaggtggacactcaggcctcctggagcagatagatgttcaggtgagagagaaatgataaagagaaaataaacaaatgaagatgccttcaggcaaagatcggtgccaagaaaataaaacagggagggatgacagagtgatcggggagagggagccacatggcctggggaggtcaagaagggcctctcccagtggccgtcagtggatgaatagataaacacaatgtggtctgtccatagtgtggaatattattcagccacaaaaagaaatgaagttctggcacgtgttacagcacaggtgaaccttgaggacatcatgctaagtgaaagaagccagacggaagaccacagagcgtatggtcccgtttctaggaaatgtccagaacaggcaaatctatagagacgggaggtaggtttgccgtgatccagggctggggaggggttctttttgagtgatgaaaatatgctaaacatagatagtggtgacagttgcacccctctgggaatatactattaataaaatcattgaactatacattttaaatgggtgagttgtatggtgtgtgaattatatcttaataagactgtttgaaaagaaaacaaagactcgtctgcagtggtggccttgcgttgagagtgacagggtggagtgagtttgtgaggaccttggggaagagcaggcagagagagcagctggtgtaaggaccctgaggtctgtgtgcacctgcaggaggagcacagaggaggaggctggcaggagtcgagagggcgggaggagcagtccccgtggtggcagggccagatcctggagagggcttgaaagttgactggggcgggagagccacggctgggtaacattgctgtgctttctgttttaaaaccgtcacccgggctgctgtgaggaaatgagactgtggagagggagtggtggggcgttgggggcagggaaggccggttgagatgtggcggccggccactgtttagatgagagatgacaattgagacccaaagaaggagacagacagactggctggcggttgcagtgggaattcagacagggacagagcactcctggcggagaggaggcttcctggaggaggggcctgggcccggacactggcaatgtcaggatgggctggtggcggctctccagatggcacccctgtgggggatgtggggggccctgcctggccatggggagacgagactggccaccctaccctggcaccacccctgggtcccctttgggcccaagctgctaagtaagtagggcaccctctctccagggacccctgtcacactactttatgctgctggctccagctggccctccgtgacagtgcagtgcccatgtggccagagacccagaaggggcccggcactctgaacaaagcagtctgcctggaacttaagtggccctgaaacacgatcaggcaccagagactgtccagggaggtgggtgtattatttattgactggggcctgcccagtgaagccatttgggtttgccagacctggaaggagccccctcagcagtgcctgggggccttttggagggcaggtgggcgggggccccagggtgcctggcaccctctcccctgggtgtggtttcctggatgccgactgagcagggaggaagtcagacgtcaggacctgctgtggggatggacccacagctcatcccccggggccgcagaggcaggccaggcactggggttccag

SEQ ID NO: 29031 - DNA, 2300 bp, Homo sapien
ctgatgaaagaaactgccctcatagtctctccctccctgctggctgacccacggcaggcactgctctgggaagagtgagacgccacactttgctcggaaccattggatttctgaattacttttccgtgggtgactgatgaagcctcagacaactgacggcacgtggtcctgaggtccgtggggccaagattgggccttttttcctcccaggagcatgaggagccacagactcttagatctcctggcattgtatccaggcccactcccactgctgccatctacaaaaacagctctgttttgttttccaaagggatggtgcagcctctctgagctaccgcgtcctggatggacccgaaaaggttccagttgtgcatgttgatgagaaaggctttctagcatcagggtctatgatcgggacatccaccatcgaagtgattgcacaagagccctttggggccaaccaaaccatcattgttgctgtaaaggtagggttgcattctcctcctttttggagtaatgaaagcaatagcactgaggtaatatgcctctcaggtgtaaaagtgaatacgttcaccttccagctaagaaactgtagacaggcatttagagtaactcaggggcaaaggtcctaggtagataaaaagctacagcatcttctggtcatcagagccgaagatccttgggaaatcattgattccaagaacttcatttcatagatgaggcccagcaaggtccatgattggcgtaaggttacagagctgggactggcaccacagcttcctgactggagtgcgggtgctccacccactgtgcctggccactgatgttatcaccacccatggtggagctcctgttctgggccagcccagtgtctggaacatggtctgttcttaagagcattgaatgttgtgctcagtacctgccatacaagtcgtgacatccagtacgtgacatccactgtggttttgagaatgaggtggcccattttccagacaaggagactgaggctcagagtgagagtgacttgcttaagcttgcatgggggttgagtgatggggtctgtctggtttgggccgtgtccttctgccatatcatggcactgccctctgccgttctgtgttccttacggatgggaccttctccatcagcatccctgggtcaggtcctggggttttgctgaatggaattttctttccatgtctcatcatcaccacttgctgaaccctggatgacagaagacacacactcacttaaatctttagactctgcctgggtcacagacctctttcattaattcacatcattttgtttcaaaatgggtgcctggcagcaaatcccccgctctagtttttggtgagtgaaagtgactgactgctcatcctatttcaacaaatatgtactgagcactagctgtataccagacactgcaccactgaactttgttaaagaaattcagacctttggagcactagcttttgagcgaggatagattttcacctggactcagagaaacaagggctgctgtttatggagctcgggttcttgggctccagaaatccccatttccctccttcccctggtggcctgcagggcatgctgtggcctgcttagcgctgcccctgcgatcgaggaggatttcgtttctttaaatgccccaagagccaggttctctgaagaaactggacatttgcagcccagggggccctcttgcaatgtaaatagtgatctcatttattcaagtcatggattgggacactcctgggtgggttttctcatagagaggccagtctgctgtgttgggaagtaagaaccttgtcactaggttgggacactctggggagtgtggcctttactcctctcaggacccctaagtccagccctgcattgttcctgaggtggatcctgctgggggcaggtgtcccctccttgggaggtgggttttcctggaggccagtccctggcactgaatcctcatcatacctgtatgttgtcccttaggtatcccctgtttcctacctgagggtttccatgagccctgtcctgcacacccagaacaaggaggccctggtggccgtgcctttgggaatgaccgtgaccttcactgtccacttccacgacaactctggagatgtcttccatgctcacagttcggtcctcaactttgccactaacaggtaggatgtgggcaagggtcatttctcctatgaagtcctgtctggtacctggtagagacaactggggataacacagaaagtctgctgctgttgaaggaagatgtgtattacttcagtttccaagag

SEQ ID NO: 29032 - DNA, 2300 bp, Homo sapien
catcatagatgtcgccagaaaataatggacctcaaacacggagtagctgtgtgatccatcagtgctcaggttcctgagccaccagccagccattcaggtgtgactctggcaatttacagcctcattagggaacttttgtttttcttttttttgagacacagtctcgctctgttgcccaggctggagtgcagtggcgcaatctcggctcactgcaacctccacctcccaggttcaagtgattctcctgcctcagcctcctgagtagctgggattacaggcatgcgccaccacacccagctaatttttgtatttttagtagagacagggtttcaccatattggtcaggctggtctcaaactcctgacctcgtgatccgcccacctcggcctcccaaagtgctgggattacaggcgtgagccaccatgcctggccagtcattagggaactttgagaaagatatattcctgcaatgcagcctggatgcaggatcaaggtaattttatactctccaacttcagaggctacccaagatgtgtttgcagattaaattattggtgaggagagacaccagaatggaattgactgatcagaatgacaaggtagagccaggctcagcctgaccctggccctctgagcaggtcctctagcgtgtggctcactcactgtgggtgggcaccagttgcatgggactgattaggggcttgaatggggctgtccccagattgagacaccagagattggccacactgagtcaggggaggtccttgggctctacaatcaggccagctgagttccacccctaaacctgtgtgaccttggacaagtcattcaacatttaacgtccctggacctcagcctccctgtttgtaatatggggcttatgttgttgcctcaaatgggccagttagcttgcacatgtgcttggccagtgtcaatttccttccctggaggagcattggttttccagccaggattgcatctgggggagccatggagcacctaggataggtccctacagcccctgcccaaactcccggcttctatattatgaataatgatgagacctttgcatgcctgctgatggtgctggcctactcagagcagggtgtggattaagaatttgtagcctgcttgaatcaagtgttctcttggggcaagagagctagaaggagttgggaggagccctcatggtgcaggtggggtgttttgtgactgtatcggtcaggcaggcggggcctggccaggctgccatggcaaacaagcccacatcccgtagcttcacatggcacaagctcacctcttgcccatgctgcatgagcctctctagttggctgggagacctgctttgtgtcattgtgatcttcattccaagacatgggctgtggagcagccaccatgttgatcatggcaggtgccactgtggagagaaagggaatgtggcaggtcgggatctggcagtgaagcttccccctagtcccatttcactggccagaacaagtgcctcagtcacttctaaccagaggatgagagaagggtagttcttcctgcaggatccccctctccccgaatggaaaactagccctgtttgtgaatgatgctcatggctgcccactttcctacccgaatgtaggaaggctctaaaatgaccttgcagtccccatatttaaatccctcagttgtgctttgtgtgtcatagctggagaaactgaggctcagggagttcataacttgcctgggcactgagaggtggagctggggctgagtccaagttgtggggtcagagacacttggcctctgctttatggcccagcccacactgcccccatgctatgtggccagagaagggagggatagcccacaggaaagaggcttgattcagctggtttctaaggggagagtccgctcggggagcgagagatcaccccagagtggtgggaatccaggatttggacctgcagcctggcgctcccattgcgaacctccttggatgagctcctttccctgactgggcttgtgcttccttcacgtggggatgaccccttccaccttcctgggacatttaaggattaggcgagtattccactttcaaaggagctgtacaaacccagtagctctgggacatcttaggcgttgaaatctgcattcctgtgaaaccactagtggggccatcctagaggcaccgacatgtgcctgggtgggggatggcaatcatttgggaaggtgagggcagaggggaaggagagcagcctgcccacagtagtaggtcaggatggtggttcccagcttcagcactgttgacg

SEQ ID NO: 29033 - DNA, 2300 bp, Homo sapien
ctgacagcatcggcctggctctctttgccccccattcctcccggaattatcagcaacactggatccttgtgacctgtcaggccttgggtgagcaggtgagtgggcagctgctccagaccctccttgccctaaggcaggggtggaaaatgactctctcagtattgttttatttactccttggagtaacgctgagagacagccactcctattgtacccattttacagacaggcaaactgaggcgtggtgaggtggaatgtgactcaatgaacgccaggcaggtgtggcaatagggacctcccgctatgccagctttcatagagtaggccagttgggtggcttgccacctccatgggcttcagcatcccccactaaccaaaccagagctggaggctttgagttcgggggtcacaagtccaatgtctccagggtcgtaaatgaatgaggctgtagacccaggtttgacacatcttgttggttcttgaggataacctggaaatcacaatatttttttttgtataggtaatctcttaagttttttaatgctgaaaaccaaaagctgaggaggctgaggggaccagacaaaacacatgtgtgacctgaatccccacatgctggctggagggcttcttgctgttcaggcgccttggggcctgacactccttccccggggagggtgagctgagagcttgtggggcttctggtgggcatctactgctctgtttccaaggcaggaagcccaaagcaaaaggggtattcggcgggaatcaggaagatgggagagagcccatttctttgggacgtgaagggtatttcctgcatgtgtgcagggcaaagaatgtcagttggcaataaaacgcacatgcatgcctcccacggtgcccttatggtatcagccatgccacagctgccctggtatggccagaaaagatgcctggtgataggttccactcaccagtggggtggttttagaaaaacaataaaacaacaagaacaataacagcatcataataaataatacaataagaagaataaaattcctcatgaattaagttggatatatttcttatccctggcatgaccccaccatccctgtcccctctcagggctgtaagaatgtgacctccaattggggttacctctagggccctcccaatccattgctctgtggctccctcacatgcggcaccaggtgcagacagaaagcctgtgtggagtcacggaggacactgcccttggtcctgccttatggtcaggaggggtaggggctcgtgtcctccatcaagtgcatgttatctgaggaggctgagggtgctacctcaagatgggccctgagccatggtgctccaaaaaagaggaggccagatatgacttctgaggtcccagctctccaggcagacaggtttccctcttttcttgcaccatggatttccctctctgcagcagcccctggagctgcagagcatgagcaggcggagggcaggccctgcctccaggctgcagctcctcctgggcgttgtcctgcagagctcctatctgattcgcttgccctgtcatcattctgcagcatgcacttcccacgtctgttcctcgttccatgggtgttttcacctccatatggactcctcattgaagcatccttgaacttgtgaattttctaatgcaaccgtggggttttcccagggtcctgggaaaccatgaagcctcaccgggtctacctcttccctgggataggagcagcccatagggcacatgggctcccatctgagagtctcttaggtgttgagaaagtgcattcccacctgtgtgccactgggcctttgttaagaccctgtggcatgggtatcgtcatcactcccatcctatagaggagaaaactgagtcagagggagctggggtggggtgtggcatagctcagagaggagtgagaactcaagcttgggggtctgactgttcactgtgccctaccaggtcatcgccctgtcggtggggaacaagcccagcctcaccaacccctttcctgcggtggagcctgccgtggtgaagttcgtctgcgccccaccgtccaggctcaccctcgcgcctgtctacaccagcccccagctggacatgtcctgtccgctgctgcagcagaacaagcaggtggtgagtgtgggctatgctcgggaggaggtgagggtgccacccgcttgggcaggaggacattggtggcctcgcccatggtcccgagcattgcaacggacatagctccacgctgcacttccttcgtctcaacaactggccctgtgaggacgctggtttc

SEQ ID NO: 29034 - DNA, 2300 bp, Homo sapien
ggtgtcctggcagagggaattgcttaggcaatggtgtggaagtgaaaaagtacactgggcatcccaggggacagcaagagtgctgtggtatcctgtgttgcaggggactgagaacctgggagggcagggatgactcatatggcaagagtgctcagtgacaggcttcagagtgtagacctgctgagatgagtccagggttggtcctggcgaggtcagctcaggactgagagttcaaagcagagaactgttgtggattcagagcgtagacctgccgagggttcagagcgtaggcctgctgtgtgttgaggacagagttgctggattctgagtgtagacccactgaggacgggaatgagtttgaaagagccttgatcagacagagtgggatgagtccagggttggtcctggcgaggtcagctcaggacttagggctgaaggtggcattagacttctgctcctcagcagaaggaggaggccagggccatagttgtggggcctccaggtgggtggtgtagggcctgcaggtgggtggtgtggggcctgcaggtgggtggtgtggggcctccaggtaagtggtgtggggcctgcaggtgggtggtgtggggcctgcaggtgggtggtgtggggcctccaggtaagtggtgtggggcctgcaggtgggtggagtggggcctccaggtaagtggtgtggggcctgcaggtgggtggagtggggcctccaggtaagtggtgtggggcctgcaggtgggtggtgtggggcctgcaggtgggtggagtggggcttctcgtgtggatgctgagggcccctgtgctgagggtggtggtcccatcctcctccaccctgctgcccctgaggcctgagtgctcaggctccctctgcctgttttagggttcactgttcaccctggtgacaggtgggtgctggagaccggccgcctgtatgaaatcaccatcgaagtttttgacaagttcagcaacaaggtctatgtatctgacgtgagtgcctgttcaggtcctggctggggggatgaggtggggtcgttgtctgacgcggctgctgaagagcagcccccaaagcaacaggagcccccatgcaggctgaccgaggaggggtcctgtttctagtggcgctcccgggtctgtgggaaacagtgctgaggcatcccggggcatctccagagcctgtgagcctgcacaccggcctagctgcagagcccctgttgggctggagggcagaggttgccacagcggcagggctccaggataggaggatagggaggaggtctctgcccgccactctcccgcccccttttccccaagctggggacctcagagaatccattctcctcctgccctgcagagagtcacggagcacgtcctggctttctccgtactgggttccagaaatacctggaaccctgcatgacagaggccgagctcagcacactttctggttctggaagggggtgtcagacagatgaggaaatgtgcaggagtcttggctgcctctctgtcccctgtgagaaattccaggctcgtcagtgagcacccccaggcccttcaggtggcgttggaggttttagaagaaaaaggcgaggttcctctcggtgtccttgaagatgtcgttgctttgctcatgttatcaaacaagggctgggatggtcaccatttgcagttagctgtaggggacgtgatgtccttttttttgtatttactggttccttcttgagacctcggtaggctccaagctgccccaggtgccacacggggggatgaaatcgaagcgcaggtcatcaggccatgcagggagggtggcctcggtggggacaaaggccatagtgatcagacctctgttccagggcccagcccacccgtctgctgctagtggaggctgctgagccccagggggccccttggcctggcctggctgctggtttcagtcctgtagcttcgtgcccaaattctgactttctggagtcaccccagaagcacctctctcctgtcctgcctcaccttccagaacatccgaattgaaactgtgcttcctgctgagttcttcgaggtgctctcgtcctcccagaatgggtcataccatcgcatcagggcactaaagaggggacagacggccattgacgcggccctcacctctgtggtggaccaggcaagttggtgtctcccctgcgtcgtgccttgtcctatgaagccaccctctgtaggcagaaatgtcagcccaggagggccatgagtcccagggagttgggccacctgcatcccttttcctgtttgggctacttgcatcc

SEQ ID NO: 29035 - DNA, 2300 bp, Homo sapien
ttccatcccagggactcctcatgttgaccttttatagccacatcacttcctatgccacgccgcccctgaccccacaatcactcacctgctctatacttctataattttgccaactcaataatcttgtataaaagcaagtttacagtatgtaaccttttgtgcttttgtagtgtttgttttccagtccgtataattccctggagcttcatccaagatggatgtattagcagttcatttctttttttgctgaataatattccatggcatagatgtgccacagtatttaatcatcacccatgaaggacctctgtgctgtttccagtttgggcctatttgataaagctgctatgaatgttttatgtacaggtgattgtgggaacatcacttttcatttctctaggatatatgtccaagagtgagatttacctgcctcgcaagacatatgtatatgtatgtatatgtgccatatttcatatatacatatgtgtgtgcatgtatgtgtatgtgtgtgcatgtgtgccatgttttatatatatatatgcttgtttatgcataaaatttctctggatgtatactcaagtgggaaacactcattgcctgtagggaagggtattgggtgatggggagggagaggaatcactttcacttggaacccttttgagcctaagtttcaaccatctgtctggattacctgttggaaaacaaatcaatcttgtgcaacccagaagacacccacagacttcctcacaaataccctctgaggctgccttttccgcgcaagtctgttttttgtttcttcaaagggagcccgttggaattcccctcccagagcacctggttccacacagggccgaccctcacccccttagttctggttatctccagagatttcccccaacacacacattccctggtctagggccctcaggcttcgagggtgaccccaaacaccccgcatcaccatccaaaagccccatgatccctgaggggcaggctcagcctatgcgggcctcgctgaagcccagtgcggtgtctatgcccaacccaggggccgccgcctccaaaaagccttcctagccttactgacatttatcctctccttcctggtcacccagtggcatcgttgtgtgtcttcctggttacagtcagcatccacttcctgcactcctcagacagccggccagtgcaccctcaccccaccctttcctgacctcccgctaggctgggccttctctgcaaggctagattcatattttagcggcaccaagcagtcaggtgcctgctgacgcatgccttcatgcaattcacgacagacagctaaaagccacagagcacagcgcggaatctaaggccttccattggtgtgcaggtggattccgcggtgctaaactttcttttgtgggtgtgggggccgtggagggggttgtgctctggcagcgttggcgccctaaatgacctataggtaacctctaatggcttccgcagggggtgcagtgcggaggacaagagcttggggctctctggctgagtgatctgggggccattcaaccggttttttcctggagaaatgggaatcttaaggcctctctggaaagggtgtgagggggtcgagggggagcgggccccgggccttcagcgcttcagcaggtggcttccctttgcgagcccggggtccctcttctgggaagcatgggctgggacaaggcaggcgccggttttctgcatcccaaatgtcctggggcatgtgtcccttccttgctgaccgtgggtccgggccagagcgcaaggtccaaagccggcggcttggctccaccgccaggggcaaataccagggcgggatgcgtgctgcggggcgccccgggggctcccccttgggacttctagggtccaggggtccccgcgggcgcgccccaagccttctccctcagctccgggggcccgggcgcgcgcccatcccccagccccgcgtccctgcgcgagggccgggctgggggtggggtcgccgcgagctcggcccccagagttcccgcgctcaggcccaggaagcggcggccgccgacggccctcgccccgcccccgcgctcatcacctgctggcctggcgcgcgcgcgggcgggagcggagggcaacggggcggcgcgggcggccgggcgcagggtcgcgggaggtgacgcgcggcgaggatggcggcgcggggccgggggctgctgctgctgacgctgtcggtgctgttggcggcgggcccctccgccgctgcggccaagctcaacatccccaaagtgctgctgcccttcacgcgg

SEQ ID NO: 29036 - DNA, 2300 bp, Homo sapien
ttggcctcccaaagtgctgggattacaggcgtgagccaccgcgcccagccgtgcctgtatttttcaaaagaagtgttatatttgggactttcttatttgttttaagttgaaatatatttcaatattgcatgaaaggggaaaaacagttaagtatacaatgttcaataagtcagtgtcttgtttcattaaatgccatttaaaaataaaatacatatggttaaaaagtgaaaaaatgtatttcttcaaaggggccttccctgaccactgtccaaatcagggaccccattattctctctctcacagtctcagcctatgcctttcacagcagttaccacattttgtaatcacaattttccttcctaggttaaggcttgtctctcccactaaactattagcttgacaaaggctttctgaactcatctgctctgtgcagctgtgtccccagtgctgtgtcttagtgagcagacacactaggatactgcaacaaagaggcccccaaacacagcagcgtgcataacacttatttcttccccacgtgataatgcggccggttggcccaggctttcatggtggtttgaaggtgttcacaagctccagggcctccgcagaccacttaactctttagctaccaggacacaattttaaaaacccttggccaggcattgtgactcatgcctgtaatcccaacactttggaaggccaaggtgggaggatcgcttgagcccaggagttagacaccagccttagcaatatagtgaggctgtgtctcttaaaaaataatttaaaaattaaaaaaatttaaaaacccacttattcagaccaatcccactctctttggcctcagcttcaggtccaggctgcccagatcctcattctcccaaccagaggatcatctgtgtggcttcccaaactacagagcaagttccctgaggggaagtcggtctctcacaaatgccacagggccactgcatgcactctgtcactttataaaatagtacttattccttctgtggtttacatctgcccacatccctgacctttgagtgagttacttcaccattctgtgcctcaatttctttatctataaaatggggatgacaatagtttgcctcctaggactgtcagaagagttcgacaagcaaaaagcatttggacttcaacttagcacatgacagatggtctctgaataataatcaacattattgtctcttgattccctggacttgcccatgaaatccagagaatgaagtgcaaccagaacttcattttcttccttttttttttttttgagatggagtctcactcttgtcgcccaggctggattgcaatggcgcggcctcaccgcaacctcccctccccggttcaagcgattctcctgccccagcctcccgagtagctgggattacaggcgcccttcatcacgcccagctaattttttgtatttttagtagagacggggtttcaccatgttggtcaggatggtctcgaactcctgacctcaggtgattcacccgcctcggcctcccaaagtgctgggattacaggcgtgagccaccgcacccggcccagtacttcattttcagatgcagacatgaaggaccagaaggctgaagcaacctgcccaaagccactatgctggcgggtggccgagtttgggtttaatccaggcccgaacctcagttccctcaagataaagttggggtgattatggcacctttctcaggattaggttgtgaggctcagatgccatcatgcaatcatggcaggcacacgggggcccctcttcaaacgtctgtgcgcttcccttgtgccccgccctggcacacagccgcccccgcggagcccagggatcccagcccggcagtcctccgtcagctgcttctgtttggatggcggggacggctgggccgacagagaggcccattgtctccgtcctctggggctctattgttggggcctcctcctgggttgcagccccacggacaaccccagctgtcgcttgggcctggctcagcttaccccggcggtgagggtgcgggtcggggacggagacgcgtgcaccctgaagacagtaactaggcctgctctacagagggaaacgcaggctctgagagcctacatgtcttcgccgggagtgcttgtcccggagctgctcgcagactgggccgggggtgggctcgggtcggagaggtcacggggctccttaggtcacaggcggcagggccagagaaactcccccgcccctacgtttaactcgcggaaacaagggcccagagagcccagacgccagcccaaggtca

SEQ ID NO: 29037 - DNA, 2300 bp, Homo sapien
ctccgcagaccacttaactctttagctaccaggacacaattttaaaaacccttggccaggcattgtgactcatgcctgtaatcccaacactttggaaggccaaggtgggaggatcgcttgagcccaggagttagacaccagccttagcaatatagtgaggctgtgtctcttaaaaaataatttaaaaattaaaaaaatttaaaaacccacttattcagaccaatcccactctctttggcctcagcttcaggtccaggctgcccagatcctcattctcccaaccagaggatcatctgtgtggcttcccaaactacagagcaagttccctgaggggaagtcggtctctcacaaatgccacagggccactgcatgcactctgtcactttataaaatagtacttattccttctgtggtttacatctgcccacatccctgacctttgagtgagttacttcaccattctgtgcctcaatttctttatctataaaatggggatgacaatagtttgcctcctaggactgtcagaagagttcgacaagcaaaaagcatttggacttcaacttagcacatgacagatggtctctgaataataatcaacattattgtctcttgattccctggacttgcccatgaaatccagagaatgaagtgcaaccagaacttcattttcttccttttttttttttttgagatggagtctcactcttgtcgcccaggctggattgcaatggcgcggcctcaccgcaacctcccctccccggttcaagcgattctcctgccccagcctcccgagtagctgggattacaggcgcccttcatcacgcccagctaattttttgtatttttagtagagacggggtttcaccatgttggtcaggatggtctcgaactcctgacctcaggtgattcacccgcctcggcctcccaaagtgctgggattacaggcgtgagccaccgcacccggcccagtacttcattttcagatgcagacatgaaggaccagaaggctgaagcaacctgcccaaagccactatgctggcgggtggccgagtttgggtttaatccaggcccgaacctcagttccctcaagataaagttggggtgattatggcacctttctcaggattaggttgtgaggctcagatgccatcatgcaatcatggcaggcacacgggggcccctcttcaaacgtctgtgcgcttcccttgtgccccgccctggcacacagccgcccccgcggagcccagggatcccagcccggcagtcctccgtcagctgcttctgtttggatggcggggacggctgggccgacagagaggcccattgtctccgtcctctggggctctattgttggggcctcctcctgggttgcagccccacggacaaccccagctgtcgcttgggcctggctcagcttaccccggcggtgagggtgcgggtcggggacggagacgcgtgcaccctgaagacagtaactaggcctgctctacagagggaaacgcaggctctgagagcctacatgtcttcgccgggagtgcttgtcccggagctgctcgcagactgggccgggggtgggctcgggtcggagaggtcacggggctccttaggtcacaggcggcagggccagagaaactcccccgcccctacgtttaactcgcggaaacaagggcccagagagcccagacgccagcccaaggtcacacagcgaagccccggcacagcccgccgggaacctgtcgtttctaacccccagcctctcgccgtttctacccagcttgggaagcgcaggaacaggacatacggtggtcgcgccccttccgcgaggccggggtgaaacccgcttggccctcccgccagggggcggagcttccgaaccaggcgggattccaccgggtatttgcctgcggaggcgggacttcgggcttgatgggcgttgggggtggccttcctgcgggcaggctctctgtgtcgcaacactggcggggcgggccaaatcggccagagctctgcccccagaggacgcggctaagcccgggggcgtgtcctgggctggccccacccgcgccccgccccgccccgcccggtcgcggagctgcggccagctttgggagggccggccccgggatgtgagtgccgcggggcgagggcgggggtgggctcccaggggtcccggtgggcgggcgcgctagggcgagggcggggacggccgggcgggcgcgccaggtaagggcccagatttgctggtgaggggtgagggacgctcgggacgggtgtttccaggccctcccggcgcgccaggc

SEQ ID NO: 29038 - DNA, 2300 bp, Homo sapien
atcttgtggaaggcgggccaggccttgggctccctgggctgcagagtgagctgcatctggctcagtgcctctcctcccaggcctggggaagggagcctcattagcagctgcccagggtctctatcaccccaggccactgcccctccttcccccacaggaggaaggattcaatctgtcatttactcatcagatatttactgagcactcccttgggtcaagtcccatccaaagtacagataatccctgacttacgatggttcgatttaggattttttgaatttaggatgttgagaaagtggtacacacccaggagaaaccctacttggaatccccaggcaatcattctgtttttcactttctgtgcagtattcaatgagttacatgagatattcaatgcttcattataaaataggctttgtattagatgattttgcccacccgtaggctagtaatggaagtgttctgagcacatttaaggtaggcttggctgagctatgatgttctgtaggttaggtggatgaaatgcattttcaacttactatattttcgatttacgatgggtttatggggacatgatcccattataatcgaggagcatctgtactttcggtttggctcatttcggttcatttgatctttccaataacattataagataggctttgatgtcgttatgttcattttacagttgaggaaataaagcccagagaggtgaagtaacttgcccaaggtcacacagctggtgtgtggtgactttcttaatgaccaggtgatcctacctatagtcatttataaatgaataagagaaatcagccagtgacaagtactgtaataacagtgcggccgagtcccagggtggagagtggtagttgctacctctgctggggtctcagggagggcttctctgggggtggtgggatttcagctgcatcttaatgcagggatgagtcagccacggtggatctggggaagagcatcccaggcagagggaacagcaatggcaaaggccctgagggaacagcaagcacagagctccaatggggaaacgggcccagagggaaggcacctgcctggggttagacacaagttggggcaggccaggcacaggctgccagctcaggctttggcccctccatccgctcctggcttctctgtgggtggccccatctaagccaatgggcccttcctggctccacctcctctctgctgtgcggccctgggcaggcagctgccctgccctgtgcctttgctcttggctgcctcacccctgtcctgggctgcagggagacccctgggggtgggggcaggcacactttgggcccatggctgctgctcagatgtgaggtggtgaccaccaggccatacgtctctggacagggatgggagagactcagagagacacagagaccaagagataaagtcagagggagatgcagagaccaagagggacaaaccaagggagacagagagatgacattagatcagagatggagaccccgaaagagacccagaaagggatcggtgtgggctgggggaagagacaccccgggggtcacacagtggtcacaggcatcagagctgggctgaggaaaaggacaaactgaacctgttccaaagctgggggctcagtaccgtctgcccaggcacatgcagcagcagtggggctgcaggcaggcccccagggtaggaagcaaggcgggtgggaggcagggcctggcctctgggcagttttgtagccgggcccctcaggccctcacaatgtgcccaaggctgctgggcccatcttccaggggtgatcactgaggctcaggctggctgaggtggccggaccccaacccctggccctgccctgtgggcagcagtgccaggtctggcactcagaggttaggccgggcgcagggagggtgcgggctccgcagcgagcgcgccgggcggcctctaggagccgggtcagcgagtctgggctctgagcgagcggcgccggcccggccccctctccggcgggcggccgagaccccgccccggaggcggaggcggagtcaggggagggggccgggggccggctggtcccgcctctcgcgcctccgccccgccccgcgcgcacacagccaggggccgcccgggctctcgacgcgccgacggccgggcggacggacggacggacgccgagcgcagtgccccgcggtgagtgcacgcggcccctcccgcccggactcatccccgtcggtccgcgcctcgcagctcaggactcgggggcgctcggacgcaccgacggctcggcggaccctcggacgcgcctc

SEQ ID NO: 29039 - DNA, 2300 bp, Homo sapien
ccaggggtcaagtgtgtattcaacataaaacttccgtgaatttcctggatgagcttaaacttcccttgctgccactgctgctgttttcgtatctcttgccctgtcttagcatcttaggttgggttccttagaagcagagcctgagttggggggtcttgtgcatgtgttggttcatttggggagacctctcaggagaaactctgaggagtgagggatgagaggtggacaaagctgtggcccacgtgaggtctgaccctgtgggagctctagagtgtgagtggcccccatagaactggctgctttgagagtgggggctgagctctggccccatgttaacctgttatgggctgggctcctcccagcccccatagggaggactccacctcgcagacagttcaccaaagacagttgtgttgtgagctgttagcgaccagcatgcacagcagcaggggtggatgagtttgcctgcccagtaaaggagacctggacaggcccctgcatatctgctggacttggtgacttatgaatggtgactctgcctcatgttgctatccacaggctccaccaaggacctgatcgagacttgctgcgcagccggacagcagtgggccattgacaatgacgagtgcctggagatccctgagagtggcactgaggacaacgtctgcaggtagggtgggctccctggagcaggcggagctgcccatttgccttctccagaaccctgcttgcctaggaccccaggctccaggcagcccggagagagtgcaccttcacatgcctctggggcatgagggtgattgggtgtggctgccgtgcgccatctggccaggctttctccaggggtggaaagtccaagactggtcctaggaacaaaccagccacataaattggtagctggcctagtgagcaagatccgaggaatgtacaatttgaaacaagttttaaaggagtgctgtcccctaggaatagtcgggtgctcccctcaccacattctgcagttgctgccgcactcatgccactcaggctttctctcctctgccctcttcctttctctgctttgctacccttgggtcttcaggaggctggcctctcactgtgctcccttgctgctgtgctggttgtttcttctgactctgataccacagcaaagcaatcctttatccccatgccttcccttttccaggcccaggagagctcttggtcagctgctcatgctttgtttttttccagggaccccgtctaacctactcatttttccaaataagaaagattaagttcagagaggcagtgtgattcactcaaaactacacagctcactggcagcatggctgggattagaccccatgtttcccaatgtccagaccactctgcttcctataaaaaaaatttatgttctaaccttgtctttcccttcagccattctaccaatatggggcaacttaggagttagagcatgcagcactgggacccctggagtttggggctaagcggtcctagtgcatgcttgcatccgtcttgtggacgtgtcccacttcagggggtgctgagccctgtcccccgtaatccccgccgccctgtcctggctctggtctctgcagctgatttgtcagccacctctgccccaggcagcccaacagtgactggcaggcagtgaccagggacccggaggctgtgctcctccaggctgacctgccagccttttctgggattaggtctctctgtcctccccgaccgttgtgggggtggggactctgatgccaacccctctctctcagaggtcatgaacacacatctccgagtctagtgggacccaggcctgcatctgcatggttaagccaagaaatgaaacccatgcaacccagtggaggttgtgccggctctgccacctgcaccggctcccttgctgtggaccttgggcagagcttccctcctctgagcctcactcactttccactctgggaggatgaggtgggcgactgggggctaagttaccccctctgtttcaggacagcccagaggcactgctgtgtctcctacttgcaggagaagagctgcatggccggcgtcctgggagccaaggagggtgagacctgtggggctgaggacaacgacagctgcggcatctccctgtacaaggcaagcctgacctgtggccttcaaggcagggtggggtggggcggggcgggaggctggcctgggcctgaaggtcctcgtggcccaagaagttaggctgtccttggggctcctcctgggagtgaccctcacgcctggggtggaaggactcttaatctgcgcag

SEQ ID NO: 29040 - DNA, 2300 bp, Homo sapien
ggggagaggatgggatactgagtgaggggtggtccttgagggaatttgggcagagtggccacccctcccttgaacagtaggtctgtccatgatcccaagggctccctggggtctgctcctctgacccattcctaagaccaagggattccaaccacaggaatcttcctgcaaacagatttgtgggctggcttggcctggcctgctctgccatggatggaaccatcgttgatagctaggggctttaatgatggaactgtgggcaaaatgcacccccaagggaatggaggtgactcagttccaccagcatctaccggcagcccctgccgtgtccaggctctgtgctggcaggctctgcgttgctcagatcctgttcccacctacaacctggagggagggctcccagccccatctatagaggtggaaactgaggttcagagagagtgtatgacttgcctagggccacacagggattcaactctgtaagggaaacctcattgctcaggagaatgagaagaaaagccacagactgggagaaaatatttgcaaaggacatagctgataaatgactattatccaaaatctacaaataactcttaacactcaataataggaaaacaacccaattaaaaagtgggcagaagatctaaacagacacctcattcaagaagatacacagatggcaaataagcacctgaaagatgctccacataggtatatcattagggagctgcaagttaaaccaaccatgagatactgccacgcacctactggagtggctcatatccaaagcactaacacaccaaatgctggcgaggatgtggagcaccaggaactcacattcattgctggtgggaatgcaaaatggcacaaccactttggaaaacagtttggctgtttttttttttttttttttttttttttttttttttcagacagggtctttctctgtcacccaggctggagtgcagtgaagcaatcacgattcactgcagcctcaacctaccaggctcatgtgattctcccacctcagcctcttgagtagctgggactacaggcatgcaccaccacgcccaactgatttttgtattttttgtagaggcggggttttgccatgtggcccagccaatctgaagccaatctgaaaaggctacacactgtatgattccaacaatacaacattctggaaaaggcaaaactatgggaacagtaaaaagatctgtggttgccaggggttagggggaagggagcacaggggattacgggtggagtttagagaattttttgggcggtgacactattctgtgtgatacaataatggtggataagggtcgttgtacatttgtccaaacacatggaatgtacagcttcaagaatgagccctcacgtaaaccatgggctgtgggtgacactgatgtggcagtgcaggtccctcatgcacccctctgctggggatgttgatagaggggaggttgtgcacgtgtaggggcagggagtgtgtgggaactctctgtactttctgctcagttttcctgggaacctaaaactgttctaaaaaattaagtctacttaaaaaacaaaacataacagcccactgcgtggccctccccatactcccaaagctcacattctagtggggagtcagacacagaaacagacacaaccatgttggcagtcactgcaatgatgaggcagacacagggggctgtggaaactcaagaggggccattatagtggcatcagggaaggcttcctggaggaggtgttgcctccagtgggttttgacgtgcagcaggaatcacccagccggagatcagggcaggcactgcaggcagcatgctcaaaggcacgaaggagtgaggtggtgggggagcagcggaagttcctagcgcagcgtgggggtgctctgtgcacagataagttgcgggccgcgggaaacaggaccctggggggccccctagagcctcgcggagcggcttgcagaggagcctcggggccacggcgtgtgtgcagcgacacctggcggtggcatgcggaactgcggacggctgcgcaggagcggacagcggagaggcggtactgaccggtgcgaggcggtgctgaccggtgcgggccggtgcgggccagtgcaggccaggcccggccggggcgaggcaggtggccaggtccgaggaccgcgtcgcacagcagctttcaggacctggagagaaatcgaggtgggggtgcgtgaacgtggatgggcagaaataacatcttttgtactctaattggaacatagcatgtcctttaattatgaacgcaat

SEQ ID NO: 29041 - DNA, 2300 bp, Homo sapien
tccatggtggctcagggccccagcactggtgcgccagccaacaaaacaaagactgcattgtcttttatcgcgaagacttgtaatttttgagcatcacttctgctacatcttattggtggaagccatcacaagcccacccagattcacgcaggcagagcacagagaacccacttcttcatgggaggagtgtcaaataattttgtggtcatgttctaagagcaccaccctaacccaaactaccaatgtctcacctggacccctactgtcatctcctctctggtctgcttgatggcgcactttactcacctgtccccattcccacagtgtgttcccttaggacagccacggggagcttttgaacacacaaatcagatcagtcacccccttcttcatccctccaatgtccccagctgaacacaccactgaaatccaagctccttgacgtgcccacacagctttgtggatctgtgtatccccatctcccttcaagctcaggccttctctctctctctattgcagcccaccatctcctccctggggctcatgcccacctctgagcttttgcacctgctggtccccttcctgcagtgctggacccctgatgctgtgtccttcaggcctcacctcaaatgccacctcctcagatctaaaattaaccctccaacacccagtattccctctcccatcaccctgcttaatggtctactatctgcaactctgttcttgttcacttatcatctgtctccttcctggccccaagaagaaagactgttgcctttcttcttccttgtgtccacggtgcccactatcgtggttggcacagaatatggaatatgaatgaatacctgaatggtggctttcgggtgtgtgtgtgtgtgtgtgtgtgtgtaatttagaaaggcaatcttgaaggatagtcaggactgggtgcaggaggttactacagttgggcatactttgtttcccatatggttgtgccactcgctagctggtgactctgggcaaacaccttcacctccttgagcctcagtgtcttcagctgaaacctgagttcagatttgccagacctgggcatagggacagcaggtccagcaggaacaccaagccaggaccacagccactcccagggagctcagtccctggagcccgagaggaacactctccggaggcgcaggcgcagccgctcctagagactgggcaacccccaggtggcaggcgggaccggtccgtgcaaacagggaacaggtacccggaggatggacattcgctggcaaaaacataaactgccgctcggagtcttggcaccacccaatttccagggacggttagactccccctagctcactggatgaggtgtacaccaaagaagggtgttagccccctcgggtcggccagggcactcaaagcattctgttcccgggagcgaggccgaggtgcaccacccgccgcgtccgcctggtgacgccgcgagcgcgctctgagcggccagctgcgcccctcacgctcccgcggctcaggcgccccactgctgttccgcgcggggcaactgggcctcagcccgactcagtctgtcggctaacagcaggatcccagaggaggctgcccaacctgggcaccccctgccgccactctcgaataggtgggagtagggaagaaatacactgagccagtcagcccgtcgctccgcgaaagggggcgccctcccctgaagctggggttggggaactggggtgtgccctgtcagccccagctccctgttccgggctggagggagcagggcagcagaccaaggcactaggcctctcggccgagtctggtccactccacccgagggcagcctctggacgcccactcgccctgcaatctgcaagttagtgacgggtggggggcgagcgggctcctaccgcctccaaccgggctgtgctccccagcctgccacctgcaccccggagcagggagggggcccccgggagcgcgcatggaaaggcgcgagcgcgcgccttgtgcaggcggccctgtcccgcgggcgcaggggcgctgggcgggcgctccggggaggcgggcgggggagggggcgggggagggacgggggaaaggagggaggggcgggggctggaggcagcagcgcccccgcactccccgcgtctcgcacacttgcaccggtcgctcgcgcgcagcccggcgtcgccccacgccgcgctcgctcctccctccctcctcccgctccgtggctcccgtgctcctggcgaggctcaggcgcggagcgcgcggacgggcgcaccgacagacggccccgggga

SEQ ID NO: 29042 - DNA, 2300 bp, Homo sapien
agtggaaagggcttagcaagccttgtccctgttgtcctcccttctcctttgcaagggccgacagcgaagagtaacactggtggtgaactgaattatctgagtctccctcacctgctcccaccctgggagttctaggatattttgcttttattgctaatctcagaaacaagctcaagttttaaaaacatgctttctttttccatcaaacattgaagcaatttatctactcactcatttgtacccacagttaaacacagatatacctgctccatgacctccgtcacctcccttgactccattacctacactacctccatcaactcaatcctttccaccacctcccttgactccatcacctatactacctccatcaacttaatccactccatcacttgtcccacctccatcactcgactgcctctatcacctccaccacctcgctcaactccaccacctccctcaactccaccatctctaccacctccatcacctcccttggctctgtcatctataccacctccatcaactcaatccactccatcacctgttccatgtccaccatctccttcgcctctttcagttccaccatgtctacatcatctatcaattctaccacttccagttcttccaccgaatatactatgtcctccagctgcaccacaacttccacaactacgtcaattaccctttcgacctccaccaccaccacctcgacctctccaccaccactagtttctactaccacctctgcctccttcacctccaacaccacctccaccacctgtttctgctactgccaccttcgccacctctaccacctccaccatcacctccatctccatccctgccacacctccatgcatggacccataaaatatatcaagagcctgtctaagtaacaccaaattcagccacagattttctattcgagtcacaagtatttctccacaaaagactggaggattaagggatctgtggtggcttagaaatggaaaggtctttgaaaggatcaaattcagttcctaattttacagctggagaaatcagatctgcctccagcaccacctctgccaagccaaagccctggacactcctccagcaggccaggccttctcccacctcggtgaagtctttgccccagcaattcctcctactgggaaggcctctcctctggttgaaccctccgcactggggtcctcctctgagctcccacaggcgcctgtgcgttcccatcccagcacgagcctcagagtagcagaactatctgcctgtgtctgtgtggtcaagcagactgggaactcctgggaggtggaggcttggtctgagtcatctatgtagccgagcaccaggcaggtatctgtgaggggctacgcggtgtgtactgagtggatcaggaaaggctcctcattaactgggtctcccttaccaatgtcacctcctcagggaggccttccttgaccacccattctctattccagtggttctcaaacctggagggtttgataaaacacggggtttctgattcagggaggctagggagggccccaagaatgcgtggcgccctctgagagccaccgctcagctccattgccctggtttccctccctcgctttgaaatggtgtctccagcgacttcctcccgtctaagctccatgagggcaataatttggggctgtcttgttctgtgctcagcgcagaggctggcgcggcactgaacgaatgtccagagttaaaaataaagggatagatggtccgctgggtgaaggagccaggaacatcccagaagcccaactcgcttgagctctggtccctcaaacctcacgagcctcctgccgtgcccatggccacggcccctttaaatgtgcgcagggacgccccgaccctcggcttcctggatccctgacccagcaggaaaacaaaaacaaaaacaaaatctttcctcttgtggcgcggaggaaatgtctaggagagaacggaggtgcggatgcggcgcaagcagaggcgcaggcgaaggcgcggcggccagagcgcagggttccggcgcggagccctgagtccggagcggaagcgaagccgcgcgctgccccggccgccgcccacgcgacttccggcggcgccgaggcacgcgcgccataagttggagctcccggggcgcccgggacgagcttcccaggattccccgaccttcccgtgctgctcggccttggccgaagcatgcgcggctccggggtcccctcgccgagaatcggggtcccccccaccgtccaaatcgccccgcctcagggacccgcctcagcctt

SEQ ID NO: 29043 - DNA, 2300 bp, Homo sapien
caagagcacctctttttgcagggagagctgttctcctttttctgagtcagtgaaaagcttagaatcagagcaggcaccaaagttggggctgtgtgcggaggaggaccccgtggttggggctttgtgtggccagcatggacccttgcaagatggagtggcggagggtcccacagcccctgatgtggtggtcctgccgaaggaggaggagaaggaggaggtcattgtggatgacatgctggccaacccctatgtgatgggagtgggcctgctgggaggatgagggggaggaggaggaggaggagttcgtggatgacacactggccaacccctatgtgatgggagtgggcctgccaggaagaggaggggaggaggaggaggaggaggaggtcgtggatgacacgcgtggccagcctctatgtgatgggagtgggcctgctgggaggaggagggggaagaggaggaggaggctgtggatgacacactggccaacccctatgtgatgggagtgggactgccaggaggaggagaggaggaggggaggagaaggaggaggaagccatggatgacatgctgaccagcctctatgtgatgggagtgagcctcccgggtaggaggagggggaagaggaggaggaggttgttgatgacacactggccaacccctatgtgatgggagtgggcctgccggtctggcagccccttgagaaggagggcaggctgcattggatgaccctgggtggttatggctcagaagaagaaatgaactgtgaaggagagggcagcctggtctccgtggacaggaagaacatcgacacaagggcctggccccactctgggaaggtggccagaaaccgtcccagaaactgcccccaaagaaaccagatctgaggcaggttcctcagcacctggcatcggaggtgccgcagaggaggcaggaaagagctgttgtcactgaagggaggcccctggaagccagcagggccttgccagcaaagcccagggccttcactttataccctcggtcgttctccgtggaaggccaagagattcctgtttccatctctgtgtactgggagccagaagggtcggggttagatgaccacaggataaagaggaaagaggaacatctctctgtcgtgtctgggagtttctcccagagaaaccaccttccatccagcggcacctccacgccttcttccatggtcgacatcccacctcctttcgacctggcctgcatcaccaagaagcccatcacaaagagctctccctctctcctgatcgacagcgactccccggacaagtacaagaagaagaagtcatcctttaagcggttcctggcgctgatgtttaacaagatggagaggccaggcacgatggctcatgcctgtcatcccagcactttgggaagctgaggcgagcagatcaccgaaggtcaggagttcgagagcagcctggtcaacatagtgaaaccccgtctctaataaaaatacaaaaattagccaggcatggtggtgtgcacctgtaatcccagctacttgggaggctgaaacaggagaattgcttgaacctgggaggcggaggttgcagtgagccgagattgtgccattgcactccagcctgggcaacaagagtgagactccatctcaaaaaaaaaagaagacggagagtaaattgcatgtgaagctgtcttcctccaggtccctcttcagaatccagctgccacaggccttccaggaaagtcaaccagagaagcctcaataactcccctcagcttaagtctcaaactgggacgctccaggcttctgaatacccctcatcccacatcttttatagagatggcaagaggaaaggtgtctccttcagcaggatggtgtccagagtggagtctttcaaagaccgcccctgaccgccctttctgcccttgccactggccaagccactatctatctccttccccagcgctgaccattcagactatgagaacattccaaccatgaactcagactatgagaatatccagattctgccctggaggcctgcagggctggtgtgttcaggaagctgtttgaagatcagagcagagccctgtccacagcaaactaaaatgatggctatgtggacatgagcagcttcaacacctttaagaacaatcagcagagcacagaccaggacgcagaaaggtacctgacattctatttcctttctcgtttggtagctgtaactattcaaaaggcagcgtgggtgtgggggacagatggacttgctttccagcctcaggctctgtttcccactagctgcact

SEQ ID NO: 29044 - DNA, 2300 bp, Homo sapien
agtttatgtgagtccttatgtgttatgtgagtctcttgaaggcaacaggtagttggtgaatttttatccattctgcaattctgtgtcttttaagtggagcatttaggccatttacattcaatgttagtattgagatgtgagctactattccattcatcatgctattcattgcctgtataacttggttttttaaattgtatttttgttttataggtcctgtgagatttatgctttaaggaggttctgttttgatgtgtttccaggacttgtttcaagattgagaacctttttttttattttttattttttattttttttagcagttcttatagtgctggctttgtagtggtgaattctctcagcatttgtctgaagaaggctgtaactttcttttatgaagtttagtttcactggatacaaaattcctggctgataattgttttgtttgaggaggctgaagatagagcctgaattccatctatggattctagggtttctgctgagaaatctgctgttaacctgataggttttcctttagaggttacctggtgtttttgtctcacagctcttaagattcttttcttcgtcttgagtttagataacctgacaacaacatgcttaggtgatgatctttttgtgctgaattgcccaggtgttctttgagtttcttgtatttggatgtctaggtctctagcaaggccagggaagttttccttgattattcccccaaatatgttttccaaacttttagatttttcttcttaggaatgccaattattcttaggtttggtcatttaacataattccaaacttcttggaggctttgttcatttttttgtattattttttcctttgtctttgttggattgggttaatttgaaaaccttgtctttgagctctgaagttctttcttctgcttgcttgattctattgctgagactttccagaacattttgcatttctctacgtgcatcctgtatttcctgaaattgtgattcttttttatttatgctatctatttcactgaagatttcttctctcatatcttgtatcacttttttttacttccttaaattggactccacctttctctggtgcctccttgattagcttaataatccaccttctgaattatttttcaggtaaatcagggatttcttcttggtttggatccattgctggtgagctagtgtgattttgggtggatgttaaagaaccttgttttgtcatattaccagaagtttttttctcattccttctcatttgggtaggctatgtcagagggaagatctggggcacagggctgctgttcagattcttttgtgccacagggagtttccttgatgtagcacttcccccttttcctagggatgtggctttctgagagagtctgactgtagtgagtgttatttcttttctggacctagctacccagcagggctgccaggctccaggctggtactgtgggttgtctacagtgtcctgtgatgtgaaacatcttcaggtctctcagtcgtggataccagcacctgctgtggtggaggtttcaggggagtggaatggactctgtgagggtccttggttttggttgtttaatgcactagttttgtgctgattggctgcctgccaggaggtggcactttcaggagaacatcagctgtgatagtacctggaaggttaggtggtaggtggggccctagagttcctaacataatatgccctttgtcttcagctaccaggctgggtagggaaggaccatgaggtggtggcagggtaggcgtgtctgagctcaaactctccttgggcgtggcttgctgtggttgctgtaggggatggaggtgtggttctcagatcaatggagtcatattcccaggaggaatatggctgcctctgctgtgtcatacaagttgtcagggaagttggggaaagccagcagttaaggcctcacccagttcccgcccaacccaaaagactagtctcagtcccactgtgccctctccaatagcactgagtttgtttccatgctatgtgtgaacaggactgagaacttgccccaggctaccagcctcccagctgagaaagcaagcagggctttcatgcctccctgcctgtcgagtctgcacacgggtttcacgccctcccctgtgttctggccaggagactttgcgttcggttggaattgttacagagttcagctggaggtttccttctccctgtggccttttcccagttcctctggcagccctcctcaaggacccctgtgagataagtcagaggtgactttcctggggacccagaga

SEQ ID NO: 29045 - DNA, 2300 bp, Homo sapien
aagaaacccttcaaaaaatcaatgaatccaggagctggttttttgaaaggatcaacaaaattggtagaccactagcaagactaataaagaagaaaagagagaagaatcaaatagatgcaataaaaaatgataaaggggatatcaccgccgatcccacagaaatacaaactaccatcagagaatactataaacacctctacgcaaataaactagaaaatctagaagaaatggataaattcctcaacacatacaccctcccaagactaaaccaggaagaagttgaatctctgaatagaccaataacaggctctgaaattgaggcaataattaatagcttaccaaccaaaaaaagtccaggaccagatggattcacagccaaattctaccagatgtacaaggaggagctggtaccattccttctgaaactattccaatcaatagaaaaagagggaatcctccctaactcattttatgaggctagcatcatcctgataccaaagcctggcagagacaacaaaaaaagagaatttcagaccaatatccctgatgaacatcgatgcaaaaatcctcaatatcatactggcaaaccgaatccagcagcacatcaaaaagcctatccaccatgatcaagtgggcttcatccctgggatgcaaggctggttcaacatatgcaaatcaatacacgtaatccatcatataaacagaaccaacgacaaaaaccacatgattatctcaacagatgcagaaaaggcctttgacaaaattcaacaacgcttcatgctaaaaactcaataaattaggtattgatgggacgtatctcaaaataataagagctatctatgacaaacccacagccaatatcatactgaatgggcaaaaactggaagcattccctttgaaaactggcacaagacagggatgccctctctcaccactcctattcaacatagtgttggaagttctggccagggcaatcaggcaggagaaggaaataaagggtattcaattaggaaaagaggaagtcaaattgttcctgtttgcagatgacatgactgtatatctagaaaaccccatggcctcagcccaaaatctccttaagctgataggcaacttcagcaaagtctcaggatacaaaatcaatgtgcaaaaatcacaagcattcttatacaccaataacagacaaacggagagccaaatcatgagtgaactcccattcacaattgcttcaaagagaataaaatacctaggaatccaacttacaagggacatgaaggacctcttcaaggagaactacaaaccactgctcaatgaaataaaagaggacacaaacaaatggaagaacattccatgctcatgggtaggaagaatcaatatcgtgaaaatggccatactgcccaaggtaatttatagattcaatgccatccccatcaagctaccaatgactttcttcacagaattggaaaaaactactttaaagttcatatggaacgaaaaaagagcccacattgccaagtcaatcctaaggcaaaagaacaaagtgggaggcgtcacgctacctgacttcaaactatactacaagcctacagtaaccaaaacagcatggtactggtaccaaaacagagatatagaccaatggaacagaacagagccctcagaaataatgccgcatatctacgaccatctgatctttgacaaacctgacaaaaacaagaaattgggaaacgattccctatttagtaaatggtgctgggaaaactggctagccatatgtagaaagctgaaactggatcccttccttacaccttatacaaaaattaattcaagatggattaaagacttaaatgttagacctaaaaccataaaaaccctagaggaaaacctaggcaataccattcaggacataggcatgggcaaggacttcatgtctaaaacaccaaaagcaatggcaacaaaagccaaagttgacaaatgggatctaattaaactaaacagcttctgcacagcaaaagaaactaccatgagagtgaataggcaacctacagaatgggagaaaatttttgcattctactcatctaacaaagggctaatatccagaatctacaatgaactcaaacaaatttacaagaaaaaaacaaacaaccctatcaaaaagtgggcgaaggatatgaacagacacttctcgaaagaagacatttatgcagccaacagacacacgaaaaaatgctcatcatcactgaccatcagagaaatgcaaatcaaaaccacaatgagatgccatttcacaccagttagaatggtga

SEQ ID NO: 29046 - DNA, 2300 bp, Homo sapien
aaagaaagaaagaaatgcaatgcagaattatatatcaaagatagactttctcccgtaatccatgggaaggtgcatctatcagtagagcctgaagaacagccaggctcctaggcatcgtggctgttagtgctttcttgctcactaaaccagccaatcctgccactctcattgcttgttctcagatgatctgagatacatctcaggcctgtgtccaggtgccacactcccttgacagcatgcaccatgcactgtgccactgccatcctactcaccccagacattacgatttcacaacaatttacccaaagaggccttttcgaatgagctgaaataacttcaaagcaaatggtagtgctttagtcatgaattcagaacaaatttagagtttcatgtttaatgagaccgtgcaggaatagaaactgaaaggtaggtcttctaaagggaaaaacagtgggtaaagctttgagtctaatgtggtataaatgttccaaaattctgtcccttctttgcatgttatcttctgaaagtatagcattcctctcagaaattcccgctgatcaaagctagaaaaacttaattcctttatagggtcctatatattatgtctcaattttcaattggcttaatctaaaaaaaaattaagttatccttatgttaactatttaacatgaaaattcggattcttatccatcaggtttttaggggactggggcaggtgtaaatcagaaattcagaaaaaaatcaccatttaaaacatgtcctgcttcaactattaccatactaagtctgtgtgtgtgtgtgtgtgggtatgtgtatgtgtgttaagatatttaagaacttttgttctattatatgatttccggagttttttggtcccacaattcaactaaactataaatttaacatgaagtaaaatttccctgaaatataaagaaataatgctttttgtttttggggttttttttgtttgttttaccagagctgtgagttctgttgttttgtcttctattgttgctgctaaaagtcattcttcaagatttctttgttgagttctttctatagctgcaaaagaaaaggacatgttactccactgctagttaggttctgattacaaattcattaaaaacatgtataaaaaatacagtgatcatgatgagaaaaataaaaatgttttggattataattcaaatacagttatattttattattattttcatttccttacatttcagattatagagttcaatttatttcagatttggatgaatttaagtttttaattcaggggtctttaagtattttattcaccacaacactcatcacaaccaattatggattacttttatatactgaaatactattacatatctgccttggaaaagtaagtggggttcataccttccagaaccttagaatgtaaaagtaacaataaaaaatagcattgataagaagatgtacatgccatataaatacatgcagatttatgtcaatttacttataaattgccacataagaatcaattgattgatacggttttgctctgttgcccaggctggagtgccatggtgtgatcatacctcactgcagcctggatcacctgggttcaagcaatcctcccacctcagcctcccaagtagctgagacttcaggcatgcaccaccatgcctggttaatatttttatttcttgtattgctgaggtctatgttgcccaggctgctctcgaattcctaggctcatgtgatcctcccaccttgaccttccaaattgttgggattacaggcgtgagccaccttgcccagcctatgtttatttctttaacaaatactttagcatgtactatgtgccaagtgctattcaaagctctttaaaaatattaactccttaaatcattgtaactacctgaagtagggtttgttattatagtgacttttacagattgttaaagcaaactaaatatggcctgagaaggactccgtacttctacatttgagtccttatggatgaacagtaacctagcttaatagtcagacaaaattgaaaacctaacttaatagtatgcacttgtaacaatagcagagtgctggccaatcccaacggccgtacttcaacataaactgctaaatgttcaaactgtgttcaaataaggcaaactctgagctgtaaccaatctagctgtttctgtacctcacttcgcattcctgtccttttttgtctataaatttgttctgaccacgaggcatccctggagtctctctgaatctgctgtgattctgggggctgcccgattcatgaactgttc

SEQ ID NO: 29047 - DNA, 2300 bp, Homo sapien
tgttatcctaaaccatgctgtcaggtgtgagtcaggtgtgagtgtcatgaggcccagctgagagaggacacactaagaggatttctttcagcttgtttaatgaagggttcatcatagtcaccagaatgctttctcataaaaacaatctagtagcacagaaatagctacatacctttatattattcacatattgtataatattgatataaatttaggctctttatattcgatgtgtatgtttcactgatacagttgcatgtgatctcacaagctggagacagttgagtgattagagttttattttctgttgtctttcctggcactccatgggagcaaataaaagtaaatgcttggaaatgcatcaaattatgtcactttctttagttgatattctgggaaagggagatcaagttttctagctctacctggggaatttctgctacagaaaaaaaataagactttccagtatttttgaagcaataatctacctaaaacatggtttcctgaatattattgaaaattcatggcatctgcattttcctgcctttccttaaacatttatgttggcaggactgcagtcccttaagaaatactgaaaatattagtcctatactcaaaacttacaaatatgaaaacatgctacttattggtttacaacgttatttgtaaggctcaattaaaaaaaaaataagaattagcaaaaaacttgtatttcaccaaaataaaaagagacaagtttagaatttttaattttcttatctcattattttaaagtgttatctgtaaatgctattatgtgtcttttcaatcatatatatatatgttttttttttttgagacagagtctcactgtgtgtgctacaagctccgcctcccaggttcacgccattctcctgcctcagcctgccgagtagctgggactacaggcacctgccaccacgccaggctaattttttgtatttttagtagagacggggtttcaccgtgttagccaggatggtctcgatctcctgatctcgtgatccacctgccttgaccccccgaagtactgggattacaggcgtgagctacagtgccaggcctcaatcctatatttttaaaacatcctcaggatagattttgtaacttacatgagatagaattgtagaaaataggacttctttcaatttaatatatgttataagtgcatgaaagacacagaagaccattaagcactgtgtgcttaaagagcgtgggacacgtaaatctcagagacagctggataattaatgttttttgttgtttctcctgagcatatcacaggagtaaccttactttgctaaatgtttgaataaagaaagtggtgtcattttaattgattaatacttaatactttaatactaataattactaattacttaatactttaattaatactttaattgattaatacaagattttttaaaatcctactataaattttctattttagaaaacagaaaatgtccaagtgttttagatcaagtacccacctaggctctgacttcataaatgctatcctatgttcatagctcctaaatagttcagcctctcctcagtaacatacactaaagaactatacgccctaaagtaggtgagaaaactattgattttcagatgacaaatctgaaaatatgtgacttgaccaattatgcaatgtcatgtatgtataaggtttgagataaagtagatacctgtattactcaagtgaaatattccacaactagctcttaccaaatttcctagtagaattttaacacttgggcgccatgactgagaaaatatcctttctgacttcaggaagacatgaaagcttgaactcctagggagaaccatctcttatggtagaagtggagcgatgtcttcttgtggggaaaagcaagagagatcagattgttactgtgtctgtgtagaaagaagtagacataggagactccattttgttatgtactaagaaaaattcttctgccttgagattctgttaatctataaccttacccccaaccccgtgctctctgaaacgtgtgctgtgtcaactcagagttgaatggattaagggcggtgcaggatgtgctttgttaaacagatgcttgaaggcagcatgctccttaagagtcatcacccctccctaatctcaagtacccagggacacaaacactgcggaaggccgcagggacctctgcctaggaaagccaggtattgtccaaggtttctccccatgtgatagtctgaaatatggcctcgtgggaagggaaagacctgaccgtcccccagcccgacac

SEQ ID NO: 29048 - DNA, 2300 bp, Homo sapien
ggcagcaaaagggtgggaagagaccaggctggaaaggcagacagggccagatcacataagctctgatacagtaagcagtttgggatcattttttaaaaatcctatgggaagcataaaggatcagtggggggcggagggggggaagttagggacttcttacggggacagtggtatgcacaagataaatactaaggaaggcctataagtgagtgctttcaattctcactcctctccgaactaagagagatctttgaagcaggaaaagatagggctccatgttttggaggcagatggacctagcctcccctttccagagaaaactgcctcctgtaaatcctcaaagaggagggtcttgtttatcagcacagcctcattatacccaaaggctcaaaaattatttgctaaatgaagtaaattagagaaagactcgaaattaaaaacaagagtggtgagggcagaggacttttgcttatggcacacattaagtagtaatcagcggaaatataatagtactcattaaagagtgagtcttatggctttacgacccagaggaggagaggttctagaagcagacagcgccaccagggaaaaggctcagaattttaggctgagctagtctcctaactggatgtgtaactacaggtaggccacctccttctctgggcttcagattgcttgaattaactgacggagctggagtattcaccaaagaatttctgggggacttccaactctctctgtagttttataaccatccatcccccttctctggcgcagagaaggtgcttcatgagtatttgccgtatcaatgaagcccaacatctcattttacaacactggataccagggcctggaggggttaggtgggagctcagggccaaggagccagtttgtggcagtgtgtggggaggccctccgacctgtggctcgggtacttctgagctcttgggtagagtaacatcaaggaagcagtaggtggtcggagctcaactttggggtgggaggtaggcagggttctccctgcaatccactgggcactagattggataaggctcttctggggtcacaatgcccaggctcaaaccccagctccacgatttgctggctgagtggctttagccatgtctcctgtgtctaactttactcttcagtaaaatgtgaccaacaacagagcctgacttacaaaggtcgcagcgagatctgtgagacaagccaggcaagtttccttgaacagtgcctgacaggtagcagggggctcaaaaacattcccgttagtggaactcctagcactccagcacagcacacgctaccccgagtggcaacttttcgggacgcgccttttaaaggcgcgtgcaaaatgtaaacacgtggggtatggcaggagcggtagtgataattaaccaccatacattcccagtttcgagccacacgcaacgtgctcggcacttcccgtgccccaaccggacctagtttacgacttcctacgcacaggcccctctgaggtcagggttcgggcttcactgtgaccttggaccagccccgttccccccagagcttcggttttctcatccgcaaaacaggagtagcgaccccccagccggcccgcctccgagtgtcccagggtgggcacctgggccgcgcctcaggtggcccgcgcccggcgtggtcgcggggcgccggggcccgcgtgtctcccgcaggccctcgtaggccggtctccgtggcagcccgccctccctaccttcctgccggcaataggacatggctgcagcccgtccctgagaccttgcagaagcggcggtggcggcagctgcacctttacgccgtgacctccctctcctctggcagggcgggctcctccgaagcccgcgcggacccgccccctcccaggcctgcccgccgcgcgcctgcctcggcgccctcgcaaccgcggccaggccaacctcagccggaaactacatttcccagcaggtcgcgcgctcctcgacagctctccaggcagtagaaactacatttccccgaaagctttgcagtgcgcaggcgcatcaatgaggtactgcaatgtcccggaccgtatagtttccaggacgtctcgccgcgcgcatgcgcagaaacactgggcacagggggaggtaactgcagtaagtcccgcttggccctggagtccacgcggattttcgaagctggggctggcaagaggccgctggacaccacgctccagtcgtcagcccacttcctagctgaacagcgcgaggcggcggcagcgagccgggtcccaccatggccgcgaatgtgagtat

SEQ ID NO: 29049 - DNA, 2300 bp, Homo sapien
aaattgctctacctctctgattctgtttactcacttataaagtggagaggggaatagtaccttcaccacaggtactgctgctgctgtactgattgagaattttgttgcctccctgctccatcccgctatcttcttcctcacccagcctagtggctgctgtaaatgtgtactcagctactggatgaatcaaaaaatgcttggcagcagagaatactcaaatgcatgtatattccttggtgaggggtcaggtctcaatgtacccaagatgatctctatccactgggaccatttgtgctaccctgcaaggacaggcttgttttcaagtattaagtacctaccacacatcaggcactgtgctaagcagtctcccttaaatatcacagtaactgatccatgaggctacataaacctggagagatgaaagccacacagctactgggtggaagaatctggattgcccccaggtctccctaactccaaagcctgcccttttcagcatatttccgtgtcacagcatgccaagccggccacgagagcttgggcaagtgccttcccctgctagggaagttccccatctgtaaaatatggtggtggtagtgatgggagcagacaaagagtccacatactacagacaggctggtctcctgactgccctctcgcctggccgagcctgagtctctccgaatacctctgaggcttttctaggtacaacattcaaggcttctaaccctcctgtgggcccgaaatgtcctgggagtgtggatgatactaacccgagacaaagtgtactagggctgtgggtgatgcacaccctggcctctcaaggggtgtgggaggcagagaggacgcttggggacagaggcggtgtctggaaatagggtgtgacaggcaaggggagagctgctaggacactctaccaaagcaggagggagggtgtgtctggggctggctgggctcctaagcgggccctagaagcactttcacagaggaggggagaggtgagtcaccagcttctcccacacccagcgccctggtaggaggcgctgcttgttgaatgaatgttgggcttaaatagtttcccgagaaaggctagttgcagggagaagaggccttgagggaacagccctcagccaggcctcctccaaccaaatccttgctagggggaggaggggccccgacagtagagaaatgctccctctcccccaactccttcgctcccagcccagcctaagctttttggagcatcacagactcggtttacagagactccctagggcggagagctctctgcccgcctggacagccctgtctgtccattgctggacagctccacttgggctggatcgccttcctccctcccaagggactggcgccctctctgaggtcgcgtccagctctcataatgcgcaagtttcagggccccaaggtacaggagggaactgggaatgcaaggaggggccgcggagaggcgtacaagcagatcccagtacgggagcaacacctccgagtccgcctccgcacgaacgccgaggacgaggcgagccaaggaacacggacaaaagaagcctggacaggccgcgagatgagcagagggatgagctggcgaaggcacagacacggcgagcagagggagatgcgggcctagccgcacggaggagctccaggcggcgaaatggacctagaggaccccggggaaaagccccagggcgacggggaagcctgggtgtggcccggctggcccggggatactcacattcgcggccatggtgggacccggctcgctgccgccgcctcgcgctgttcagctaggaagtgggctgacgactggagcgtggtgtccagcggcctcttgccagccccagcttcgaaaatccgcgtggactccagggccaagcgggacttactgcagttacctccccctgtgcccagtgtttctgcgcatgcgcgcggcgagacgtcctggaaactatacggtccgggacattgcagtacctcattgatgcgcctgcgcactgcaaagctttcggggaaatgtagtttctactgcctggagagctgtcgaggagcgcgcgacctgctgggaaatgtagtttccggctgaggttggcctggccgcggttgcgagggcgccgaggcaggcgcgcggcgggcaggcctgggagggggcgggtccgcgcgggcttcggaggagcccgccctgccagaggagagggaggtcacggcgtaaaggtgcagctgccgccaccgccgcttctgcaaggtctcagggacgggctgcagccatgtcctattgccggcag

SEQ ID NO: 29050 - DNA, 2300 bp, Homo sapien
ctaggtatattcctacgggaaatgaaagcacatgtctgcataaaggttcatgtatgaatattcacagcagcattattcataacagccaaaacctggaagctgtcaagatacccatccactgacgaatgattcagcacactgtggtatagtcataaatggaatactactcagccatgaaaaggaacaaattcctgataaacaccacaacatgaatgaattgcaaaagcagtgctctgagtccaagaagctgggcagaaaggagttggtgccctgattccatttttctcaagttgtagaagaaacaaactaatctacggtaggagaaattcaaattcagattctccccatccccaccagttacctctggttggtggagagggggagaattggcaggaaaggggcacaaagaaactttttggggtgatggaaatattttgtaccttgctttagatgttggtcagatggaatatacgtttgtggaaacctgccaaactgtacattgaatatctgtgtgtttttaccacatacagttaaaactaaaaaaaaaaaaaaaaaaaaaaaaaaattgagtataaataaatagcaaatttaatttatttttaaaaactagttttcattctgttactgtttctttttcttcagtattccagtaccagtacccggagagaacatgtcaaagttaaaaccagctcccagccaggcttcctggaacggctgagcgagacctcgggtgggatgtttgtggggctcatggccttcctgctctccttctacctaattttcaccaatgaggtaaaatgtctggggtcttcctgtgcagagtgagagtccccaccatgtcagagagcaaaggcgatgaacccggaggctggatttggtaatcaagggcctagattttaaaaagagaaaggaggatactgagttaatcacagttctttccattgtgatccatcccacagctgatgtgagcaggaaggggagtagatcagttcacacacctgaatatccaggggttagcacctgcctcaggcgtagttggatccaggtgttcatgctgggtcaccaggaatctccatttcttcatcttttgcctgtttttctctattatggtgtttttcttgggcaggcacttcatctgtgatggcaaatgtggccccagcaactggcctacatccaaccacttagcccagggaagagaaaaaccatctgtttctcttcctttctttcttttcctttctttcccctccctccctccctcccttcctttgttcctttcttccttccttcctttgtctctctctttctctctttcttgtttgtttgtttctttctttctctccctctctctttctttttctccttttttttaatagggcctcatgatgcaacagtatatttctaaatcaatttagcagcagttacagggccatctctcagtgtcctggcttggctctccgtcctctgaatcagtctccgtgtccagggcgcactcacatgttctgactggcaaggtctgggtcccataatctgaccagggttcagatagactcaggtaaaccacatgggctgagtaggagagaggagagccaggcatggaggctcaagcctgtaaccccagcactttgggaggccaaggaggcaggatcgcttgaggtcagaagttcgaaagcagcctgggcaacatagcaagaccccatttctacaaaaaacttaaacataaaaataaaattaaaaaaaagaaggcagagaaaaatggggagaaagggacaggcaggcagaaacatcagctgttcccaccactggggcagtgctaagattggtgggggctagtgggaaccaatggggcagtaggaagaagtctccctgggaaagcaggaatctgggttccagtccttactctccacttgctagacctcagttttccaactgtacggtggggagatgggtctcagcgctcccggaggccccatcctaccctaatactttgcaacaagcacagtcatgctgagccacccctgagctgttgaaatccccactcccctttgctcccagggccgcgcattgaagacggcaacctcattggctgaggggctctcgcttgtggtgtctcccgacagcatccacagtgtggctccggagaatgaaggaaggctggtgcacatcattggcgccttacggacatccaaggtaggtttggcaggggatgctgacctgccagtggctcggggctcatcctggatgttgtctggctgaggatttgaaagcatgggccttggagatggtcacacatgggagtgatt

SEQ ID NO: 29051 - DNA, 2300 bp, Homo sapien
gagctgttgaaatccccactcccctttgctcccagggccgcgcattgaagacggcaacctcattggctgaggggctctcgcttgtggtgtctcccgacagcatccacagtgtggctccggagaatgaaggaaggctggtgcacatcattggcgccttacggacatccaaggtaggtttggcaggggatgctgacctgccagtggctcggggctcatcctggatgttgtctggctgaggatttgaaagcatgggccttggagatggtcacacatgggagtgattcccgactttaccactcagcagctgtgtggacttgtctatcctgagtctcagtgtcttcgtgtataaaatggggacggtaatggttacaagcttgtggccagccttgaggatttggtgagattaggtaactaacgccttggtacagtggctggcactcagggaggtgctctcatgactctgatgaccatgtgtgtccagtgcaaggccacaaaactaccctgggcaccagagctttcctgttatttgaacaccctgtacgctgttggcaccatgccattgggccatgcagcccaggcctgtactgtgagggtcacagtcacaggcactgtgtgtaaagaacctgggacagggagtgtcctcgattctcccctgcaaagcagtgtagggctctccacccttgtccccttctctatttcttcctcttccagtccagcttcccctgagccaggctttctgggctgacgtgaatgttatcctttatttttttggtttctttgattctgtttgaagcttttgtctgatccaaactatggggtccatcttccggctgtgaaactgcggaggcacgtggagatgtaccaatgggtagaaactgaggagtccaggtgagctgttggggtgaaaactctgttggggtaaaggaggagtgaagtgtaggtgtcaggataacatgcagatgtctttcattttgatacctttgaaactcaagtataacatcttcctatcagaaaagtgtgaaatgatccccaaattaatagccagtgatttggaagtggcaaaaatccagtgaagagtggctccaggaggaaagggggattgagttgctcccacatctgggaagttccagagatgcacaagcttgaagcatgacttggagcaggcctgaaacactgtcattaggatcagcatgtcaaccccgagaccccactgcatctctctgtgttcagccttcccatcagctgtgttggtcccatctttgctctacttacagcttatcgtttctgacaggagtcccagggcaggttctcattgatcagggctggggtcacctggagctgggggtgggttcagccccacctgaatcatatggactgtgaccgacaggtggggaggtggtgggaggagcaggagaagggcagcttcaagaggccccccgcagggctgtcctggagcagaggatgcagccagatctctgagcccaaagggcagggctgggccccttggtgtaaggccagtgcgggcagatttcagctcaggatgggagagcgctttcctccaggtagcgccttggagggcaggagctggctgtctgtcaggagtgagtgccctgtcttggggctggtgtagagaaggcatctgccgtatctggggagtctgatctggtagccctgaggttgcttcctgctcagatgcttagagattagactgcctggggcgacgaggctaacccccgtggctgctttgctttccctgcagggagtacaccgaggatgggcaggtgaagaaggagacgaggtattcctacagtgagtgctgggccccttacgtggtctctgcccatggtgggggcccacagtggtggctggacagcagggctgttggtggggccatgggaaggattcagcaccaggcatcaggatccctgggtgcaagtcttcagagccctgctttcccacccatccattgaggctccctgacccacccctttggctgtgagataggaggagctgggctggtgggtctcagccgcgtgccactcctacccgggctctgagttgattcctctccctgagcagacactgaatggaggtcagaaatcatcaacagcaaaaacttcgaccgagagattggccacaaaaaccccaggtgagagccaggcccaaggcctgagtgcagctttgtctacactggcaggtctccagcctcagtttcttcatctgaataacaggattgagttaatcctgcctcgtgggttgaaaatgtgggacatgggtttgagaccaagccctgtgctggg

SEQ ID NO: 29052 - DNA, 2300 bp, Homo sapien
atgtaccaatgggtagaaactgaggagtccaggtgagctgttggggtgaaaactctgttggggtaaaggaggagtgaagtgtaggtgtcaggataacatgcagatgtctttcattttgatacctttgaaactcaagtataacatcttcctatcagaaaagtgtgaaatgatccccaaattaatagccagtgatttggaagtggcaaaaatccagtgaagagtggctccaggaggaaagggggattgagttgctcccacatctgggaagttccagagatgcacaagcttgaagcatgacttggagcaggcctgaaacactgtcattaggatcagcatgtcaaccccgagaccccactgcatctctctgtgttcagccttcccatcagctgtgttggtcccatctttgctctacttacagcttatcgtttctgacaggagtcccagggcaggttctcattgatcagggctggggtcacctggagctgggggtgggttcagccccacctgaatcatatggactgtgaccgacaggtggggaggtggtgggaggagcaggagaagggcagcttcaagaggccccccgcagggctgtcctggagcagaggatgcagccagatctctgagcccaaagggcagggctgggccccttggtgtaaggccagtgcgggcagatttcagctcaggatgggagagcgctttcctccaggtagcgccttggagggcaggagctggctgtctgtcaggagtgagtgccctgtcttggggctggtgtagagaaggcatctgccgtatctggggagtctgatctggtagccctgaggttgcttcctgctcagatgcttagagattagactgcctggggcgacgaggctaacccccgtggctgctttgctttccctgcagggagtacaccgaggatgggcaggtgaagaaggagacgaggtattcctacagtgagtgctgggccccttacgtggtctctgcccatggtgggggcccacagtggtggctggacagcagggctgttggtggggccatgggaaggattcagcaccaggcatcaggatccctgggtgcaagtcttcagagccctgctttcccacccatccattgaggctccctgacccacccctttggctgtgagataggaggagctgggctggtgggtctcagccgcgtgccactcctacccgggctctgagttgattcctctccctgagcagacactgaatggaggtcagaaatcatcaacagcaaaaacttcgaccgagagattggccacaaaaaccccaggtgagagccaggcccaaggcctgagtgcagctttgtctacactggcaggtctccagcctcagtttcttcatctgaataacaggattgagttaatcctgcctcgtgggttgaaaatgtgggacatgggtttgagaccaagccctgtgctgggcaccaggaacacagagacttgtctcccctgaccccagacaagctccccgcaaacaagtcacaaatataaggcctgcactaagcgtctaaggggatttgcacacacggggccggggaagcattttgttaatggtttgccatgggtgggaggacaatcaggacaggctttccagaggcagcggcatttgttcaggcttctcaggatttcagcagagggaggttagctccacggcatgccagtggtgaggcgggcataacacttgggtgtggctagagagcaggccttgttcagcaatggtctgggctgtgccagtaagatggttgggatggaatgctctgggaggggctagtgaggggtgtaaagtccatgcaagatacatctgacagcagtgggtggggcaggacaggctggcaggggtctaggcaagagggtaggaagctccggggaacaggagacagagtgagggtgctcagcccaggggagggggcacagggcccctgggggtggacaggacaagatgtctgctgcgcctgggctaatctggacttgcaggaacccccgggtggggaccctgcccagcacaaacaacccaaagggacccgggcagctcccacaccggtgcccatctctgacagcttcctctctcccacagtgccatggcagtggagtcattcatggcaacagccccctttgtccaaattggcaggtttttcctctcgtcaggtaagtctcaggcctctccagaggagctcgtgccagaagcacaaggcccccctagggccggagctcccagtactcagccttcagagggctaaaggcacaggatcagtctgcacctttcccagcaccatgcttt

SEQ ID NO: 29053 - DNA, 2300 bp, Homo sapien
attctgagtgctatgagttgctgctggaaggtttactccggtgttcttattaaatcccagtagatgggcaagcagaccacagtggtaattcctgccctactgaaagaacactgaactcaaggagtctggttaggcatattagataactcaagattttggagagtcctggaaaagagtctctagatgcttagggaccaaaaaatagcagagaacagaaagtcacccatatttctgccatccagaaatagccaccatgaaatagtggtctgtttccttctagtctgttttttatatagcagaaagcatactgtaaaatcaactttgcatgagtaacattacatcatatatcgtttttctttatcttaaaggatgactcaattatattttgttgtgtggctctgccataagttacttaacaattatctcatggttggacattcagattattgttagatgcttttgaatactatgaacatccttttgattcagagtttttgtgtttcctttatccccctttcccttttaactcctctacctttctcttcaaacggaaataaaagctgtgctttttaaccaactagaaaagtttgtgatgcctctgaagtatcctcctacgtgcatttttttagattagtagaaattgaagtgtttagcatctttgcctattattagagggctaactaccattgtaagatccagaaatcttgattttaggggcaccctcctcaaactgtcaaatcttaagctttatgcaacctctggccttggagtaggcaatctgttctcagatttgaaaaaattaattttgaaataatttgtacttcaaaatttttccttattttttggtttccatacaatgtttaaaaatgggaatgcataaattccttttttataaaacatttaaagaaacaacggaatcaatgatctaacattaaaataaatgctcctttgttatgaattttattaacatttaatcatgatttcatttagatcagaagggagagtcttttttccctcatgcaaaagtatattcttgtggaatataaatacccatccagagagtcagcaagacaaacaatgaaaagactgaattattaaataattttatattttaggttaatattgcaatcccttttggaacctcaataaaaggtagagtatttttattttctaaaattaattgaagcagagtcatgcaaagacaaaagatttatttcagattcaagataatttgtgtgaatatatttgcaaaatagaaaactatccttccctgccatattatttgttaaaactaatctattaatataattattatatgtaaataaaccataattttagataccccaatttgactaaaaccagcagcttatgcattttttatttccctttaacaaaaaaataattactttaagaaaatacttttgaattattgctgtctttttccaactgtaagtttgctgaggtggttggtatatgagtgccatttgggttacattggaaaggtttcagagcagtatgtgttttgagcagtttggtcttgaaggttggcagaaatgtagattaatagtaatgatgttgtggtaaaacttggacatgtttatgtacttaacattttacttaggagtacattatccctaagacaattaattttggcagataataaataaggtgctaattaatggatgttgtattttcctggcaggaggttagctgacatttaagatctggaagttaggttttatttgagtcctatggtattttctgtagtcataggagaagtaaagtgctgataaaggaagatggtttttactgtgaatatagactagccgcaggtgggaagaagctgagagctggttgctgaccagacaggggatggtgaaccagtgatggagatggggtttggagacaggtcatagagccgttttatgcccctgcccataagctgcactgcctccacctttccttccacccctcaccttatgttctgtgttgtcacctagatgcctttgaagatgagaaacccccaaagaagagccttctctccaaagtttcacaaggaaagaggaaaagaggctgcagtcatcctgggggttcagcagatggtccagcaaaaaagaaagtggccaaggtgactgttaaatctgaaaacctcaaggttataaaggatgaagccctcagcgatggggatgacctcaggtgagatgtctgcaaagctttgtctcgggtcttgatttttctcatcagagaattgtgaataatgaaaacctctattcttacttgtcactggggtccatggaaga

SEQ ID NO: 29054 - DNA, 2300 bp, Homo sapien
tacctagtctaatctacccagttttttcaggagacccagaaattccttctacagcctgcattttgcaattatttaaaatatttactagccgggcgcagtggctcatgcctgtaatcccaacacttcgggaggccgaggcaaacggatcacctgaggtcaggagtttgagaccagcctggccaacatggcgaaaccccatctatacaaaaatacaaaaattagccggacatggtgtcaggcacctgtaacaccagctactcgggaggctgaggcaggagaatcacttgaacctaggaggcggaggtcacgccactgcactccagcctcagcgacagagtgagacactgtctcgaaaaaaataaaaaataaataaaatatttatttagcatttagccctaccaatccacgggccctgcatccacagattcaaccaaccacagatgaatatatttcgggaaaaaaaatacaaatttaaaaaatacagcatgacaactatttccatagtatccacattgtattaggtattattagtgatctagagatgatttaaagtatgtcggaggatgtgcataggttacatggaaacactaggccatttgatataaggtacttgagcatcacaggttttagtatccgcggggtatctgggaaggaccaccttagtttgctcaaggaatgtctaacttgagttttgaagaaatagaaaaaatcagccctggtaaaagccatggggggttcactctaggcagaaggaacatcaaaggaaaagactcaaggaataacttggcatatttgaggaagagaaaggaggccaataaggagggtatctggcaaggaaacaagtggtaagagaaacaggagaggtagcaagagccaaaacatgtagtatcttgtaggccaggataaaacaactggattttaagctaagagcaatggaaaaccaaggggagtttaaagcaggagcagggcatgattttttttttttttaagattatttgggttgctggatgcagagctgggaggccagtaaagaggaaactgcagtcactcaactgaaaggtgatgatgacttggacaggggctgtggtcatggaaatgaagagaagtggacaaatttgaaatacactcttgaggctgaactgactggacttgctgacggactggatgtgtggacataagaaaaaggtgggctttgctttataacaagtattgagactggaaaaacggaggaaagcatagatttaaagaggaaaaccatgagttctgcattgcccatgacaaatgtaagaagcctatcaaatatccatgaggggaagtcaggtgggatcccactgtggaactctgggtgagactcagctgaagttatcattcgggagtcagcacactgcatcactctacgtcctggtccgtccgtctgtcttcctgggacacaaataactgccttctccgagttcaaccctgaacatctgtatcctctggacaacggggagcgggaaaaaagctacgcaggagcttggatcgggcgaagctcgcgggaaaccgctctgggtgcgcaggacaaagacgcggggacagcggggagggccggccgcagcctgccgggctgcccccacggcgcggaacgcgcgcagcaacctccaccaggcctccgcgtctggactcccgccctgcctctgggcctcctccgcccaccggcggcgtctcccgcgaagcccgctgggcctcgctctcaccctcctcctcctcctcacgccgggccttgctcttggccttggatttctggctgcgcagttcgcgtccccgcggctccccgccggccgcgcgtttccgagccatgttgcttgtctgggcaaattccacttcgcgagtgacgcacccggccgcgatgcgctagaacgccggccccgccccgaggcggtgcgcttggccacgccccttcgttggaggcctagtcacgcccctaaaggaagctccaccccatacccgtggccactaaaaaactgcgggaagcaggaaagagcacaacaggtttctctctatttccggtgtattgtatcctcacgtttccggagattgacgttgctcttgtgttctcgcgagaggcgggaaagggcgcagggtttgaaacatggcggacgacgtagaccaggtaagtgtattttaaggaggtcgctcgaaggagcttcttgtactaggctgctttttccagactcaggaaaaatggccagtcgtgcctcctctctccaagtcaccatggcctaatccaccctgtcctttccgtaaccccccctccgaatttt

SEQ ID NO: 29055 - DNA, 2300 bp, Homo sapien
gctgtgacctgacatttatgaactgagattaaaaatcatgccatctgtaattctcagattcttcatttgtaattgagaaagccacaaccttctttctgggttcttatgaggattaaactagttaatgcatttaaaaacagtgccaggaaaacagaaaatattaatatttagaaatggttcctattggccgggcgtggtggctcacgcttgaatcccagcactttgggcggctgagaaaggcagatcacctgaggttaggagtttgagaccagcctggccaacatggtgaaaccccatctctacgaaaaatacaaaaattagccaggtgtggcggcacgcacctgtagtcccagctacttgggaggctgagacaggagaatcacttgaacccaggaggcagaggttgcagtgagctgagatcacgccactgcactccagcctgggcgatagagtgagactccatccaaaaaaaagaaaagaatagaaaaaaaaaggaaaagaaaagattcctattaatattatattattacagaactgctggaaacattggttttagaggtcagggctaggatgacttggggtcacccacatggaagggatggttgcagccgctaagagttagaaagattattcaaggagagcttcttcagtaagtacacaaggccagtggaggaaggtaactgaattggtaacaggctctgaagattcaaaaggcctgatgagagaaaaaaataacctaactcaactggtccctatgtccctcagttcaacaagtgtttgttaaaggatcagataaccaactgttagattacaatgatagagaagtcacaatccccaccctcaaggagctcattctactgtggagaggcatacaaataattataatactgtaagaatatgcacatgaaaaagccctactgctacctaagcctctgtctgggatgcccactgtctgctcttttcatcctgtagctttaaatattggcttctcaaagaggcttcctctgatcatctaactcattcactcaaatattttttgagtgtttccagcactgttctaaaccccaaagacaaaagaatgaacaaaacaaaatccctgctcttatggcatttacattctagtggggagagattcacattaaacaaagatgcatacatttaatatgaaaaaataactctctatgaagaaaaatgaggcagggtaaccagagtagcgggagtgctatttgggcagaagtcctctctgaggaggtcagatttcagtagaaagtttaagttgtggcatgatctccaaagatatttgaggaagaaaaagaccaggtgaaaaagcttctaggaccatctgttattctgcataccagttccttgtttccttcacagcacatcacagttcctggaagtcttacatatttatatttacttttatctgttctcctcgcaaatataagctccaagtaatggcaaggatctcttatatgtcgatgtcagtgtccctggcccttagaacagtgcctaaccatacaaagctgatgttcactctatctgctgaatgaataaataattgttgcgctcactaatgataacaactcctaactttattacctggctttctattggaatcctgacagctccatgaggtagctaaggataataatctacagatttaaaaaaatgaagcgaagagtgtgagaatagtcatcaggtgggcttctaacaggaaaaggtctcagggcctacggcaaaattcggagggggggttacggaaaggacagggtggattaggccatggtgacttggagagaggaggcacgactggccatttttcctgagtctggaaaaagcagcctagtacaagaagctccttcgagcgacctccttaaaatacacttacctggtctacgtcgtccgccatgtttcaaaccctgcgccctttcccgcctctcgcgagaacacaagagcaacgtcaatctccggaaacgtgaggatacaatacaccggaaatagagagaaacctgttgtgctctttcctgcttcccgcagttttttagtggccacgggtatggggtggagcttcctttaggggcgtgactaggcctccaacgaaggggcgtggccaagcgcaccgcctcggggcggggccggcgttctagcgcatcgcggccgggtgcgtcactcgcgaagtggaatttgcccagacaagcaacatggctcggaaacgcgcggccggcggggagccgcggggacgcgaactgcgcagccagaaatccaaggccaagagcaaggcccggcgtgaggaggag

SEQ ID NO: 29056 - DNA, 2300 bp, Homo sapien
gatgaataatttacccctcccacatttatgataaacacagcagggacaggatatccaccacaaaaactctcttcccagagaaggaaggaatgagaaacataagacagttactggtccctaacagtggtgaatcccactgggaaggcatgaatgctccctgtcctggtagcagcagaaatccctcaattagatcaaatatgtcccatccaatgtttggaacttatactaaatttaattgtgcgtcctacatctttatttgcaaaatctggcaaccctaaatggggtccgcagagctttcagggccaacttctattatgctggaagacgcaaatagtcaaaggttttttttggccaggcttatggtttctttggcaatgcaatttctttaaaaacttagaacataggtttctgagctgtttacatccaaacaattcaaagggccagtaacctgtctaagctcttccctaggcatagtttctaggactgctttatttcttcagtttctcacccctgttctgctttctgaaattaatgttgactactttgaggccatttgctacaaaagtttgggtggaaagacaacacccttaatctgatctttgcctcagggctgagtttgtttacctgggaaattttgctgggccttgtttctcaaagccttttttcatacttatttctgtaacttggggtctaaaagccagtggcttttctaaccctgtgaatcctgtttcttttcatctctgcttgaaaaccaactagttcttgcctgagcttttctgtttcttctactgccctgctaaatacattaggctaacagcaacatctactaacatttggcttttccagcctcttctcccagagctcgtgagtttaggagccccttgggctacattccaagttttatctaatattttgccaaggcataatattaggatttcgaacattcatgtgtttctttactgcccaaggcctgaccactaagctcatgcttcaaggtatccattccatatgtgtgaccacagtagcacccagaagtaacacataatggctcagcaaagtagaagttgatctcttgcccatatgacagccctggtggggtttagatctgcacaatagctttcttccaggtggcaagtcaaggacccaggcttcacctatcagtggctctgccatcccctgagctctcgccattatcttagttcatttagtgttagaggaacgactgcagaggggcattctgggtcagtctggatatagtcctgtcatttctgtttacttgccattggttaaagcaatccgatggctacatctggttgcaaggaagaataagaaacatagtccagctgtgtgcccaggaggagaagagtgagttttaatgggtagctccagtctctgccacaattgtcgaaaggaagcagttgatggattggttcttggtgctaccaagggaagtgatcaggttttttaatccaatttttttgtgtcatgatgaatccattttttaacatttctgtcacaaacaataagcagtaatacacagttgtacaaatatgttctgtttttttttctcttctagtcaacgaaacggaatattccaatgctctttgtccggggagatggcgttgtcctggttgcccctccactgagagttggctgaaacaaagaatttgtcctgtatggaaaacgggagactttgtacagtggcctctctaaaagtacaaaacattcataagagaaacctgcatacattttgatattaagaaataattccggggattcttccactcctgaaatgagttgatttgcagataactcacaacttcttaagctaaatggtattttcatttttctcaagctctccaataaatatgaccaccaagatgcagaactctttcaggacttcttttgctccattattctcacagatacttactgatttttcttttctttaaattggtgtttccttgtagatttttttaagtgcggtcttctgtcttgtgaattatttaaagtaagcatgtcttaccttcacttagcacacatttgcagtgcacctactgtgtttgaggcaccaggtttgagtgctgggaaccagagttttatcaaaatgctttctgggccagacatggtggctcatgcctgtaatcccagcactttgggaggccaaggtgggtggatcacctgaggtcaggcgtttgagaccagcctggccaacatggtgaaaccctttctctactgaaaatataaaaattagccaggcgtggtggcgcatacttgtaatcccagctactcaggaggct

SEQ ID NO: 29057 - DNA, 2300 bp, Homo sapien
ccaggttcaagcaattcttctgcctcagctgcccaagtagccgggattacaggcgtgcaccaccatgcccagctaatttttgtattttcaatagagacagggttttgctggactcaaactcctgacctcaagtgatccgcccacctcgacctctcaaagtgctgggattataggcatgagccactgagcccggcctcaggcattcagttctgtgatcaacttgccttggttaaaacaaaggagcaagaaatttgtggcaggcatttgatccagaaatggggtgagcagatgcgagaggggaagaaggagataccaaggtgggctgggggacctgtgagccaggggaattcatgtttacagggcacttggcaccacgctctcggtggctgttattgtgcccatggataaggaaattgaggcaaagtggctggccagctgtggagccaagactggctttgggtgtctatggctccctgtccagtgctctttgcaaggccagcgagtccctgtgggctgggagccattttctccagcccttctcgggtggccgtcagagaccctgtctagccgcagagccttcccttcccagagggcccctctccagggcagaatttcaaaactaaagcatgatgctcacctgggaccccagcaaacagcacaggggcccaagcccctccagcattgtagcagtgggtgtggctctcaggaatgctggggctgcaaccagacagacctgggttcaagtcccggcttcaccgtctactccctgtcatgaacttgaccacattatgcatcctgagacttggtttcatagtctgtgaaatgcaggcaaaaaatatgctggggaggaggggatgaactaggaagaggaaaactagtaaaaatgaaagtgggctgtgtgtcaatccatctttctgaccatcccacacagactccaggcatgagaaaggccactagaagatcaggaagtggaggattaacccaggcgggggccctgctgggaaacacagggctctaccctgcaggacctcagggccaaatcctgtgttggggccacaggatggattaggcaggcctctgcctttaaggagatcccaggccaaaaggagaggtgggttaaccttacccagtctaagggagaaggtggacattccatccagtctcaggggggaggcagatactccattcattctaagtgggggattcagatgctgtctaacctgggcaggggactggaggagggaagagcaattgagtctaaggaggaaatgaacagtccatccattctgggggtgtgggagcagtggacacacctgtccagctatatgacaggcagctttgattttgtatttagtgtttctgcagtggttcagagtacctggtgtatatgcgaggctgcatgcattccccatcatttaaaaactgtttataaagcagctcctctgtaatcctagcactttgggaggccgaggcgggcgaatcatctgaggtcacgcgttcaagaccagcctggccaacatggtgaaaccccgtctctacttaaaaatacacacacacacacacacacacacacacacacacacacacacacacacaaattagccgggcatgatggtgggtgcctgtggtcccagctactcgggatgctgagatgggagaatcagggaacctggagacggtgattgcagtgagccaagatcacgccactgcactccagcctgggcagctgaacgagactccatctcaaaaataaaataaagtaacgtaaaataaaataaagcagctcctatgtgctggcttcatgccaggtactggatggagggtgatggcctttgaagctagctgggtgctttggaagcaggcagtgaggtgggagttaaggatcctctttgggattcagaatgcagaggggagtgtgaactgagaacccctctcttggggctgccgatgtcaggaacccagagcaccagaagttttcctttaagccttgtcttcccacagtgcttccaaggacaggacactgcaggtacagttatctgctctgtcacatctgcacagcattggtcatcttgttctcttcagatactggacacttgaaagtttgtctcaatgatctattaatgcactcaaaccacactaaattagctttgtcatctggtccaggttaggctgggcaattctgctggtttcatttaggctcacccaggcagctgaagacaccttggtgcagcatggtctaagttggccttgcctggcctggggtagctgccgttggctgagccgtacatctccagcaggct

SEQ ID NO: 29058 - DNA, 2300 bp, Homo sapien
gaggtcaaaggatcccatgggcctttccaagttgcagctctgaacacacaactcttccctcctcccacagccactgcccttgctcactctctcagaccctcaagctcagccctgccaccaacaaccttgctctcaggccttcgcacggcaggcacctctgctagaacttgcttcctctcctgccggcttcactgctcgtggcttagtcaaagcctccttttggttcaaacttcaatcctggagtcccctccccacgctaggacctgcccctttgcttcagtctttgtgccctgtgcgaccacacatgcacagggcgtctgaggagtttttgcttgacgtctattcctgcagttcatgagggaacctcatagctgaagcagagggatgtgggagacccagtcactcctcttcctcagctttcgtttgctcacctataaaagggtacagtgaccctgaactcaaaggagagtgctcaggtggccagaagcagatgtcacgtgggccactgggaccctagaggcactgctgatccccaggtgcttcctggaggaaggggccacccggggcccgcagagaagggtgggaagggtgacaggaaggcaaggaagggcatgtgcccagtggtcctcgtctgtcttggctggagccagtatgaggagcacccactggaaggtcaggttggagtccgatggcaggggcctccagggagagccagtgtcacttcgggatgctccttagcatcctggggctgtacagggagagtggctgcagagcccttccaggcagggatcctggcctgagtgggggcagctcttggtcggacctgtgtggtatttcttcttcttcttcttttttgtttttttgagactcattcttgtcacccaggctggagtgcagtggcgtgatctcggctcactgcaacctccgcctcccgggttcaagggattctcctgcctcagcctcctgagtagctgggattataggcacccggcaccacgccaggctaatttttgtacttttagtagagacggagtttcgccatgttggccaggctggtctcgaactcctgacctcaggtgatctgccccctcggcctcccaaagtgctgggattacaggcatgagccaccgcgcctggccggtatttcttctttcattctccgtgtaaatggtggaaggatcggctctctcctccccgcctcccaggtgcagagagagagagagagagagagggacaggagaaggctggggttcggggttctcacagcgtttccctctcatgctgccagggcggggcagtggaaaatggtccctgagggcccgttcattcaaataaggacaagaataatggcacactccccatctccatttaaaaatagtcacattagctgacactggcttggcacttcctagatgccgggtgcgttccgagttctctacgctgttaaccttggatcttcataacagccggaggagacaagcgctactattttcctttccattttatagatgaggacactgaggcagagaaattgagtcacttgcccagggtcacacagccatggcaaggccaggattctggagctctgtacctggcttcacaccacaagctcaggccaccctcccggggcataccgagtctcccagaacgtggacgatcgcccagggcaacgcagtggagtgcgagcccggtctggtttgcacctggctgctccaggagccctgggcctcatcctaggagcctggcggaagaggcgagcggtggagtttggaggctgctgtgaaggaaaggactaggcgggtcgggtcgggtctgtcctgctcttcttccgcaggcaggaggcgcccagggcgggctgccgcacctggcaacgaacgttcgccgcgcggcatgagggtgtgcgcgcgcgctcggcgagcccgggttctttgtgtgtccgagcccatgcgcgcgtgcgtgtttgcgtgtatgtgtgtgcatgtgtatgtgtgcgcgcgtgtgtccgcacttggggcggggctggaagccccggccccgccccggccccgcccccggcccggccgagctggtatttttccacccagcaggatgggtgatgctgagagctgcctgctcagacaacagacacgcgaggtcaggaagaagccgcttataaattaccgcttccttcgcgccgccgccaacgccgagccccgaggaccgcaagcccagaggacaagctgcgccaagagggagtgctggagctgttcacccagcgggtcagagagcgagccgggcaggccagcccccggccggcggaa

SEQ ID NO: 29059 - DNA, 2300 bp, Homo sapien
acacgcctgtaatcctagctactctggaggtgggaaaatcgcttgaacccgggaggcggaggttgcagtgagccgaggtggcgcttctgcactccaccctgggcgacacagtgagactttgtctcaaaataaataaataaatacatataaaaacacaatatacctaaaaacataacatattacacattttgtaatgtataatatacaatataatttaataatataatatgacacaataatataattagtaatgaaataccaaataaattttgtttgataaataataaatgactttcaggattcatattaatgatgcaaatatatttcatatatggaatgtaaaacaatatttattaaataaccttatgtatcaaatagttaaacatagagttgccatatcacccagcaattccactcctaggtatatgcccaagagaagtgaaaacatgtgtcatctccacctaaaaacttatacacaaatgttcatagtagcattattcactgtagccaaatagtggaaggaacgcagtatccaccaatggatgaatagataaacaaaatgtggtgtatccatacaatggaatattattcagccacaaaaaggaatgcaattctgacacctgcaaaatgtggatgaacttgaaaacattatgccaagtgaaagcagcctgtcacaaaggccacatggtgcatgattctgtttatataaagtgcccagaacaggcaaatgcagagatgaaagtagattcgcggttgcctagggctgagggacataggaagatctttggggatggctgaagggaacagggtttcttctggaggtgatgaaatgttctcaaatgcatcgtggtgatgtttgcataattgtgaatacactaaaaaccactgaattgtacacattaaataggtgactactgtggtatgtaaattatatctcaataaacctcttaccgaaaagcagagtgacataatatagtagatactacagtagatcacagcacaataatacaataaaatgacactgccccccagaacctgctttacagcatgacagtcaatcccagccactgtcttccctagtccttgccacaccccacgaggtgggaatcaacgatcccattgttcagatgaggaagccaaggctcagagtgagctgtgatctgtctggtcccagactgagtcagggctcccacttccttgcactctggctccagtgcctagggccccgggatgggcaggccctggcaggaagacctccgtggggcggctcacctgaatgctgggcccacctgtcctacagtgtcgctagcctccagcacggtggggccgggcgggcagattgtgcacacggagaccacggaggtcgtgctctgtggagaccccctcagcggctttggcctccagctccagggcggcatcttcgccaccgagaccctgtcctccccacccctcgtgtgcttcatcgagcctgacagtccggctgagaggtgagcctcctgccccctccctactgagcctgccactctctgagagaaactgagtcacagcaccaagccctagcttcacaagcgcatctcacttaaccattgcatcagccccagcaccagccccattttacagatgaggaaaccgaggctcagagaagctgactcacttgcccaggattacacagctcacccatggaatcccagggcttgaacccctgtctgcctgaaggcagagtcctctgtatacacaacttgtaaggcccatgccatcatccccattggacagacagggaaactgaggtccagcaaggtccagcccttagccagattcctgaggatacacaggtgggccagggcagagctgagagtcaccccagaccaggaggtgtgacccaggttcagtcctgccctgcatggcgttcttgtctcccaatggacctgtcacggagcctcttctctctgccgggccccctgggttcaggtgtgggctgctgcaggtgggggaccgtgtcctgtccatcaatggcattgccaccgaggacgggactatggaggaagccaaccagctcctgcgggacgccgcactggcccacaaggtcgtgctggaggtggagttcgatgtggcgggtgagtgagtggcccaagcttcctcctcatatttcagggccctgcacccctcctctctttatcctgcctcgcctgtgcaaacgctccaccccatccccctctgtgcccagtgcccttctcccaggggctttgcagcttatagtgggaagggaagccttggcacgggagggagaagtttccacacca

SEQ ID NO: 29060 - DNA, 2300 bp, Homo sapien
acagaggttggggcagggactgactacagtagaacatcaagggagaattttgggggccaatagaaatgttctaaaacttggtcgtggtggtggtcaggagacattttccaaagctcattgacatgctcaccacaaagagtaaattttactatatttaaatttttatttatttttattttttattttttgagatggagtctcactctgtcacccagactggagtgatgtggcacggtcttgactcactgcaacctccgcctcctgggttcaagcgattctccggcctcagcctccaaagtagctgggattacaggtgcctgccaccacacccccctaatttttgtattttcagtagagatggggttttgccatgcctctgttggccagattggtctcgaactcctgacctcagctgatctgcccaccttgacctcccaaagtgctgggattacaggtgtgagccaccatcccccggtctaaatgctaaaaagtgaagaataatataagttagactaatatactaatatacacacacatacagattcctggagcccacccccagggtgtttcctttttcaggtcctggttggggccaagaattttcctttcttacttcccttttcttcctccttccctccctcttccctcccctcccctcccctcccctcgctttccttctttcctttcctttctttcctttcctttcctttcctttcaagtaattagaaaatgaaatttgaaaaacaatccaatttctgtagctttaacacactttaaatgcctaggaaaggcaatgccttggaaaagaaataccttcccttcccttcccttccctttcttccttctttctcaccccctctctctcttctgtctctgtctttctctcttttcgagacagagtgagggtctcagagtctctctgtcactggaatgcagtggcgcaatcacagctcactgtagtctcgacttcccaaattcaagtgattcccctacctcagcctcctgagtagctgggactataggcatgcaccaccatgcccggccaatttttgcattttttgtagagatggggtttcactatgttgccaaggctcgtcttgaacccctgggttcaagtgatccacctgcctcggcctcccaaagtgttgagattacaggcatgaaccactgtgcccagccaataatttacatttctgacaagttcccaggtgctgtgggcctggggaccacattttgagaatctctgcatcatactgttctaccttctttatgtttgaaatgtatgaaagattttctactaactcaaaagaagcaaaaaagacagatttcattgcagatgaagcaccccttgacgtatcttagagagataaagaagacatggaaaatatgagagaagggtgggtgtggatgtgggtcatggagagtaaaatggaaagtcctaaagtacatctattaagcttttcaaaagagagagagctgttggaaacaacatttgaagaaacacaagggagcgctttctcgaattagagtgaaggaggacagacttatctcaggctgcctagaacgcctgagaatgtgattcataaactgtaaagtgcagtcctcatgaggaagcattaatcaggtccacccaagattgagtttcgtctcggtcagagctgtctcacatgagctgctgtgcctgcgtttgagagagctccccctcccagcaggtatgtaagcacagccctgggtagtagagtcagcagaactgggttctaatgcagattgcacaactctccagctgtgtgacaatgggcatgagttggccttctctgagccccagcttccttatctgtacagtggaataatctgatccatggtaacaacattcacagggttgttgagacagtgaaccacagaatggctgtgaagctcccaatatgtagtgtagtgctcaaagaatgttactcagccccaagagcaggggccaggctttctttgggaggaggagctgtgaggattctccagcagagaatcgggtggagctggtggcaggagggaacccatcttacaggccacgtccacagagtggaaaattcccaaagcagaagaggtctgcaggaatggaaacgaaagtggaactcggcctttccctctttctctcctgcagacgatgggccctactccaaaggaggcaaggacgcaggaggggccgacgtttccctggcgtgccgcagacagagcattccaggtaatgaggcttccctcattccctctttttctgccctggaggcacagagagccctaggtgggggtca

SEQ ID NO: 29061 - DNA, 2300 bp, Homo sapien
catcactcatttaaatgcacctgtatggagagcaaattttgttttgagaaggagcagatacaggagtttgagaccagcctgggcaacatggtgaaaacctcatcactacaaaaaatgtaaaacttagccaggcatggtggcacctgcctgtagtcccagataccagggaggctgaggtgggaggatcatctgagcccagccagtgtgttgcagtgagtggagactgcgccactgcactccagcccaggtgacagagtgagacgctgtgtcacaaaaaaaaataaaaaaaataaaaaataaaaagagagaaagagaaagagggagaaagaaggggcagatctaactccaactgcctgggtgccatgcgcctgtcctccctgactgaagaggctgtagatggagggaatggaggcgagtggggtgaggatctgttagagcagttcacatgcattccttcccgcgtggttgaagctaagactgctccagagtggcctctgtgccctggtgaaggccagggtcttcatggcgagcctctccctgaccactgccagggtaccggtggccaaattgagtgcgtgtacccccgtccctgcatgatttgagtcgtccaggaaatgtccactaaattcaggtcttccctctgcaatctgaccctcaccacccaccctgtggctgagaccttggcatcactgctggtcaagggaaacttgcctggcacctggacccttcccccagaaacagatctcaagttgcccaaagaggaaggcaccataggaagtgggcggcagggcagggtcttgagtttgcagatacaaaagcacaagtagccctgccccagatttagaacctggattattctaaaggtgccactagcgttgggctggcaggagccagtgtggggcggcccaggaattgtggctaaattccatgctggggtcactgttctggagggaacccacaagaaacctcgggtccctaactaccgggcagccctctcccactagctgcagggcacatggaagaaatatgaggctcgtgtgttcccacgcggtcaggaactccatgggagccaggccttgtctgtctggttctctgttgccagacgcactgtgcagttgtacaggttgttgacatccaccattcagtgccctgtcaccatcaccccacccttcttggtgtctgaccctcagttggtgccagcacacactggtgggatggagggcaggggaaattgggtgcagcctgccaccccttctcacagacaggtagaggaggagcctcaggtgtccattaagatcagcctggtcagtcctgagccaatgtggaggaatcccaggagtgtgcaaggctaaggcccagctgggtctgggacggggcagagcctgccaggtgtggctggagcctgtgaccaactggccctgcctatcaagcccagaggcgggcagatcctccacccagctcacttggtcttcacaaaaagctgggtggccactccacgtggcaggctgccgggttcatctttcctaagtcccattttaccgagggaaaactgatacctaggagaggtagttggaacattggtgggagggccctggagggtctccaagctcaagggtttctaagctgagacctacagagacgccctggcattgttcatgcagtcaaagagtctgtgcttcatctagcttatgtcctggggttctgtgcaaattctcttggaatctgccgtttagaaaaaaaaaaagtttggaaagcactgttccctgtctccagatgaaaaaactgatgcctagtgagggaagagtcgtttgccaaagtcccagggcaagttagaagcaggctctctctctgcctgagagccctgggggaagccccaggcatgccaccttcaaagaccccctgtccagacccaggctgcaggggtggggcatgttggaccctgtcctggagccagccttgacaatagccatgtcccctttaagcagagagccgcccgctgcagtgggtggactcggtgcccagccagtgggagctgtgagcttccctcccacagcccctccctggggaggggagggagggccaagcagcgtggctcccgagggagttggtgggcagcaggggagacaatagcgaacatgctgtgtgggctcagccgggagacccctggagaggcgggtacgtaatggggggtctgtgggcagagtgatggggctgaacacatagatccctctggagctgctgcccagagagaggggactggatggctgagacctgggactgccactccctggagacccagg

SEQ ID NO: 29062 - DNA, 2300 bp, Homo sapien
attttgtgctgctataacaataccacagactgggtaatttataatgaacagaaatttatttggcccacagttctgaaggctgtgaagtccaagactgagcacctatatctggtgagggccttcttgttgcatcataacatagtggaaggcaacacatgggcaagagaaagcaagacagggcaagagtgggctgaactcgcttttataacaaatctactcctgcaaaaactaacccactcccacagtaacgatattaatccattcatgagggcagggccctcagaacctaaacacctcgcattaggttccatcttccaaaactgttgcattggaaattaagtttccaagacatgaccctttggggacacatttaaaccacagcaaactgaaaacatatttgcacaaacgcttgtacagtggatgaatattcatagcagcattattcacaatagcaaaagggtggaaacaacccaagtgtccattgatgagtgaatggatggagaaagtgtggtatattcatacaatgcaatattgttcattgttaaaaatgaagtacttaccagtcatgctacaacatggataaacctcgaaaacattccactaagtgacagaagccagttacaaaaggccacctgtgatatgattccatatataaaatatccagaacaggcaaattcatagagacataaagtagattagtgattgccagggaatgggagaggagaattggaactaactgctaaaggatttctttggggaggatggaaacgttctggaattagatcatggtgacggttgcacaacatagtgaatgtactaaaaaccactgaagtttacactttaaaatgatgattttattttatatgaagtgtctctaaatacatgctgtattaaagaaaaaaactagatgtcctgggaggagctggaagaagccaggcagcacctagttcatgtggatgaaggttggttagaagaaagcagcccagaaatgaatggttgggtaagaatataaggggtgcttgggatctatgaccaaccttatttgttttagaaatgccctgtttatgcattggttgaatgcccagcacttggcctccaagagcccagcatggatgctccagaagttagcactcttctgggtttgcctcagtgtgggggaattagcctccagcttgcccaatgaagaaagctcctgctctccagggagctagagctctgcctacattggaggtgaagaatggtatactctggtactaggaaaaaaaacttgtatgtggcagataaaaactgaggtcaggaactcagaggagacaatggggtaccaggatctgtggactgaagaaggaccatgccatttaactccagctcccctagaagaaacactttggtaagatcatccctctgtgtgtgccatgctgtaaggtttatggattcccttgataacatctgaagtgatgctgccactgtcagtgccctcctgctggtggcttcttattgaaaacacctgtgtctctgcctgcggtggttctctggctatgggagtaagctcagctgaggcaaagtgcaggctggaaatgcctgggagtgaatgcccaggagcagccctcaatcagtgatcaacggcagctggtgcataaataccccagctccctcacccctcgtgggatgggggttggggaacaacaacctctcaaaggtctccagcagaattgagcctcagttgcccacagtggtaacttgcccattagtaccatcattgctctctctcacttccctgtgtgggttgtgagagagaatcttggcttctggattacctaccgactaaaccacttgcatggtaatcttagtctcagagtctgcttctaagggaacccacactcagaaaagaggtaacatttattgaatgttgactgtcttccatggattgtgctgaagtttacacagagtgtctcatctacccttacaaaacctctgagtttggcattattatactcacttaccagaggtcttagccagctcaaactatcatagactggctgacttaagcaacacacatttatgttttgcagttctggaggctgggaagtccaagatcgaggcagcagcagattcagtgtctggagagggcttgcttcccggtttgcagatggacatcttattattatgtcctcacatccaaaaagtaagctctgttatgtctttttataaggcactaatcccatccatgaggattctatcctaatgacctaatcacctcccaagggccccacgtcctaatgccatcacactggggattagga

SEQ ID NO: 29063 - DNA, 2300 bp, Homo sapien
attaactcaatgtctttgagttattttttaactgaaggctccttcacttgctagctgggaaatgacccctggcatgccatttaagcaactgagcctcattttttttccttttaaaaaaaattattattaataccttttaatgtttcacattttctttcagaagatttgtaacaaaaacacatggaatttagtatgtgtttcagtaaaatgggtaaatacagaatctgaacaagacaagtctataaggtataatccttcttgtggggacagaacattccactccattaagaaaagagaatcacaacattattaggcccgattatctcatattgcttactgttctaatttcagagactggcggacttggagaaataaacaaatgaaaataaataaataagactgaacacagtcaactgcctcaattcccctctccttttcccttttcccattttctccataaagacagatgagatgaggatgtgatgagtctcatttttcttctctctaatatggtggataataggtccgcttctaggattcttgcaaggattatataatataatctatgcaaagagtcatacacatgccccacatatactaaatgccactgttacaatcattatgatcactttcgtcttgctgctgtaacaaattgccacaagtttggtggcttaaaacaacacaaacgtattctggtagagttctggaagtcagaagtttgagatgagtgttacaagactaaaatcaccgtgtcagcaatgctgcattccttctggagactctggaggagggctcatttctttgctttttctagcggcctcctgcatacctaggcatgtggtcccactctccctcttcaaagcatctctgatctctgtctgactctggccatcctgtctaccccttataaggatggttttgatgataggggacccacctgcacaatccaggctagctccccatctcaatcgctttaatttcatcatctctgccaattctcttttgctatataaaggtcaccatatacccagattctggggattagaaggtagacatctgggagtcggggtgagggtgattggtctgtctaccataatcattaacatttttatcaagactagctcatttaactcatctaatcctcactaagacccattaggtaaataaaattatatccccctttggaaactgaggcacacggaagttaagtaacttgcccaaggtcacacaagcagtaagccgtgaagagcgattccaacccagaaagtcagctttcgagttcacgtgttctttgttttttttttttttgatctcgactcactgcaacctccacctcccaggttcaagcgattcttctgcctcagcctcctgagtagctgggaatacaggcgcgcaccaccacgctcggctaattttttttttttcttgtattttcagcagagacggggtttcaccatgttggtcaggctggtctcaaactcctgacctcctgatccacccgcctcagcctcccaaagtgctgggattacaggcgtgagccaccgcgcccggcccaggagttcacgttcttaagagctgaaatatgtaaagtggcccataataagcactacattaatgttagctattattcttgttatttctactaagattaatataataatccttatctcgtacgctcttttaagaaccaactatttaacgtgtgaaaagtgccaggcagcaggtcctggaattgcagttaagattcttccggtcctcccaatccacctttcccgagacgctcgagttcacttacttaagcgtcagccttccccaagatggcgttatctttgtcgccaaccccacatccgccccacccaatatggcgtccatcgcaatcaaaagctttattccgcccttctcaagatggcgcccacaccaatccttgttaccttccgccctcaagatgaccttagcagttagcgtcaacctccgcactctatgacctttccaaaatgatggtgaacgtaatacgcaccacactctgaccttctcaagatggcgctgagctgacaaactcgcgtcgcaaactcacgcaaactcagtgtcgctgtcgaagacacttccggttgcgacggaggtaggcttacgaggcctgtgtcgggtagaaagggtccttcctggaccgggaccctctgccacgaccatggaccgtaggaaaaagcctttggacgtcacggcctcctcggtgagtgagggtatgaggtaactccacgggctccgggttcaccgtgtctccatcagacaagaatgtcgaccta

SEQ ID NO: 29064 - DNA, 2300 bp, Homo sapien
acttgctcccaagttaaacatggccacagagtattgtgaatgtttaatgtatgcctgggaaaaatttattggccaatactttagttactaatgggaggattatgtatagtcggaccataaagcgtgtaaaagcagatcacttagagccgctctgtccaggacagcagcactagatgcatgggccctttgagcacctgaaataaggttagcatgactaaggaactgggttttattttttcaaacttgatgttcaattcagttactgaaaaactttactatgtttaactatctttggaacaacttggatatgaatttgtgtttttcaactgcatattttacaaaatctaaatacagatcaagtattcctgatgaaacgttagcatccaaattatgctataaccagatacacagtgagttttgaattcttagtgtgaagaataattttagatctcactaataatttgcatatattgagtacatattgaaatattttggatatgctgagttaaataaaatatgttataatttcactttttaaatatggttgctagaaaattgaaaatgacactctgggcttatttttttttttttaattttgagacggagtttcactcgttgcccaggctgaagtgcaatggcgcaatctcagctcacggcaacctccacctcccaggctccagcgattctcctgcctcagcctcccaagtagctgggattacaggcatgcgccacagatttattttttatttctgttggagtgtgctgttttaagagtatggagctgacatttaagaattctaatgccatctgctggatacactggtacaagacaggcccgtgtcacagtaagactgtgatggtgtgtcaatactcaaagaactggatctgaaacagaaaagggctcacaaaacactgaactaaattatactgttaagaggggattataaataggtttatttagtttttgaaatcccagagaaaatgtgactcacagttatcttcagataacagtgaccatgagccaacgagcataactgcttcgccgtccacccgggtgctgcaggcatggatgtggtcacctgggatggaccctttgtgatgctggctcccacacctacagctcttcctgctgcctgccttgtctctgtctcccttctcctttctactccacagtcagcctcaagtccttctgctctgggttacacacacatcctctttccatctttctttgtctattcattgtttttttttttttttttgagacacagccttgctcttgttgcccaggctagagtgcagtggcgcgatcttggcttactgcaagctccgcctcctgggttcatgccattctcctgcctcagcctcctgagtagctgggaccacaggcacctgccaccacgcctggctaattttttgtatttttagtagagacagggtttcaccgtgttagccaggatggtctcgatctcctgacctcgtgatccgcccgccttggcctcccaaagtgctgggattacaggcgtgagccaccgtgcccagctgttttctttctaccctttcttttttctatttttcctatgattctagcatgtctaataattctatttttctttttagtattccaatttttctttttgtctcctccctctttatcctacaagctgtttcagtaggttttgtagttttagctcttacatttaggtctttgattcatcgtgagttgattttttgtatgtggtgtgaggcagaagtccaaacccattcttttgcatggaatattcacttgtcccagaaccatttgttgaaaagactgctctttccccactggatggtcctggcaccactgtcaaaaatcaattgaccacggatatatgttttatttctggactctcgcctctattccactgatctatgtgtctattcttatgccactaccacactgtgtagattatcgtagctttgtggtcaatcttgaaatcaggaagtgtgagtcctctttgttttttctctagattgttttgactattctgggttccttgcatttccatgtgaattttaagattagcttgtcaatttctgcaaaaaaggcagctgggttagttggtttttatgtgtatttattaaaaaaagcaattacccgattaggctgacagaatgattaggctgaccattaaaaggactggcaactttatcctcagagtttagaggtaagtttgtaagaattcaggatgtttgtctaagattgcttgatactagggcaacaagactgagagcagagggcactaaaaagactgtctagg

SEQ ID NO: 29065 - DNA, 2300 bp, Homo sapien
gatgaatcaaagacctaaatgtaagagctaaaactacaaaacctactgaaacagcttgtaggataaagagggaggagacaaaaagaaaaattggaatactaaaaagaaaaatagaattattagacatgctagaatcataggaaaaatagaaaaaagaaagggtagaaagaaaacagctgggcacggtggctcacgcctgtaatcccagcactttgggaggccaaggcgggcggatcacgaggtcaggagatcgagaccatcctggctaacacggtgaaaccctgtctctactaaaaatacaaaaaattagccaggcgtggtggcaggtgcctgtggtcccagctactcaggaggctgaggcaggagaatggcatgaacccaggaggcggagcttgcagtaagccaagatcgcgccactgcactctagcctgggcaacaagagcaaggctgtgtctcaaaaaaaaaaaaaaaaacaatgaatagacaaagaaagatggaaagaggatgtgtgtgtaacccagagcagaaggacttgaggctgactgtggagtagaaaggagaagggagacagagacaaggcaggcagcaggaagagctgtaggtgtgggagccagcatcacaaagggtccatcccaggtgaccacatccatgcctgcagcacccgggtggacggcgaagcagttatgctcgttggctcatggtcactgttatctgaagataactgtgagtcacattttctctgggatttcaaaaactaaataaacctatttataatcccctcttaacagtataatttagttcagtgttttgtgagcccttttctgtttcagatccagttctttgagtattgacacaccatcacagtcttactgtgacacgggcctgtcttgtaccagtgtatccagcagatggcattagaattcttaaatgtcagctccatactcttaaaacagcacactccaacagaaataaaaaataaatctgtggcgcatgcctgtaatcccagctacttgggaggctgaggcaggagaatcgctggagcctgggaggtggaggttgccgtgagctgagattgcgccattgcacttcagcctgggcaacgagtgaaactccgtctcaaaattaaaaaaaaaaaaataagcccagagtgtcattttcaattttctagcaaccatatttaaaaagtgaaattataacatattttatttaactcagcatatccaaaatatttcaatatgtactcaatatatgcaaattattagtgagatctaaaattattcttcacactaagaattcaaaactcactgtgtatctggttatagcataatttggatgctaacgtttcatcaggaatacttgatctgtatttagattttgtaaaatatgcagttgaaaaacacaaattcatatccaagttgttccaaagatagttaaacatagtaaagtttttcagtaactgaattgaacatcaagtttgaaaaaataaaacccagttccttagtcatgctaaccttatttcaggtgctcaaagggcccatgcatctagtgctgctgtcctggacagagcggctctaagtgatctgcttttacacgctttatggtccgactatacataatcctcccattagtaactaaagtattggccaataaatttttcccaggcatacattaaacattcacaatactctgtggccatgtttaacttgggagcaagtagtggcaaaacctcctatacaaaaacgtgaccacacctcattcatgcctttgtagagctaagcaaaatgctttagatcaaaaattgccttgaattatttacgttcattgtaatctctcctctaggcctttgtgtgttttgatagagttcgtttgaattggctcaataaatcattttatttgctgcagaattcccaaagaacattcagatccatatacatgagattcctgctgcgtttagccatacatttgccagacttgtgatgtcgtttattccctgtgaaagctcaagtgcagcccacagggaggttttcagctgaccttgttgtgacatgcagatgaggtagtagagtttagaatttggaacggggatgggtactggtctttacagttaacacaacctggagtagcccatgccatactgtgtccttttaagtcagtaaattgaactaagtcggttattcggcaagcagttcctataaaaaactacatggctaaggtgagtgatgatcactgaaaggaattcattgacccactgaaaaaatgagagtagatgaaactactgcagtcatcctgcctgcccctgt

SEQ ID NO: 29066 - DNA, 2300 bp, Homo sapien
taaccatatgttacaagagtaattatcttccaatttcaccttccaattacatcttaatttaactttcattcctgggtgcctgctggaatgtccaagccaagcctgatgatttctaattaggctgctgttaggctggtccagtgatccacgacagggcactaccaggaagacagcacaggacagtgtgggaagagcatgctcacgctcaggaaggctgggctcccatcccatctctgctatacgtcagctctgtgatcttgggcacatcattttgcctctctgagcctcagtttcctttttggtaaaatgatgaaatacccccttttttttcatagggccgttgagaagttccggaaaataacagacatgatgcctaataaagtcgactggcagacatttcctacaccctactacgtgttaggcactggataaaaaagcaggctctcaggctggacagcctgggtttcaatcttgtctcagcccttcaataagccagtgaccataaaatctccgcacctcaattttcccatctataaaatggggatggcaatggtactcaactcataagatgactgtgaaaactaaataaactgatagaagtaaaacacctaaaagcaataccaagtcatattaagtacccaataaatattagctggtatttactggttgctctgctacagacactgttctttctaggcaccttacgtgttttagtctatttaatcttaccaaccccatttttcagataaagaaacaggtgtagagaggttgaataacctgcttaaggtcacataactaagcatatgatggttctgagattcagtcctatggagtctgtgaaccaccatgccatgtgatcaggaaattcagaccatggggcacggcctgaatgtgaggctggtatcattaccatcacattgaaaaaggaaccaggtttacactggagacaaattacaggaaggctgaacccaagagcgacaacggctaagatttcctgggaccaaacctgcctctaagtttattccgactcactccatcccccagattctcagagaagggagggtctgcccaagcctcatgcaggaaaacgtgggaaaactggaaacgctctcaccattgttataaagcgagttttattaggagtgtaggaaaaagctagcctggctctgttcagccacgccagcacaggcaggaggcaaccccctttccaagcagtggctggctgggctctgggcctctgtttcagcctcttccattcccacaaagtggcacccccgatcctgctccccagttctgtgacccacactcactaactgtccaggggcctgtatgcccagcaataacagggcctggacatggaaggtggctgccacactcccagactgtctaaacgcgcagcctgcacctcactgctaaaacaatgactttttttcattaaaaagatttttaaaagaaaaaatcctacacacacacacacatacatacacacacacacacacacacacacacacaccagcaggatatggttccaagacagccaaaatggtggcttcctgtttctttagggatgtgtgttttggagtatggctttggacaagggtgttggtcggggagcgggctgccttctactaaattctgtgagaaaaagaaaatagagtggtgattgctccttggcaggcagatgaagttagctgggactgttcccttgcaaactctcatcttaagggaactttctgccctccccttagatggcgttgggaatcccgaggactgggttccatgcaccacccatctccgagtctcgctttctaaatccgttaaatggcactactctggagggatccctgcgatttcaaacacattttgatttcacggaatctctgaactgcagggatgagctgggggagtcaaattcatagagcaggaacgcgatggactgggggtgggggaacctggagcggctcagcgcggcggcgaggagcgtccccttggcattgggtcccctaggggaggcacaatggaggcccccgaccagggcgctgcgagggaggggtgcgctatagggggattaatttagggctttttagtctcatctggagagtaagctccaagcctcggggtctaggaggagagaagggagcaggaatcctccttccggtatgccgagtactgaagggctgggaactggtcccggagtcgaagagagctccgggacgggccccgtgggtcaggtgttgcccctgagagatgagcaaggaccggtccgggacgctggggaatggagggcaaaggttttgggg

SEQ ID NO: 29067 - DNA, 2300 bp, Homo sapien
ttttacttttttttgagacggagttttgctcttgtcacccaggcgggagttcagtggctcaatcttggcttattgcaacctctgtctcccaggtttaagtgattcctctgcctcagcctcctgagtagctgagactacaggcgtgtgccaccacacccggctaatttttgtgtttttagtagagacggggtttcaccatgttgaccaggctggtctcgaactcctgacctcaagtgatctgcccaccttagcttctgaaagtgctgggattacatgtgtgagccactgcacccagccttacctatttatttttaatgtgcctacaagataatttaaaattgcctatgtagtgatacatgtggctcacattccagggacagccctggattagagattagtaatgttagatgtttcagggacaacactgggcctaacatgagtgggaagagaagagtttgctggcagagatctcccggcagtctgcttcatcttccctcctgttaggagccaggctgttattttgaggccacttgtgtcatacccaagccttagtgggaatggagctgggagattagaccaggctgaaggagaaacgtgggagtcctaatctatgggtggcagggatccatgcagtacttttgaagcagagatgttgggatggagatggattctatgcccgcagtatgcaagggagcttagggggccaggcaggtgacaaggaagccagggaggaggcatgggcagtcttgtagcagagagatgctgagctcaaaagttggcaaccactcatttgaccgttccccttctctagatccttcttatcctgcaaatcttagctaaaatatcaccttctttaagaggtcttccctggccacagcagcccatgcttctctaattccagttgcattgtagtctgcaccacatcttttattctgccatggtcagaaggtcctcagcatccacagatatccatgtggcaagtacatccttttccagagatccatgttggcacgtactatataatttctcccatgaaatttgcatgcccatgaaatttgggtgtaggcctggctggacacagtcctgaagcatgcagattccagacgtgacccccagcagaagcacacatcactctttcaaacctttggcgtgtcattcatgaagggatgaaatggcagctattcagtcataatattccaagggtccccggctctaccctccagttgttgtaactcaactgtgagttctcagcagagtctgttttctcttcttgaccctaggagaccctgccatctgcagtgctgtgcgtgtagctagtgggtacccaatggagtagctgtagaaggggggatgtaagctccatgagggcagcagggagggtgacagcaagttcagccttttcccatggttgctgggtcatagaaagtgtttatcagtagctgctggatgaatgaatgcactgacctggacacttcatttgaggagcacaggatttcatttggttgattttcgttagttgggctgcgtgtagaagaaaggtctgttcactttgtttacagaatgaatctttagtggaaaatcaaggggttttaaagattctggtggagggcataagcctaagacaaagcacgggaggtgggcttcacatggatggacggaaccatctgtggcgtcccctgcaactggtgtgtaggagactctgaatggcaataaagttaattgtactttttctccttttctctatttttgtcatctagattcaccaaaaccacctgtcgctcccaagccaaagactaccagtccactgacgccagtgaccgcgcccaaattcccttcctcagccaggcccgagagtcttcacagtccaaactccatgttcaggggtccgaagccccccattgcccccaagcccaggctgactgccccaaacgagtggagagccagtgtgtacctgaatgacagcttgaacaaatgcagcaacgggcggctgccctgtgtagacagggggcttgatgaggggccccggtccatcccaaagtgctctgagtcggagaccgacgaggattacatcgtggtccccagggttccgctgagggaggatgaacccaaggacgagggcagtgtggggaacaaagccctggtgtctcccgagtcctctgcggaagaggaagaggagcgtgaagagggaggcgaggcatgtggcctggagggtacaggagctggtgaggattcagtggcccctgctgctccgggtgcaggagcgctgagcagggagggtgaggaaggcacagaccttgctc

SEQ ID NO: 29068 - DNA, 2300 bp, Homo sapien
tgtcattcatgaagggatgaaatggcagctattcagtcataatattccaagggtccccggctctaccctccagttgttgtaactcaactgtgagttctcagcagagtctgttttctcttcttgaccctaggagaccctgccatctgcagtgctgtgcgtgtagctagtgggtacccaatggagtagctgtagaaggggggatgtaagctccatgagggcagcagggagggtgacagcaagttcagccttttcccatggttgctgggtcatagaaagtgtttatcagtagctgctggatgaatgaatgcactgacctggacacttcatttgaggagcacaggatttcatttggttgattttcgttagttgggctgcgtgtagaagaaaggtctgttcactttgtttacagaatgaatctttagtggaaaatcaaggggttttaaagattctggtggagggcataagcctaagacaaagcacgggaggtgggcttcacatggatggacggaaccatctgtggcgtcccctgcaactggtgtgtaggagactctgaatggcaataaagttaattgtactttttctccttttctctatttttgtcatctagattcaccaaaaccacctgtcgctcccaagccaaagactaccagtccactgacgccagtgaccgcgcccaaattcccttcctcagccaggcccgagagtcttcacagtccaaactccatgttcaggggtccgaagccccccattgcccccaagcccaggctgactgccccaaacgagtggagagccagtgtgtacctgaatgacagcttgaacaaatgcagcaacgggcggctgccctgtgtagacagggggcttgatgaggggccccggtccatcccaaagtgctctgagtcggagaccgacgaggattacatcgtggtccccagggttccgctgagggaggatgaacccaaggacgagggcagtgtggggaacaaagccctggtgtctcccgagtcctctgcggaagaggaagaggagcgtgaagagggaggcgaggcatgtggcctggagggtacaggagctggtgaggattcagtggcccctgctgctccgggtgcaggagcgctgagcagggagggtgaggaaggcacagaccttgctcttgaggatgaaggggagggctgcgctgatgagccagggacactggagcaggtgtccagaagtgaggaggaagagaagctagtgcagccacacagggagtgcagcctggaggacagtgggccttgggctggagagggggtcttccagagcgacctcctcctgcctcacatccatggagaggaccaggagccccccgacacccccggggaggcagaggaggatgatgaggaaggctgtgccagcacagacccagcaggggcagatgagggttcgggtcctgacaggcccacggaggacatgggacaggatgctgaggacaccagtgaggagccccctgagaaggaggagctggccggggtccaggaggcagagacagccacagactgccctgaagttcttgaggagggatgtgaagaggccacgggtgtcacaggtggggaacaggttgacctcagtgaaccacctgaccacgagaagaaaaccaaccaagaagtggcagccgccaccctggaggaccatgcacaggatgagtccgccgaggagagctgccagattgtcccttttgagaatgactgcatggaggacttcgtgacttccctcacaggaagcccctatgagttcttcccaactgagagcacctctttttgcagcgagagctgttctcctctttctgaatcagcgaaaggtttagaatcagagcaggcaccaaagctggggctgcgtgcggaggagaaccccatggtgggggctttgtgtggccagtgtggctccctacagggtggagcggccgagggtcccgcagcccctgatgtggtggtcgtgctggaggaggaggccttggatgatgcactggccaacccctatgtgatgggagtgggcctgcccggtcaggcggcccctggagaaggagggcaggctgcatcggacgccctgggtggttatggctcgaaagaagaattgaactgtgaggcagagggtggcctggttcccgcggacaggaagaacaccagcacgagggtccggccccactctgggaaggtggccggctatgtcccagaaaccgtccctgaagaaaccggacctgaggcgggctcgtcagcccctggcattggaggtgccgcagaggaggtgggaaagacgcttttgtcatt

SEQ ID NO: 29069 - DNA, 2300 bp, Homo sapien
ttagccaggtgtggtggtacatacctatagtcccagctactcaggaggctgaggtaggaggatcgcttgagcctgagaattcgagtctgcagggaactgagatcacgccactgcactccagcctgggtgatagagcatgaccttgtctcaaataaaataaatacatttttaaaataaaataaaatccacatttccagatgaggaaactgaggtgcagagaggttaaataagttgttgaagaacatacaagtaatgagtgccaggaaatggtctgcaaaatgcttggaacttgcctccagcagcatggtggcctcctctagaaaccactgatgcctgtcccacctgattgctctctttcctcccacaggtggaaggacagtccagagcccttgtcatcgcacaggaactgctatcttcagagaaagcgtgagtccccaaggagctgcctgtggccttgagcttataaacaaaacgtcaccctcctgggcttacacaggatggggattaatgcagcctcaaccctctttccctctgcagatacgtggagatgctccagcacttaaatctggtgagttaatcattttaattgtccaaaactaattgcccttttacaagtctgtgatataagaggcaggaaagcaatgtggagacagaggtgatttccattaacagaggcctggcagcaggcaggcactcaccgacgcttttcagggaagtccgtctcctgattaatgtgcttccgggggcagacagcggatgcgtctccttgctcagggatggggtgcatgggggcatggtctgaggttttgtgcaggttgtttgaggtttccttagccctcttgctgagaaaggcaggaagaggacagtggagtgtttctggggattgctatgtgtgagtttgtgtatgtgagtttgtgcacctgtgtgtgtgtgatgtttatgttcgtatggagaaggtgtctgcctggtgacagagcagctgagggtatcaagagtcttcctcagtctccttagtgtcagggtggtagtgcctgagctggtggtgaggggctcctttgggctttcagaggaaaggaggccagacttggggacaggcactgctccccttcgtaactcacaggacagcttgcagagtgtccctttgcagtcagctcagttcagttcagcagacattgttttgagctctcgctgcataacaagaactggagaatgggaagacaggtcagacagggcccttccccaggagctgtctggccagcaaaggggacggatgagggggtgaccaacaaccttgggcaggcttccctgaggaggtgatattaagggctaggccatagcgaagcgtgagaagagggcacagcaaagactcgggaagtagggaaccatggcagtctcaggcttcctgctcccttgagctctctctgggccatttgcactcttgccatggttgagcactgggttctatggtgctttgaatcattcaccatctctaagaatgtcagagctgggaatgtgcacctggacattttgtaggtggtgatgtggaagcccagaggaggtgacatggcccaagtcacacagtggtggagccaggacaagcaccaggtctcctggctcccaggccactcccctcgcattcactgggtgttcctggctgccttgggagctccatggggcagggaccatctctgggtgtaccagagcactcaacatcaagccaggcctcttgctgaacccagctgaggtccctgtcagcaatgtcaccctggcatcacatccccacatgagctgatagcagccaggaccccaggagggcggatagagcactactctggtctggtgctctcggcccctcatttttgtgccctcaggatgaaagccttgtgtgcactcttgaaccccaaagccctcaagtatgaaatgtaccagcccccattcagcttttatacctaaaagatctatttggcaaaggcctgaaggatcagtttcccattttttttttaacttctctctcccttatttctgggctgacagcatgacagaggggctgggcaattttgttttatgacttcataagagggttttaactgggaaacttgcatctatgtttgccctgcttcctgccagttggaaagacattgaagcccctggtaatccataataagatcctgaggatggggtgaagggagagcccataaaagtcatcactcaggccaggcgcgatggctcatgcctgtaatctcagcactttgggaggccgaggtgggctgatcatctgagatcaggagttcgagaccagc

SEQ ID NO: 29070 - DNA, 2300 bp, Homo sapien
ccaacatctgttattgcgtgtctttttgataaaagccattttaacaggggtgagatgataccttgtagttttggtttgcatttctctgatgattatgatgttgagcttttttcatatacctattgaccatttgtatgtcttctttagagaaatatctgtttagatcttttgcccatttttaaatcggattatttgggcttttttgctatttgagttgtgtgagctccttatatattttggttgttaatcctttgtcagatgaataggttgtacgtattttctctcattctgtgggttgtctctttgttgattgtttcctttgctgtgcagaaactttttagactgatgtagtcccatttgtctattttcgctttgattggctgtgctgttgaggtcttatgcagaaaatcttcccctagtccaatgttctagggtatttccccaatgttttattctagttgcatcatagttggaggtcttagatttaagtctttaatccattttgatttggcttttgtgtatagtgatagatagaggtctagtgtcattcttctgcatttagttatttagttttccgagcaccatttatggaagagactgtcctttccccagtgtatattcttggaacctttgtcaaagatgagttggctgtgattgtgtggatttatatctgggtttacagacaacaagatctgttttttgttttgtttttttgtttgtttgttttatgagacagggtcttgctctgtcacccaggctggagtgcagtggtgcaatcagagtttactgcaggcttgacttcccaagctcaagtgatcctcccagcctctcaaatagctgggaccacaggcacctgccaccctatcctgctaatttttgtattttttgtaaagatggggttttgccatgttgcctaggctgatctcaaactcctaggtgcaagtgatccctcatctttggccctaagtgctgatattaaagtgctgatataaaagccgacaagatgttatactcagaaaaagctgaagacgccaccaagaaactaatagaactgataaacaaattcagcaaagttgcagaatacagagtcagcatacaaaaatcagtagcatttccatatacccaaagtgaacaatctaaaaaagaaatcaagaaagcaatcccatttatcatagctacaaaggatataaaatacctaggaatcaatttaaccaaagaagtgaaagatctgtacaaggaaaaccataaaacactgatgaaagaaattgaagaggacacagacaaaaatgcgaagatgttccatgctcatggattagaagaactaatattgctaaaatgacaatactacccaaggcagtttataaatccaatacaatccctatcaaaataccaatgacattcttcacaaaaatagaaaaaaagtcctaagatttatatgtaaccacaaaagacccccaacagccaaagcaatcccgaacaaaaagaacaaagctggaagcatcacactacctgacttcaaaatttacttcgaagttttagtctccaagtcagcatagtacttgcattaaaaacaggatacatggaacagactagagaacccagatgtaacttttttttttttttttgagacggagttttattcttcttccccagggtggagtgcaatggcgcgatctcggctcactgcaccctctgcctcctgggttcaagcgattctcgtgcctcagcctcccgagtagctgggattacaggcatgcgcaaccacacccagctaatttttgtatttttagtagagacagggtttctccatgttggtcaggctggtcttgaactcctgacctcaggtgatctgcctgcctcagcttcccaaagtgctgggattataggtgtgagccactgtgcccagctcccagatataatttttatatttattaaattgagtttagttttagaagtacattaatcatgatagattttagaaaatagaaacaagaagattcacagtcattcctaattctgtactcgtgacccagccactctgcatgtcgtcctgttttctttgagctttctcctctgctcactttttacacagtatatcagggtgtggaaacagctctgcaccccttcttgattgctgaacactatgatgtgaatatttctacatagccaccacctttatcatttttagtgacagcttaatataccatagggtggatgcctataatttccttagacttcgttttgaaacaacatagctcatgaacctcttcaaagatgaataatgagaaagcaaaaccttc

SEQ ID NO: 29071 - DNA, 2300 bp, Homo sapien
cctactccaactctactgggacacagcaaggcccggagagagggaggggttcctgaggtcccatggagggggtcattggtgggccaagtctcctgcattgccatggctggaaccttggagtcctgagaagagctagctgtgggaaaactcattctgttccctcagcaggctctgtctatccagggaaaagaagtattcattctgacttttcacatgcagtgtcttgttccatccttacacatccctactttatgttttcctccatgcctgcgtggctctccttggttcatgtcagcatcatgtgtagaggacttgccttggttcacactggtgccatgtgtccagggctcactctggtttatgttgacactatgtgtagagcgttcactttggttcatgttggcaccatgtgtagagggctctctctggttcatgttggcaccatgtgtttagggctcatcctggttgatgttggcgccatatgtccggggctcaccctagttcatgttggcattttgtgtacagagctcaccctagttcatgttggcatcgtgtgtacagggctcactttggttcacattggtgccatgtgcacagggctctccctggttcatgttcccaggtggacagggctcaccctggttcatgttcccaggtggacagggctcaccctggttcatgttggcaccatgtgtacagggttcaccctggctgatgttggcgtcatttgtacagggctcaccctggttcatgttggcaccatgtgtacagggttcaccctggctgatgttggcatcatttgtacagggctcaccctggttcatgttattgccatgtggagagggcttgccctggttgatgttgccatgtgcatagggctccccctggttgatgttggtgtcatgtgtagaggactcccctggttcatgttggctccatgtttagtgggcttattctggttcatttggccccatgtgaaaagggctcaccccaggttaatgttggtcacatatagagagggcattctctctgtgtccacgataaagtaatggtggtggtgtctcccatttcccagaggaagctgagactcagctgaggaaagggcttggtcatagtctcaacgctggtccataatatggtcaggatttacaaccctgagcgtgatgtcatcttctcacacctgaaaccgtttagctaaccagaaatactctctcctaaggagataaagtgactttcattacatgtctttctgtctgccctgctgtggggagagctttagttgttcattcaacaaatattaattgagcacctactctgtgaagggacctggaagtacagcagcaagcagggcccaccacttccctgtcctcagggtgtctcccaacccttccttagctatactttatcgagctttatttttatagtgaaatgcatcaaccttaagcatatgtgttagttggtactgacaagtgtatatcacagtgtaaccaccacctgggtcgagatgtggaacatttccaacctccagaaagttcctctgtgcccgtttggagttcatttctcccaaccctgggggcccccatcaaccactggcctgacttttgtccctatttagattagttctgcctattctggagtgtcacagaaatgtcatcaaacagcatatactcttttgtgcctcgcttcttcactcagcatgattttgagatgcatccacgtggtggtgtgtattggtggcatgttccttctggctgctataaggtattctgtggtatatggatagaccagtttgtttatccattcacctgcagatagacattggaattgtccctactttctggctgttacaaataaagccactatgaacatactcacacgacttcttgagggcatatgcatttattcctctcaagcatcgaaccaggagtagagtggcaaggaaggggctcacattttggccgcaacgtttttgctcacctgtgggggttactgaggaatacaagatgcctgtgcacagcggagctcagggatcctttgaggacagaagcctggcgcagccttctggggccagggtcctctcatagggtttccctctctccagatgaacgatgtgctcctgtacacctatccccagaaggatgggaagtaccggctgaagaacacattggctgtggccaacatgaaggtaaatatctggtgccaggtacccccgggttgggggacagggagaccccaggggagaaggggacagcatcctgctcccaggagcacccagaccagctggaagagggaggccctgc

SEQ ID NO: 29072 - DNA, 2300 bp, Homo sapien
ttctcccaaccctgggggcccccatcaaccactggcctgacttttgtccctatttagattagttctgcctattctggagtgtcacagaaatgtcatcaaacagcatatactcttttgtgcctcgcttcttcactcagcatgattttgagatgcatccacgtggtggtgtgtattggtggcatgttccttctggctgctataaggtattctgtggtatatggatagaccagtttgtttatccattcacctgcagatagacattggaattgtccctactttctggctgttacaaataaagccactatgaacatactcacacgacttcttgagggcatatgcatttattcctctcaagcatcgaaccaggagtagagtggcaaggaaggggctcacattttggccgcaacgtttttgctcacctgtgggggttactgaggaatacaagatgcctgtgcacagcggagctcagggatcctttgaggacagaagcctggcgcagccttctggggccagggtcctctcatagggtttccctctctccagatgaacgatgtgctcctgtacacctatccccagaaggatgggaagtaccggctgaagaacacattggctgtggccaacatgaaggtaaatatctggtgccaggtacccccgggttgggggacagggagaccccaggggagaaggggacagcatcctgctcccaggagcacccagaccagctggaagagggaggccctgcggaaacagtgttgggctacagcaagtttgtgctgtaagttgcccagggaaaggggagggggatggagggcttcttggaagaggagactgaacccttagagtggataatatttggtcggatcaggaaggaagggaaggaggggcatcctatgaggaggaaaatgcataaggaagggcctgggttgggggaacaagcaggtggttggtaatttttttaattgtgataaaatacacatatcattttaaaagtaaccatttttaaatgtacagttctgtggcactaagcacatttacattgctgtgtatccagcaccaccatccatctcagaactctttcctctccccagactgaaactctgcccacattaaaaaccaactctccattcccctccttctcagcccctggcacctaccattctactttctatgtccatgaatttgactactatgggtacctcgaatgaggagtcacacagtattgatccttgtttcacttagcacagtgtcctcaaggttgatccctgtcatctgtagtatgggtcagaattttccttccattgtgtggatagaccacatggtgtttattcaatcctctgccgatggacactggtggcttccacctttaggctgttgtgagtaatactgctgtgaatatgggcatatgtgtggggcttagctccgtgtaacttggtcctgaagatgggaacacttgggagctgttggggactttgaggagcaggaggttttaggaagttaattctggtgcaacaggaggctgaagttagagagggcaacactgaggtgggacagtggagccgcaggcggttgtcattgtcaagggcagaggcagggatggccaggagagctgagagaggcactgtgcaatctctcttgatcctgtaggctctttaccatggggaaggggaaggaggaagcacctttctcagcatggaggtttgttcccttttggaaccaaaggctccaccgaggagcctgttagaaaaaggcatgggagacgtggtcactggcaggtacttgtccaacatgacagtgcacctggggttgcccgggctgggccctgagcatgacgctctgcagccttcccagcggtgggtgagtggccaagaatgatggagctggcagccaggcaccttccacagcacctaccatcacagaaaggtatgccctgaggctagagaacggcagtaggtggacatggtccctctgttcatctgctgccaggagaagccggtctacacttgcccctccctgccccaccctgaaggaggctgctgttggttttccaggtcagccgccctgtgatggagaaagtgccctacgctctaaagattgagacttccgagtcctgcctgatgctgtctgcgaggtacgggcaggtggagggaggatggcgcacaaggcagaggtgtgagcatgggaaggttcagaacaacagataaggatgtgctgtttttattttggtatccttctgggtcaaagtatccttctgggtcaaaggactttttttcttttcagtgtttcttaaccttttggggaat

SEQ ID NO: 29073 - DNA, 2300 bp, Homo sapien
tgaacccgggaggtagaggttacagtgggccaagatcacaccattgcactccagcctgggcaacagagcaagactgtcttaaaaaataataataataattttacagtgaactatcatatgaccattaactggattgtacaattaacatttcctacatttcttttatcaagtacctatctattcatccttctataccttttactttttgatgtttttcaaaatatacttaaccctatgaattcaatgtttttgtaccttttttttgccttttgaggtctaatttatatataatgaagtgcacaaatctcaaatatactatttggtgagttttgattaatgcacacacctacaaattgccactatcatcctgtccccagaggcaacaccctgttccaattcttttccaccatagattagttttgcctcttgatcctcaaacagatggaatcatgtgtgacttccattaaccatgatgtttttgagattcatttatgttgttgcatatagcagtagttcacttctttttaaggctgagtagtcttccattttgtgaatataccagttttgtttagctgttcaccagtcaaaggacatttggattgcttctaggttttggtgattatgaataaagctgctttaaacattttcatacaggtttttgtgggaacataaatttttatttcacttgggtcattacctaggattggaattgatggatcataaggcaggcatatatttggtttataaggaattgtgaggcctttttccaaagtggtgtgccattttacactcccccaacaacgtgtgtgaatttgagttctggttgctccacatcattgctaacacttggtgttgtcaggctttaaaattttagccattctggtggggagtgttgaggtaactcaatgttgttttaatttagatttccctagtaactactgatattaagcacatgattgctttcatgtgcttattggccactcatatttccatttgagaagtgtctattcagatctcttgtccactttttttaaagtaggttgtactgtgattaagttataggatttctttctgtatcctgtataccaggcttttgtcagataaatgttttacaaatattctctgcctgtctgtggcttccctgttcattttctaatgaatgaatgaatgaatcttttggtgaacagcagtttataactttgaggaagtctactttgtcagtgtttccttttatgactgttgctttctgtgtgctaaggcatttttgtctacgcaagctacaaagttattttcctctattttctgaaagcattaatgttttagcttttacttctaggtctatctcaaattaatttttgtgtgtggtatgacatgggagttgaggttcctttttttcattatggatatccagttgttccagcaccatttgttgaaaagacttgcctctccctattggattgcttcagtgtctttgttaagtctcaaatgattgaataaatagaggtctatttctggactttccattgtgtttcattcatatatttaccaatccttatgccagtaccaaactgtcacaaatactgtaactttatagtaagtcttgaagtcaggttgtgtaagtcctccaacctagttcttttttaagactgtttcaaggctggaaaggtgcctacgcctgtactcccagcacttgggagaccaaggaggcagatcacttgaggccaggagttcaagtccagcctggccaacacaatgaaaccccgtctctactaaaaatagaaaaaattagggaggtgtggtggtgcatacctgtaattccagctacttgtgaggccgaggcatgagaatcgcttgaacacagcaagcagaggttgcagtgagccgagatcacaccactgcactccagtcagacttttttttccccagactctgtctcaaaaaagaaaaaaaattgttttgggcattctaggccttttatgttttcatataaacttatcaatttctatgatagggattatggaatctatagaccaatttggggagaactggcattgtaatattgaatctttcaatccatgaacatggtacataaattttcatttatttaagcctcgaattctcttttaatgttttgtagtttttagtgtagacatcttatacttctattaatatatttctaaatatttttttggatgccattgtgaatggcatttattttattttctagttgtttgctgctactatatacacataaaaactgattatcttgtgacctttctaaattgatttttagttctagt

SEQ ID NO: 29074 - DNA, 2300 bp, Homo sapien
ggaactgctttggagctgcctcttggtccaaccactgagctggttgttgtataaaattcacttttcattacatgtcacaatccgattgagaaatggtttgttgttgcgtagcataaaagaagactacacttcaaaacgatagttttgatttccgctcagctcatgaggcacccacttatcaagctttttcacctttccaatttgcttcgaatgctgaacgaccctaatgaccgtagaatagtcaacgctgagttcttctgtaatttttcatgtagttcaatgattgctctcaattggtcgttgtcaacttcccatggcccatatcacgttcctcatcttcaaggctctcttccttgcaaaacttcttaagccaccactgcactgtatgtttgttagcagttcctgggccaaatgtgttactgatgttttgagttgtcttcgctgctttatgaaccattttgaactcgaataagaaaactgctccaaatttgctttttatctaacatcattagacaaaaagcatattctaaaataaacagcaataagtcattagcaaaaaaataaagtgagaaatgtgcattaaaatgatccacatttatttaagaatgtattccaatatcaaacagcaaatttcaaaaatgcaaaaacgcaattgcttttgcctctcaggtacatcacttgacctttctagttctcacccacttcacccctaaaatcggaaaatctttctgcaagaaaaaaatttgaccacattcccttaaggcctcttccaatttcaagagctgtgctttaccatgacaaaacgaacctagctcttttcccaattttgcaacgtcagaaaaaggaggaaggggaaatagctgtgtttaaaacattttttaccaaatagaaatattataagattatggaaaaaaaaatactaaatgttggagtcatcctgataaaaacccaaatggatactgtgtgggaaaaaaagttaacccatccattctggagtcaatatttattcttaataagcaagaaaactgaagaaaaaaaatcagtataagatctacagcctgtagcctaaacacttcagggcatttaggataaataagcgcctgcaccttcccaggcaagtcaaaaccacgacataaaacagagaaatatgtaaggaaaacctacagcccaagagtttaagagcaagacaggccaatttcttcaaataaatttaagcaatgctgctaaaagctgctttacacatccctattaccatgtactacttccaaatttcgaggaggaggggcatggaattacacaagatctggatcgtatgtttactaagaaaccaaaaattataggttctggggcgtttcaacatttcacctgagatggccagaacgggcgcatctttagacctttaaaacctaaattaaaaactatcagtaccgaggaagggccgaagagctcaatacccacccaatacaacccccacttccgacctacagacgctctgctgagcggctgggagaatccgtcgcgccagtcagggcccggcttcttccaacaacagacactttgcgagccttccagaagccttggctaagcgagaaggcagggtggaggccgccactgcgaggacggtccccacccagctgcgaggagctcgcggttccccagaggggcgggcctgcgtccgggtaaccgtgcgcgacgtccacgagtttttaggacgaccagcccttcagcctctaggccccgacgcctgcgccatttaagccacatatccgcccgcccggccgcggccaaggccggcggcagctacgtagccgccgccgcccggggccccacagcccacgggccggatggaccgagcgccggctgcggcgttccggtgcgcgcgcgcgcctcagccaatcgcgttctcgcccgccccccgccgcggcggcgaggctggcgctgggaagaggaagaagaacattcgccctcctcctaccagcgcgcgggcggcggcggcggcggcaccggggtcacgaactctgacctttcactgacaaaaacaataacaaacccccccttctccgcgaccccggcggcgcccccgggcccgtccccgccaccccgctcccacctcggcgtctcgtctctcgcccgctgccccgcgagcccgcggcccccgggctcccgccatccgccgacaccgggagcccgggctccccgcgccctgccctccgcgccgggggccgcccgccgcagacacgggacccgcttcgaggccgctttggcgccaaatcctgaggtaaaattgaaagagggtcggg

SEQ ID NO: 29075 - DNA, 2300 bp, Homo sapien
tatggaaaaaaaaatactaaatgttggagtcatcctgataaaaacccaaatggatactgtgtgggaaaaaaagttaacccatccattctggagtcaatatttattcttaataagcaagaaaactgaagaaaaaaaatcagtataagatctacagcctgtagcctaaacacttcagggcatttaggataaataagcgcctgcaccttcccaggcaagtcaaaaccacgacataaaacagagaaatatgtaaggaaaacctacagcccaagagtttaagagcaagacaggccaatttcttcaaataaatttaagcaatgctgctaaaagctgctttacacatccctattaccatgtactacttccaaatttcgaggaggaggggcatggaattacacaagatctggatcgtatgtttactaagaaaccaaaaattataggttctggggcgtttcaacatttcacctgagatggccagaacgggcgcatctttagacctttaaaacctaaattaaaaactatcagtaccgaggaagggccgaagagctcaatacccacccaatacaacccccacttccgacctacagacgctctgctgagcggctgggagaatccgtcgcgccagtcagggcccggcttcttccaacaacagacactttgcgagccttccagaagccttggctaagcgagaaggcagggtggaggccgccactgcgaggacggtccccacccagctgcgaggagctcgcggttccccagaggggcgggcctgcgtccgggtaaccgtgcgcgacgtccacgagtttttaggacgaccagcccttcagcctctaggccccgacgcctgcgccatttaagccacatatccgcccgcccggccgcggccaaggccggcggcagctacgtagccgccgccgcccggggccccacagcccacgggccggatggaccgagcgccggctgcggcgttccggtgcgcgcgcgcgcctcagccaatcgcgttctcgcccgccccccgccgcggcggcgaggctggcgctgggaagaggaagaagaacattcgccctcctcctaccagcgcgcgggcggcggcggcggcggcaccggggtcacgaactctgacctttcactgacaaaaacaataacaaacccccccttctccgcgaccccggcggcgcccccgggcccgtccccgccaccccgctcccacctcggcgtctcgtctctcgcccgctgccccgcgagcccgcggcccccgggctcccgccatccgccgacaccgggagcccgggctccccgcgccctgccctccgcgccgggggccgcccgccgcagacacgggacccgcttcgaggccgctttggcgccaaatcctgaggtaaaattgaaagagggtcgggcgggctcgggccggcggcggagggggcgggcctggcgcgcggacatggaggcgccgcggcggcggctgaacccgacccttttacctttgccacggggtggcggcggcggcgcccggcgctttgcatagtgggccgggccgctcccctcccctccccgcccgcggccgggcgaagcgagcgggttccccctgaccggcccggccggcgcaagggtgggggtggagggggaatggccgcggccccgccttatagttggccctccgccagcgccgccattttgttctcgacggagatggctccggctgggcgggctcccttcctccttatcctcctcctcctcccgcctgcagtcccttcttccttctctgccgggattttcacccctccgcttctagtccgcctttggcggccgtcgcagcccaaccgccgttttttctgaaggggagggtaaaagaaaaggaggaaggcgggtgcgaggcgcgacctcgtgagcgacggatgggctggctaattggcgcccagataggagggccggggcctgtggcaccgcccccctaagctttgctgattggctgaggcggaagagggtggtccttatggggcgcgggagccctggcggggcgggagtagaggccggggcgaagagtggggccgggtcggcgggggcggggccgggggcggggcgcgaggggcgcggccgggtggagaggccggcgcctggtcttgggtcagcaggtgggctgcttccctccgcctggaacgcgtctcgaatgagtactgaggaacaatagtaataaaggtgatgaagcatttcgagtccacgatgcgctctcgtgggaagaggttttcggaaccaggacacttttcagggctcctgctcgttatttcgcagcggccttggcg

SEQ ID NO: 29076 - DNA, 2300 bp, Homo sapien
aagtcatgtattcatcagtaattcatatgaaggctgtattttcctcgactttcttattacattgaagatttgttcctcactaccgttgctatatttcacagcctttggcttggaaacaaagtgggataatggacaattactagttccaaccaactctccagccacaagcagccagttctcgatcacatcaaatgctcttcctccagggccgttacacgggatgtcctgtctggaatgccattcctcccttgggttcctctgttcaaacatcacttactcagagaggccaccctgaccattccatctaaattaacgcctcaggtcttcttcagcaggtcatttggcttcttttctttcacagaacttatgactctctggaattatttgtctattcaccccccagcccccaactctagtgagggcaggggtcttgtacagctggttctccagatgtgtccccagtgcctaaaaaactaagtcaacatgtattcagcgaacgaatgagaagagaatcactcccgaattgtgctctctcaaaccccaaatacccttaacgcttgcctctcctggtggctgtaatcccatttttaacaataacaccattttcaagtgactctgaagctcgcaaagtagcgttgcctccattttctgagtagagccccacaaacaatgctcagaagggaggtccggcctggcaagaatgcgcatgccccccatttacagtcgataaaattgagcctcattaggggattcgccaaggccgctgcgaaataacgagcaggagccctgaaaagtgtcctggttccgaaaacctcttcccacgagagcgcatcgtggactcgaaatgcttcatcacctttattactattgttcctcagtactcattcgagacgcgttccaggcggagggaagcagcccacctgctgacccaagaccaggcgccggcctctccacccggccgcgcccctcgcgccccgcccccggccccgcccccgccgacccggccccactcttcgccccggcctctactcccgccccgccagggctcccgcgccccataaggaccaccctcttccgcctcagccaatcagcaaagcttaggggggcggtgccacaggccccggccctcctatctgggcgccaattagccagcccatccgtcgctcacgaggtcgcgcctcgcacccgccttcctccttttcttttaccctccccttcagaaaaaacggcggttgggctgcgacggccgccaaaggcggactagaagcggaggggtgaaaatcccggcagagaaggaagaagggactgcaggcgggaggaggaggaggataaggaggaagggagcccgcccagccggagccatctccgtcgagaacaaaatggcggcgctggcggagggccaactataaggcggggccgcggccattccccctccacccccacccttgcgccggccgggccggtcagggggaacccgctcgcttcgcccggccgcgggcggggaggggaggggagcggcccggcccactatgcaaagcgccgggcgccgccgccgccaccccgtggcaaaggtaaaagggtcgggttcagccgccgccgcggcgcctccatgtccgcgcgccaggcccgccccctccgccgccggcccgagcccgcccgaccctctttcaattttacctcaggatttggcgccaaagcggcctcgaagcgggtcccgtgtctgcggcgggcggcccccggcgcggagggcagggcgcggggagcccgggctcccggtgtcggcggatggcgggagcccgggggccgcgggctcgcggggcagcgggcgagagacgagacgccgaggtgggagcggggtggcggggacgggcccgggggcgccgccggggtcgcggagaagggggggtttgttattgtttttgtcagtgaaaggtcagagttcgtgaccccggtgccgccgccgccgccgcccgcgcgctggtaggaggagggcgaatgttcttcttcctcttcccagcgccagcctcgccgccgcggcggggggcgggcgagaacgcgattggctgaggcgcgcgcgcgcaccggaacgccgcagccggcgctcggtccatccggcccgtgggctgtggggccccgggcggcggcggctacgtagctgccgccggccttggccgcggccgggcgggcggatatgtggcttaaatggcgcaggcgtcggggcctagaggctgaagggctggtcgtcctaaaaactcgtggacgtcgcgcacggttacccggacgcaggcccgcccctctgg

SEQ ID NO: 29077 - DNA, 2300 bp, Homo sapien
agatgaggacagtgaggctaggaaaggtagcttacacaaaatcacactgctagtaaaagttggggagttgctaaccacaacactaaaacattttatgtctgtgtatgtatgtgtataaatatctctatctcgagagagagaaagagagaactcacacacagagaattatattcaactccagcctgggcgacagagtgagaccttggtctcaaaaaataaataaataaataaataaatcatattcacatgtttgaggaccagtgtcttacttttttgtattcccagcctagcacatagtgcctggagtattcgtagcactcaggaaatacttgatgaactgaaaatgtatataagaggctgacgaaggatttgaatctggaagtaaagtgagtttctgaggccctcctcccaagtcatgtattcatcagtaattcatatgaaggctgtattttcctcgactttcttattacattgaagatttgttcctcactaccgttgctatatttcacagcctttggcttggaaacaaagtgggataatggacaattactagttccaaccaactctccagccacaagcagccagttctcgatcacatcaaatgctcttcctccagggccgttacacgggatgtcctgtctggaatgccattcctcccttgggttcctctgttcaaacatcacttactcagagaggccaccctgaccattccatctaaattaacgcctcaggtcttcttcagcaggtcatttggcttcttttctttcacagaacttatgactctctggaattatttgtctattcaccccccagcccccaactctagtgagggcaggggtcttgtacagctggttctccagatgtgtccccagtgcctaaaaaactaagtcaacatgtattcagcgaacgaatgagaagagaatcactcccgaattgtgctctctcaaaccccaaatacccttaacgcttgcctctcctggtggctgtaatcccatttttaacaataacaccattttcaagtgactctgaagctcgcaaagtagcgttgcctccattttctgagtagagccccacaaacaatgctcagaagggaggtccggcctggcaagaatgcgcatgccccccatttacagtcgataaaattgagcctcattaggggattcgccaaggccgctgcgaaataacgagcaggagccctgaaaagtgtcctggttccgaaaacctcttcccacgagagcgcatcgtggactcgaaatgcttcatcacctttattactattgttcctcagtactcattcgagacgcgttccaggcggagggaagcagcccacctgctgacccaagaccaggcgccggcctctccacccggccgcgcccctcgcgccccgcccccggccccgcccccgccgacccggccccactcttcgccccggcctctactcccgccccgccagggctcccgcgccccataaggaccaccctcttccgcctcagccaatcagcaaagcttaggggggcggtgccacaggccccggccctcctatctgggcgccaattagccagcccatccgtcgctcacgaggtcgcgcctcgcacccgccttcctccttttcttttaccctccccttcagaaaaaacggcggttgggctgcgacggccgccaaaggcggactagaagcggaggggtgaaaatcccggcagagaaggaagaagggactgcaggcgggaggaggaggaggataaggaggaagggagcccgcccagccggagccatctccgtcgagaacaaaatggcggcgctggcggagggccaactataaggcggggccgcggccattccccctccacccccacccttgcgccggccgggccggtcagggggaacccgctcgcttcgcccggccgcgggcggggaggggaggggagcggcccggcccactatgcaaagcgccgggcgccgccgccgccaccccgtggcaaaggtaaaagggtcgggttcagccgccgccgcggcgcctccatgtccgcgcgccaggcccgccccctccgccgccggcccgagcccgcccgaccctctttcaattttacctcaggatttggcgccaaagcggcctcgaagcgggtcccgtgtctgcggcgggcggcccccggcgcggagggcagggcgcggggagcccgggctcccggtgtcggcggatggcgggagcccgggggccgcgggctcgcggggcagcgggcgagagacgagacgccgaggtgggagcggggtggcggggacgggcccgggggcgccgccggggt

SEQ ID NO: 29078 - DNA, 2300 bp, Homo sapien
tacactgtaagctacactggtcaaggaagttgaaggtaggccagtgtgtctagagcacaggaagctaggggtaccacagataagaaaataatgaaaagccttggaaaggtttttaaacatggaacaggaagcctctgccattacgtgggttctagtggcgcctgaacaacatactgcctgtaagagagttctgtaaatcataaagcaccctatactttggttagtactatttagttccattattttgttttccaaacttttgtcctggatgccatgtaactagctgcaagcacagagccaaaactagaatctcggtgttcgaatctattgtttttgcccctacaccacactgcataaaaatttcattatttatatcacttaattagtccaatgtctataccagtagttcataatgacaacaataactctatttacacagtatttgctacatgtcaggcacttttctaagctctattatttacattaactcatctaatcttcagttcaggaaggaaggctctattattgtccagatgaggacagtgaggctaggaaaggtagcttacacaaaatcacactgctagtaaaagttggggagttgctaaccacaacactaaaacattttatgtctgtgtatgtatgtgtataaatatctctatctcgagagagagaaagagagaactcacacacagagaattatattcaactccagcctgggcgacagagtgagaccttggtctcaaaaaataaataaataaataaataaatcatattcacatgtttgaggaccagtgtcttacttttttgtattcccagcctagcacatagtgcctggagtattcgtagcactcaggaaatacttgatgaactgaaaatgtatataagaggctgacgaaggatttgaatctggaagtaaagtgagtttctgaggccctcctcccaagtcatgtattcatcagtaattcatatgaaggctgtattttcctcgactttcttattacattgaagatttgttcctcactaccgttgctatatttcacagcctttggcttggaaacaaagtgggataatggacaattactagttccaaccaactctccagccacaagcagccagttctcgatcacatcaaatgctcttcctccagggccgttacacgggatgtcctgtctggaatgccattcctcccttgggttcctctgttcaaacatcacttactcagagaggccaccctgaccattccatctaaattaacgcctcaggtcttcttcagcaggtcatttggcttcttttctttcacagaacttatgactctctggaattatttgtctattcaccccccagcccccaactctagtgagggcaggggtcttgtacagctggttctccagatgtgtccccagtgcctaaaaaactaagtcaacatgtattcagcgaacgaatgagaagagaatcactcccgaattgtgctctctcaaaccccaaatacccttaacgcttgcctctcctggtggctgtaatcccatttttaacaataacaccattttcaagtgactctgaagctcgcaaagtagcgttgcctccattttctgagtagagccccacaaacaatgctcagaagggaggtccggcctggcaagaatgcgcatgccccccatttacagtcgataaaattgagcctcattaggggattcgccaaggccgctgcgaaataacgagcaggagccctgaaaagtgtcctggttccgaaaacctcttcccacgagagcgcatcgtggactcgaaatgcttcatcacctttattactattgttcctcagtactcattcgagacgcgttccaggcggagggaagcagcccacctgctgacccaagaccaggcgccggcctctccacccggccgcgcccctcgcgccccgcccccggccccgcccccgccgacccggccccactcttcgccccggcctctactcccgccccgccagggctcccgcgccccataaggaccaccctcttccgcctcagccaatcagcaaagcttaggggggcggtgccacaggccccggccctcctatctgggcgccaattagccagcccatccgtcgctcacgaggtcgcgcctcgcacccgccttcctccttttcttttaccctccccttcagaaaaaacggcggttgggctgcgacggccgccaaaggcggactagaagcggaggggtgaaaatcccggcagagaaggaagaagggactgcaggcgggaggaggaggaggataaggaggaagggagcccgcccagccggag

SEQ ID NO: 29079 - DNA, 2300 bp, Homo sapien
gttgcctaattctgccccttctggagctgctcagtcacacctctggacaggcctgaggatgcctgatttatgaaggggtcagaaattctcctagccttgaattcagattatgtcctgcaatttaggcatcattcatacggaagacaattattttatgattcaagattggggcatttctgcagtacacacaaaaggcccaaggtgagataaggtctcagtgctacagttaatttgtatattctttttaatataatctattgaacttactttaaaaggaacggaaagaggggaaaacaagcaatccaaaatgtatcagagagagagctggagttgaggatgccttgctgattttctgaaaatcaagttaacttttctaggcagaatggccacagtctgcagtcatcctggaaagccctgggggatgcatctgcatttcatcctgtctcaagctgtaaacctgactttatgtatatctcattgcagagagacaggggtgggggttctgcttagtcactaagcggctgagtctacttagagcttttctactattcagacagcttcacaaatgtggaaggacaggtaaatgcagcatgatcatactgtgcataaaatgttggaagctactctgagtttctttatgtcttaaatagacaaacaggtcttcttgatccagggatgcttgtgaacatccagcagcctttgatacgtgaggatggtacagttctcctggccacggattctaaggtgacgttctctactcatgctctctctcatcctttatgttgacattgcaggctgcttctctaactgtgtgcaccactttcttcctggccttcagagaccacatcaaaagcatgacctatgtctcggtctccttattgttgtgatagctatcttgtgatttgttttagagatgctgatggcttctcagatcagagctggctggtcataatcactgtaacatgtcagtctagatgtcaatttggtggacattcagtggttctcttttctgttatagttttctttttctcttatacacattggcaaactactagccaaggaaagaaatacttatcagatggcctttttgcaaaagccccgggttcctttttattagatgatcttcaggaggaagctcagccaggaatctatcagttccaaaactttgctagagcagatcagtcatagggatttaacttgtggacagagatgttcgtcagtccaaaagggggagacttgctggctcctgtgaagataaccaaggagggggattttttccaggccagggaactcactgtttgtctcatcctggtgctcctgatgtaaaccaagtaatgaggaagtagtagcagcaagccacaactctaagagggtgacttggtaattgagaacactggcattgctgcaaccattagaaccagagcaaggcctgcaggcttcctcctcatctgttcacagtctcattcatgggtgtactcagggcattacagggcatcctcttttgggaaagagaagacaaaatttagagcccttgcctgtcatggagagctgccctgcatgccttggtcctcaggctgggccttgcaccttctgtctttgggcaggggccacatgcatgatgggagctgatggatcacgcatcgtgggcttagcttatcagcagcacacattctagaacagtggctctgactgcatggtcaaatgcagagaaagcgtaagcctgaaagtaaggcccagataaccttaaaaacagattaccaagggattcacagcaaccattctattgggccatccacacacagactgggaatgagaaccaagactccagaactggctagaactgggttcagagtctgacagtgctcttcgtagccacatgcttctttcctgcacttgtaaatttcttggtacacagtgagcattcaataaatgttaatggttaggaattagttattgtcactttggaggagaatgaccacaaagctgtatggtatttcaggaatcaagagaaagagcttcagaggcagactgtgtcctaccccattccttcctgtgtacaatggaaacaacaataccccccacagaagtttgatacgaataataaaacatatgcaaagcacccacaggaagctactttcagaaactgttttccaattttactttgaagtaattatacatttaaaataatttactatgaaggaagtacagtgctattacagagctcccacatagccttcgcccaggtcctcccagtggttatgtcatacatacctacggtacagtatcacaacgaggacatt

SEQ ID NO: 29080 - DNA, 2300 bp, Homo sapien
ccatccctccccattctttgtatctctgctgatagaaatcttagccagcccctaaggcccagctgagatggcaggtcccttacaccttcgtgtgccctgcaagattggagcacagcgactcattgtggctgagtgaatggatgctggtgctggaatgctacctgcatagtatgaatacattttcccattttaaaaataagcagtattcactctagaaaaatttagaatgttctagaaaggaaaaaggaaaaagaaaactttttaaaaagcactatccaggggcagggcgtggtgactcacacctgtaattccaacactttgggacactgaggcagcaggattgtttgagcccaggagtttgaaaccaccctgggcaacatagtgagaccccatctctatgacaaaaaaatgaaaaattagtcaggtgcggtggtgtgcacctgtagtcccagttactcagaagtctgaggtgggagactcacttgagcctgggaggttgcggttgcagtgagctgtgatcacatcactccactgcagcctggatgacagagcaagacactatctcaaaaaaacaaaaacaaaaaagcactgtccagatacctactattaacattttgcgtattcacttccagaaattttttatgtattgtaattgggatcataaaataccaaaggttttgtaaccttttttcatgtaatatacaataacaatacgtactcttcttcattttctatggttcctatttccctgctaatgaaaaggtagggtgtttccggtttgggctgtcacacatggcactgcagtagagtcctggcacatgctccacttgctcacctgagatccagtcctggctggggaatggcctggtcacgtgggacacttgagatacacagtgttcagtggccctccagggcagcattgtggtgcaccctccaccccaagtttcttcaaaatgaaagctattttactgctttatttataatgctaaatgaacactggaaattagagcagtacaaaaaataagaaaaaatcacctcaaatcccaatacccagagcccaactgttagcgtggtgaacattttcccaatactttatatacacatctatacttgctgttttataatctccttttaaacttttattgagcaatatgtcatggatgtctttcctggtcagtaaatacaggtttgtattatcgttttttaaatgagtctctagcagttcatcatatgaagactcctactttagtctgtcctctgttgatgaatttccaggttttctcttggtggtgggggtgaggagagttggaataaacaagagtgaagggaacacatctgtacatacattttgtactcatttggttttttctcatgataaatttctataagaggaactgttgaaatcagaaaagagaggtgggtggatggtggatccgtttggtttgattctgtgcaatacagacgggaccccaggagcctttgctgagctgtggttgaagggcatcaaacagtctccttttctaatgacactcccttttatagattggcccggatcctcgttcgcctgccggcactcaggctgatgagctccaacataacagaagaacttttttttactggtctcattggcaatgtttcgatagacagcataatcccctacatcctcaagatggagacagcagagtataatggccagatcaccggagccagtctatagcgcaaaccacacacctgccaaggagcaacagaatccttccaggaccgttcacatacaaagaaaagtagtggtattttggtatgtgcaaatatttccatatgttagccatttcctgtctggtttctccttatctgttaatcccagacaatagcaattaaaagactagtaggatcctttcctgacataagaaatgttttaatgccttttgatgaagcagcagattttggaacaatcttttaactcaatttgtatttagaaattctcaaagggcaaaaaacaaaaaaaaaggttttataatgtcagagactagtattaaagaaaactgaaagaacctgagagaatagtatgtgtgtatatatatatataaaaaagtccttggaattatagatactaattaccagggtaataatattagcactttctaagcacttatcaatgtgtaacgttagcaacatcttgcctgtgggcagggcaaatggaaaactgtgtatgtcttttgccgaaatgctaatgatttctgtgaaaactcactagggtacaggagacaatcatttatgtttaagaaaagaaggcatcattccta

SEQ ID NO: 29081 - DNA, 2300 bp, Homo sapien
aaaaattcccacttagttttggatattaagataaactgtcttccagcttcctggctcttgtccgaacctagagaatatacggaaatgtcaccctgtcagaacctcttctgcctggaattcttccttttgcagagtggagattctgacttcatggcccttcccaggcaggctcacccaaaggaaaatggagtgaagaaaatcaccagcaaatcttccctgccgagggaccttggaacacccatatcagtttacattagcaactttatgaaaaactctctttaaaggaaagtttggatacatgtctgtatacataatatacatctatgtacacatacacacactatatacactgtacatatggagaggatataaacacatgtacattcattcagtcttacagcctagaaacctgtacacgcacaatgctgctgaagggacccagggctggacatacgaagtgcacgctggtgggaggcacacaatgagaaggtccagaccctgtgtacaaaagacccaaaccaaccctgtcttgatgaggggttggctttaaaaatttacatcaaagttaagacattttcaaagagcctcataactgagagaatggaagctggataaaggaagcacgtggggcatctgctctgctggctcaggcattcccagggcccagtgggcaccgccttccctgggagaaaagtggctgtcagatgatgagacttcctatgacctggactaagaaaagagttaaaatgttacctatgaccccattgcacataaagtcatttacactggaaagtgggcaacaagcttctggactccaatgagatcaggtcccagaacatggatgtacacatgtggcatgaactgctgattgcggccaggggctggaagccctgcagagggcgggctgtgagcaagagtgctctgcaggaaatgtcctcaaaggactatgaaagtaaaagcactagaaacagctagagtccttagaattttttgctccttgccgtaactatcccccaaacaagtaagacagctaataagtatgtgtgtagcgtggatattgccttgagattaaggagcctaacgcatccactgttaacaccatggctggtgtcctaactgcctcagaagagtccacattcaatactgacaatgacaagctaaaaatcagtccctcttgagggcaattacacatcttagaagtgactacacctgaaattaaatataaagcccagaacagcaaaagaacctcaaaccacagccttatggcaagggttagacaataaatgtaactcctcaggacacagaaatgtcaaattaggagagtatggtaggtaacacacttccttaaaaacaccttccaggagtaacttgaaaagtattacttgctcaactaatttggtctttcaaaaaatctcttcctgtcctgttttatgctaatgtgtaatgatctccaccattttcaacatctatctgtcttaacccaacattatctgagatacttctggaaaagagctcacttaactgatgacagcatgtgtctgtcccacctctctgagccagctgcctctcctcattgagggaggagcagccaggccagtagaagagggagcatgaacgtggctccatggagttcagtagccagaggacaggtctcacttcatgaaacccaaagtttcacaaactgctaataagggctataagccctgtgaaagttggagcccaaatatttggtttgcatctctttaagtaattcttgactttgggctgactttacttaaccaacctgacaggagatgaaatggacctgcagtcagaggcttgaaatgagttaaagcagcaagaatacaggttacgtggacatgatccttaaagaaaaggccacttcaaagtaaggccaagaggatctcagaaaccaaccaagaggtgttcaaagcccaaaacagtccctggaatcagccatcaccagcaaggggacttaaagagcaggaccaggttagaatcagcacctttccaagcaaaatcacgttttctgcaaggttgtttcaccacagcccaacacttccttatccagcctgagtctaagcagcctactggctgccactgaatgacctgggaatgagaggaggggctggtggagaccttttcaccaacaccaagaactgggatctgaaagctgttatgcttgtattcccagggaactgcaacatggccctcatggtcactctcaaggatcaaaacgacggaaggcaggcaacaatctgtgttagaggcaccactgagctgcaggatgcctgctacta

SEQ ID NO: 29082 - DNA, 2300 bp, Homo sapien
cagcactttgggaggccaatgcgggtggatcacgaggtcaggagttcaagaccagcctggccaacatggtgaaaccctgtctctactaaaaatacaaaaactagctgggtgtggtggtgggcacctgtaatctcagccacttgggaggctgaggcaggagaatcatttgaacctgggaggcagaggttgcagtgagccaagatagtgccattgcactccagcctgggtgacagagcgagacttcgtctcaaaaaaaaaaaaaaaaaaaattagccaggcatggtggtgtgcacctgtagtcccagctaagtggcagaggtgggagaattgcttgagcccaggaggtagaggttgcagtgagcagagattgcaccagtgcactccaggctgggtgacagagactttgtctcaaaacaaacaaacaaacaccctaagaatcaaaaggaagtgctagaagttaaaaccttaaatgaaaaatgccttaatgggcttatcagtagactgtccataaccaaagattaaatgaatttgaagataggtcaacagaaacttccccactaaaatgcaaagagaacctccatcaccccgccagaacattcgagaactatgaggcaattccagaagacataaaatgcatttaacttgaatactagaaagagaaaagagtgaagaataaatacctgaactaataaatggctaagaactttacaaaattaatgacagacatgaaatcacagatccaggaggctcagaggactccaagcaggacaaatacaaaacatctacagatctgcattaccttattctaaccccgtaaaccaaacaccaagagaaaatttgaaagaagctaaaggaaaaagccatcatacctataaatgtaattgcatttaattacttgtttgaaaccatgcaagcaaaaaaagagtggagtgaactatttaaattgttgaaagaaaaacaccagggccaggcgcagtggctcacgcctgtaatcccagcactttgggaagctgagacgggcggatcatctgaggtcaggagtttgataccagcctgaccaacatggagaatccccgtctctactgacaatacaaaattagctgggtgtagtggcgcatgcctgtaagtccggctactcgggaggctgaggcaggagaatcacttgaacctgggaggcggaggttgcggtgagccaagatagcaccattgcactccagaagggagggagggaaaggaaaaacactaacctagaattctaaatctggcaaaatcactcttcaaaagagaaggagaaatacctttcagatcaagagtacttcagaaatgtatcttttttttttttgagagggagtcttgctctgtcgcccaggctggagtgcagtggcgcgatctcggctcactgcaacttcccgggttcgagcgatcctcccacctcagtcttctgagtagctgggaccacaggtgctgccaccacaccaggctaatttttgtattttcagtagagacggggtttcgccatgttgggcaggctggtctcgaattcctgacctcaagcgatccttccgcctcggcttccccaaaggctgggtttacaggcgggagccaccgcgcctggccctagaaatacatctcacccatagtttgtttacgaaaaaattgaggtcctgagttaagtggctgaatttaggaaggaattgatcccaaaccatctttttttcttttgctaagaagtttaagtcaacgtcagaaagtgcagtttgaactcttcatgataaaactggagatgtttggggagaaaaatggacaatacgttcaataggacgttatcagctgacttggtatccaaactgagctttcctgattatttcttattgcaatgtctgacttttagcctatgtaaaaatattttcccgtgggtggatggggaaatgactaatttacaggacgcgacaacctaaaccttccaaggggaaggcgtcctaaagcgaagctgcacacaccggttctcgccgcgccgggtcgaaggccgcctacaagtcccagagtgctccgcggcgtgcgctgcccgccgggaagcgtctcctgtgcgtctgcgcgggaagtggaacctggctctggggagaagccgcgtgagatccgcgcgggtgctagctagtcctttctcgtcgctgctcggctcgcggcccgtggggtcggccccgccaccgttgccgccatgcccatgaagggccgcttccccatccgccgcaccctgcaatatctgagccaggggaacgtggtgttcaaggactccgtgaagg

SEQ ID NO: 29083 - DNA, 2300 bp, Homo sapien
ggacatttgatagactaattttttgctgctgttaagtgttgccatgatagtaataatggtacttagtatttcttccttaggataatctcctaagagactcttcttgagccatcagctgggaggaaacagccgattaagggcagactaacctaagtggttagatctgaattgtgtctttctatccctgaaggccccttctgagagagtcacagttaaccactcttggggctccctgataaagagatctgtttttttctttttttttaaattaaaacaaagtgttttttttttcttttattaaatagagacagggtcttaccatgttgcgcaggctggtctcaaacttttgagctcaagcagtctgcccaccttggcctcccaaagtgctgggattataggcgtgagccactgcacccagccaacaaagagatctaatagacagagtcctgtcaggttagttttctaactctgtagtatagagaagtaggcccttcctcactttgattagtgactctattcagcaatcatttgttgagtgcctcctatgtaccaggtagtgttttaggtgctggatgtcctatagtgaacaaaaaagaccaacgttcctgttctcattaagcttatgttctagagaaggagagagatcataaacaactaaaatatctagtatgtaagatagcaaaagtgctctggagaaacttacagcagggaagtgtgggagagagggctgggattgaggtttgctaagttaataggatgggcagggacaagacctcatagagaagctaacatctgagccaggtgaataactgggatatctgatgttgatcatttcataaggaaaatgcaggcccatttggagttgactgtctcacccaatatgagttctctcctttctagctgctgtcaaatgatgtcactctctgagaacagagtggctcagcttaagcagactctcatcatggggcttaaggttcattttttctctaaaagggtttaagtgtaaaattgtctgtcactccctgcaggaaaagttgcttggtttgatgtcactgccaaccaaagaacagtttgaggaactgaaaaagaaaaggaaggaggaaatggagaggaagagggccgtggagagacaagtgagtgaagccagggatatggggcctgcttcctcctgtggctctcaagcacagaggctgccatgggctcccaggttgtgtgcggttgtagtgaatcagaacctctctctcaaatgtgcatatttcttctgttgtgtttcagcctcactttcatctatgggaactagaataattgtttttctccccagggcctatttttctttcagagcttctgctgattctctcatggctagaataccacagagattgacagttctccctatggcaggagttgcagaggaccaagacattaggaagttccttgtagaacatatcggtatatgcaatattaaacagaaaattatatgtgtatttaacgctgcgtgagattccagtgtagatgaggggaacagaccttagaggtttaagaaaagtatacggcctgtgaatctaagattgagaaaatctgatgccctaacttattcattatattttatttttgaaaatcagggtctcccttccgcccacatatacacaaaaacatgacttgattttagcagttggatatctttgtcctgaggtgagaaattggagtgtcactggcacagggatagagggacaacagagggtgggtgacagtgtgggctgctgccagcatagtgactgtttcttctctctgctttgctctctccccaggctgccctggagtcccagcgaaggcttgaggaaaggcagagtggcctggcttctcgagcggccaacggggaggtggcatctctccgcaggggccctgcccccttgagaaaggctgagggctggctcccactgtcaggaggtcaggggcagagtgaggactcagacccgctcctccagcagatccacaacatcacatcattcatcaggcaggccaaggccgcgggccgcatggatgaagtgcgcactctgcaggagaacctgcggcagctgcaggacgagtatgaccagcagcagacagagaaggccatcgagctgtcccggaggcaggctgaggaggaggacctgcagcgggaacagctgcagatgttgcgtgaacgggagttggaacgagaaagggagcagtttcgggtggcatccctgcacacacggactcggtccctggacttcagagaaatcggcccttttcagctggagcccagcagagagcctcgc

SEQ ID NO: 29084 - DNA, 2300 bp, Homo sapien
ccctcccagattttacagtcttacttggtcacttcacgtatgtacctgcggttataaattgagatgagtgctgtgaaggagaagtccattctgatgctctgagtaagaggcatttcttttgaggaagtgaggtttgggtttgggctgaggcgtgaagggtggttgtgtggcatggatgtggtgggctttgtgttatttgtggtcgttaggggtgagtgcatgggaagaaagggagctgtcagagtcagcatcagatgaaccactggctggggagggaacaggccagacctagggctgctatattccagtggaaaagttatgaagtcactgggtttcttaactagagggaaaaaatagggacctggtgtctcatttgtttattttctgagttgctgccacccttcagctttgaggaccaggcagtccctcctcggtggtcttctacagtccatccaaagctgagggtcacacatctcccctcactatatactgtggcttgtatccccaggttcttggggagaaatttctctgcttttgtggaatggttttgtctcaatttctcttgtgactgggtgtcttgatgaggtgacattggaagtgactttgccatgagccagtaagaaagagaatgtaacttattaagccctgaagtgtttaggccccaaatcaatttatttatttatttatttatttatttacttttttgagatggagtttcgctcttgttgcccaggctggagtgcaatggcatgatctcggctcactgcaacttccgcctcctgggttcaagcagttctcctgcctcagtacccccactagctgggattacaggcgcctaccaccacacccggcaaatttttgtatttttagtagagatagggtttcaccatattggccaggctggtctcgaactcctgacctcaggtgatccgcctgccttggcctcccaaagtgctgggattacaggcttgagccaccatgcctggccagccttttatttttgaagcagtgagaacatcaggtttgctacttaactgtcacttaatggcttataagatctgtcagggtgcagtggctcacatctgtaatctcagcagtttgggggggctcaggcaggaggattgcctgaggccaggagttagagacctgcctgggaaacatagcaagaacctgtctctataaataatttaaaaactagctgggtgtggtggcatactcctgtagtcccagcttcttaggaggctgaggcaggaggatcacttgaaccgagaaggtcgaggctgttgtgagcaattatagctcactgggtgacagagcaagatgctgtctcttaaaaaggaaaatatagtacgcccattagagataagtgctctacaaatataaaatagattttttctttttgactagtaggtttctattgtttctctttaactgatgttaggatttttgattttttgtatgtttttatggcagatactatatctttttcatctttgcatttctaacacaggtgtcttacaagtatcaagaacttactatatgtggttgaataaacaatcaaggtaaagagcatcaagtaaaaacttctgcttgttgataagtacttcagacattcccccagtggctgaagtggcatatgaattatgaagttggatcatttggaatgaatgtaagagaattgccaaggtattgtttgcttatttcaagaatctgtgcttcccacttcattgagtttttgttctccagtgatgttttcacattttaggttttgcagcttgcttggtctaaggatttgagaaagagtttgttttctcaaacttgcactgaataaacattaagtaccccattgaactgtgaaaagaatgaagaaaatcctcaattgctaccagtttgcctgaattggcttttttcccttcttcttttctttcttagggctcctcctactccagagaggaaacctcatccagggccatgaagccacttcctcaccatctgtgtgctgcttaagctaatgctgcgggaaccatggttccttgggaggaatcaagctgactcttggcatgagattcctgccttcctagggttgagagcggcactgccatggcttctctggacgacccaggggaagtgagggagggcttcctctgccctctgtgcctgaaggatctgcagtctttctatcagcttcactcacattacgaggaagaacactcaggggaagaccgtgatgtcaaagggcaaattaaaagtaagaggcgaggaccttgcctatcccctgctgtcgttgagagctttaactc

SEQ ID NO: 29085 - DNA, 2300 bp, Homo sapien
aaaattagccgggcgtggtggcgggtgcctgtagtcccagctactcgggaggctgaggcaggagaatggcataaacctgggaggcggagcttgcagtgagctgagatcacgccactgcactccagcctgggggacagagtgagactctgcctcaaaaaaaaaaaaaaaaaaaaaagaaaaaagaaaaaaaagaaacaatatcaagagcagtgcccaatccactgtgatttccagaattaacttacaagttgaggccacatagctattgcttttttgagcaaatgaaatgatgaatatgatatttttttcttttcttttctttcttttttttttttttttttgaggtggagtttcactttgttgcccaggctggagtgcagtgggacaatcttggctccctgcaaactctgcctcctgggttcaagcaattcttctgcctcaacctcctgagtagctgggattacaggcgagcgacaccacactcgactaatgttttatatgtttggtagagacagagtttcaccatgttggccaggctggtcttgaactcctgacctcaagttatctgcccacctcggcctcccaaagtgctgggattacaggcgtgagccaccgcgcccgaccaaatatgttttttgtaaatgataaaatgacaagcaaaaatcatgatggtttaataaacgttcattgccctacccaaaacatagtcctgcctgtaagtgtggctcgttttgggacctcggtggcttcagactttcaaaagggtggttttactcccaaagtcctggcttttgggacctaaggcagaagctagtgatggagacggggagcttggcatgttgctttgcttctgacaggttaggaagcctcttccttgtctccatcagtaaacaaagggaagtcattattcgctcctgcagatgttgtaacgttaaaaaaaaattggccatcagattgagagaaaaggctaagtcactggagccaatttcttttgtacagatgagagaactcaggcgaagaaaggggaaaggacctgctcaaagccacaaagtaacgtacagccagggctagaacccagatctctagacccctagttcactgccctttcactggtgattgctttccaaaaactcaatgctctccaagtccggagccccatgtccttaaatggaaggtgatggaggctcagtgctcctgtccagagaccaggtggggaagactttttggaggcagggaaagtgagatgggcaaagccaatatgcaggacaccctcctacctacctacctaccgtgcaattacctcaatcttcacaacactgtgaagcggagactatcattatcatccccattttacttctgtaaaagggggccagtaacactgcagggatgtaaacggaggcccaggatcgtcccatcgtcccatcgttctctgcagctcttgctcctagaggctggctattgctaaggtccagaacgtgtgcagggcacaaagcaaataggtctccgggactgggatgaggttttgcctctctataccccgtggtacccagcacagcgtaggcacggggtaggtcctggctgatcaatcgtcctgccttttgaaaatgccatcttttccacaggcttggccatgctgtacaccccgggatacaccttctcataccaagtctccactctcatgtggttctattcttggactttccatcgcctccacgtcccctgaatattttttctgtctctagctctcaggaactttgattccttggctgccttattctttgtgcactttggtcaagagccaaagatctactggtctcagctttcccacctgtacaaggcggtgcagagccattggctggctttgacgcgctattagttcgaattcgggacgtaagaaccgcacaaaattaccgagccccactttctctccgctccccaccatcccctccctcgttcggaaagcgcctgcgcagaagccgccggcccgccctccactattcgaatccgtatccgcccttttcgcgccctcgaagactcggcgctcgacaggcgtctaccagcttgtcttccggtttcgtcgccgccgcaggcgcacctgccgagttccgagcgaccgatggagatggcggctgcggctgagtgacggacggtggaggcccagagcccgggcctgaagggggggacaaacctgggtgcccgcaggagcccggcagggtacatacagagggtcaggcccagtctggggggcggggacacgactcctccagaacggagacgggcgggccgtgtgtggttgtggt

SEQ ID NO: 29086 - DNA, 2300 bp, Homo sapien
tctcatccctctctatgtctgtctcagctctcggtgggggagggctcccaagctgcaggatgacgacatgttgactatgcagctctgagtgcttaacattggacaaattccactgtcacagagctggcctaaggtggaggtggtactggacattctggcaggcattccacaaaggcacatgtcgtgagtctccaccaccaagttctcagagttttttggataattgatgatcacagaatacaaggtcaatatataaatgtcaatgctatttgcatatactagcaacagttggaaattaaagttaaataagcgataccatttacaatagcatcaaaaatatcaactgcttagaaataaatctgtcaaaagatatgcaaggcccatgcatgtgaaaactacaaaactgctgagagaaattgaagaagtcctgaagaaatggagaaattgacgatgctcatggattggaagactcaattttgttgagactgcaaatattaatactttgaagcttcaatttgctttacccctgccttgtctcactgtctcctatttggctttgtatcgtcaatgtctagctctgtgccaggcacaaaatagtttggtgttcactgaatacatgaacaaggaataaggattcaattccttatacagaatataggaataaatataggaagagatctcaactacctgggagtgcaataaaaggcttccttcaagatgcactaggaattctataagctgtgatgggagcaggaaccgaagtcctgtgaggagtaaaactatatttatctgctgtagcttgggggtcagtttgtgcaaaacagtgactgaaacacatatggcctgaactcatgtactgaaggactttctcacattagatatatttaagtagtggagttgactcattcaacattttaaaatatttgttgaacacctgctctggaacaaggcttgcgctcaacgctgggatcaaagtggtaaagacaggaagcatccctgcttcagctataaaactgtagttgctacctttgagagccatctttgggccaggcacaaaatcaaattctgtgtgtctttataacagcctgatgagaccgttgttattaagaacttcactaaatgtgaagaaatacacttaaactaagaaattagagtcccattttaaatgcaggccaaatgactgaaaaaaaatttagagtataattaaaaaattaaaagtacacacttaaaatgtagtttgataagttttgacaaacgtatatatttttacaccaccattgagatataaaacattctcatcatccgaaaagattcctttgtatccccttcccaaccactgatctgctttctaacatcgtagtgttttctagtgtttcttatagatggaattatacattatgtactcaattcttacttctttgactcagcatgaatttggtggtgcccatcactaattcatttttattactgctgacttcagacctttaggggagagaagacataaatcaaataatcacctaattaagtatttaattacaacagcatcaagttaacctaagggtaagtacaagtggaaatacattaccttgtttgttaacaattcaatcaatacgaccttggtgtacagtggggggctatagggtcatgattcagcttgtggaaaacaaatgaaaataaatgttagcgaagagtgactctaaagaacctctgtcctcacggtaatttttttaatgtgtcagatgctggtgggaggcattcttccttagctctttactcccatcccttacacttaacagaggaaaggatctgtaaggcgcgtacccctctactgcccactgtcgacgaaaacagcctcgccctgcaccgccaccgccacgcataaggcggtgtgtgggcagctcggacgtggcacctgccctcagctgctcaatcccgggcgccgcgacggtcacgtgcacagcggcaggcctttttgccccgcccccgcggcccggctcctgcgtgggcccggccccgcccacagcccgcgcagtcccgcgagcctggcctcggcggccccagcttctaaggagctcgtgagggccaggctgcgcctgcgtcgggcggctggtgggcggggcgagggccgctggggccgcgaagtggggcggccgggtgggctacaagccgggtctgggctgaggggcgcggcttcgcggtggaccccagcccggcaacgggaaggcgagctctcctccaccgtccaaagtaaactttgccgctccttccgcggcgctcccgagtcctcgccgccgccgggc

SEQ ID NO: 29087 - DNA, 2300 bp, Homo sapien
aagtggggggagggtgggaggagggagaggaatagaaaagataactattgggtcctggcttaatacgtgggtgatgaaataatatgcacaacaaacccccatgacacgtatttacttttgtaacaaacattcacatgtacccccaaacctaaaataaaaattaaagggaagaaactattggacttagcatcgtggcagtcagtcattgttgaccttgataagaacaggcatagtggagaggtggggctagaagcccagttggattggttttaaaagagactatgatgtaaggaagcaactgttgacagttcttgcaagaaagctgtgcaaagaaatgggcagtgatgggaagatgtgatcagaagtggtttaagtcttactttgtttaatcatagggaagtatggcattcttccctattacaatgtgttgatggcaggcactgagtcttgctagtcaatatccctgcgttctggaatgggcatggcacatagtaggtccagtgacaaatatcgagttaaactagccaagctttcctttttttaaaacaatgctccatcttatgtatagtgattttgccttttcagaatactttcatgtttataattttattttaattacaacactctgcagtaaataggacaggccttgttccctgtttgacagaagagtaaactgaaacatggaaaggttaaaaaccttgttcaagatccacagatatgccaattctttactcttctcactagaccacaccacccctaatcattagagacttatgatttgtttgagataccaaaatacttagtttttctgataggtcccattataaatattcagcgttcctaaataagctaagtgagaccatcgatcttaacatatagtaattgtcatgcataaaattttattgtatcaggcttgactgatgggactatcaaataatatattaggcagcattctttgtaataacaaaatattgaaaataatctgaatatccagattttctaaataagcaattgggggtgtagataaaatgtcatatttgtatgatggaatattatacaggcagttataagaaataaacttatctgtatagaacaacatagctctttttaaaatgttgagtgaaaaatgaaagatataagacatgcactattttttttaatatatacacttataccagaaacagttatttttttcattcatttttaggagtgggtacgtttgtattcaagtctaaaaagatgctgactaaatccatcaatagaagggaataagataagtgtagtggttaaaagagacattgttttatgaaaaggctagaatgaccaaaaaaaaaaaaaagttaatttaaacctgagtggtggggaatatatatttttatatacttctttttatttttttaaatttcatctcaaaaaaaaaactaatcctgactttaagatcctctacgggagaaaaatgcaacacagaacaaatagtaggaattactgaaatgcaacacagagcaaatagcaagtactattatacttcattgaaagtattcaaaaagattatttttgtttattaggaactgtttaattttaaagttttcaactgaaattataattcactaatatcattatattttaaggagagaatcagttaaggagatgtccatccaagtaattatttttcctacatcaaccataaaattaaagaaagaaaagtctccttttctctaagcctacttgtttgtttgcagctgacccacctccatacattgatggaattcgaattaacagccctcattatttgactaagataaagctgaccacacctggcacccatacctttacattagtggtttctcaatatgaaaaacagaacacaatccattacacggttcgggtaagtaaaaccaacacacaatgacaaaacacagtaatataaagtatgtaatatgctctgctttgtaagtggtattatctggagaaaaagtttatttctgaaaatgtattgctctctttttttgtgcttatcattttaatagtaaattatactttctgtagaaaataatacatttgaaaagaaatgtctttattttgaaagagcatttttattttcatagtaatagtttagccccgtggtaatatagtatgttggactaataatacatttctttttttctttttgagacagagtcttgctctgtcacccaggctggagtgagtgcattagtgcaatctcggctcactgcagcctccacttcccgggctcaagtaattctgcctcagcctcctgggtagctgggactacaggtgct

SEQ ID NO: 29088 - DNA, 2300 bp, Homo sapien
gtgattgggatatgtagcattcaaaaaaagtgaattgccaagatactggtgtcatgtaaattcccactttacataaaaacccatcaggacagaatgatgctcaatattttaaaattctaaaaatagggtgggatttttcattgtctctactttataattatcaaaacttattttgtattgctactaccttaaattgaaataaaatgtttatacttacggatattgcatagtttaagttagatttattgaaagatttcatctgtcgtgtttcatgtaaatgagaacagattatttgcatgaaaatatatacttcaacaaaaatctgttctttaacagagtagtggtagattattacactaatgagatttcactttggtaaatacttcatgctttcagttttagcctattaattttaggtggacaaatttaacaagttttctgttactttttaaaaagaaaaaatccagaacataagaactatattatgaacacatgatttgaacctgttgtggtaaagatcttgtacaggatgcaaactaaaaacctaatccctgccatcaaatttattagaagagacctatatatgaacaacttaaaggcactgatttctataatagagctctaaaaacatgccaccagtgtatgaataagggaaagattaattttggctggaccaatataaaaaattgtatttgaagaattgatactttaacttggaccttgaaggtaaagcttcaaaagacaggttactgaccattgagtgtttactatgtacccaatgtgtatatttttctttttaatcttcccaatagctgaataaagtatagatactattatttgtacttcttacaattgaggaaataagcctaagagattaaaagattttgcccagggttcacaagccttcttccctgagccctgattgagctgctgtgtgtgtctaatggcacccacagtcacggccgtctagtcgagggagggacaagatctagacccattgtagagggaggaaaaacaatccaggccttttggaggttctaaataacagacagaccagttgaattgttagagaggatgactcaagtttctaattcagcacatggacagatgctcatagcttcagtgaaaggtaagttttgacacattaaattgcccagaaaatccagatctggaatcaacgtggtatagtaagtgagatcacccaaaaagtcaagagtcacgtgaactaaagatggttaagaactgatttgggggaagttttttagaaagtatttctaatttagaaaaaaatacatagactaacaggagatacaagaaaacgagggttgggggaggattaagaagcccagtgaacagaattcccagaagagtataattaaatgtcagatgtggtggagataaagaggccacagtgacagcagtaggggcagactacgtaaaactagaaatttgactaggtgatagtgtgagaagggagccctggtcaaaaggtggtctgcatccttttctggtgtaggagacaagcaagtggtaggctgatgggaaagggggattgaggcaggaaacaagagaaattcttaatgcccataaggaatactctagtgctactgactgactgcctaggctttgtcttttgtaaagacaagggaaagaaagccccagtgttagaaaactccttcccactttcattctctgcgagaagtacctagaaatttctagttattagactgtataacttgactctgctgtaaaaactttatcctagcttgggctattttccagatggtgtttcttctaggaggaaaaagaattgcctcaattgcagggaagtttttgctaatggtaagtcaagcaagtctcagtgtctttactacaggtaaaagggtgtaaggagattttatgagaactgaatgaaccctgaaggtcactagtcaaattcaggtatgctgttaagtgttcttgcttgagacccaaattacaagactggccaatttttgtatttttggtaaagactgggtttcactatgttgcccaggctggtctcgaactcctgggctcaagtgatccaccagccttggcctcccaaagtgctgggattacaggcatgagcccttgggcccagccggctgtttaatgttcttaaatagcacaagggacttctatgaactttcctagatgaaatatttattaactactaggtaaaacacttgtttgatactgcaaagggttatttctgaaacttaaacctcatgattggccaaccaagaactttttctccacagcatgctttaataatgaaa

SEQ ID NO: 29089 - DNA, 2300 bp, Homo sapien
attacaggcatgaaccaccatgagcagcccctcctgtatactttaagtcagctctagatttcttacctgcaatacctaatacaatgcaaatatgtacatagttgtcatatactgtattttttttttttctagagagcaaggcagtctcgctttgttgcccaggctggtctggaactcccggcctccagtgatcctccttgcctcagcctcccaaaatgctaggattacaggtgttagccaccactcctggccatgtatttttaaatatgcatttttttaattgttgtgtttttttcccccaaatattttctatctgtggttagttgaatttacacatgtggaacctgagaggctatggagggttgactgtatatagtactgcctgtggtttatttatttttctcattttatctttagaaagactattaggattaacactatagctggcccagatctccaaaaaataagacaacaaaagtctgaactgatgttcttgagcagttggcctatgtctcatagatgtattttgctcttgacctaagcttaagcaggaatgtagtttggagtttgccatttagaatggagaggatagggttctgctagctgagaagcatttatcatagtcagggctgaccccagagttctgtttatttcaaactctgtctctcagttcattcagagctaggatgtacctgcaaagttggaggctcaattccaagccaccagagaaggttggtggctcctgtgttccaaagtgacccctatggctatcttgttcctggcttcatctatcattggaaaaccaaaagcaactatgtctttagcaaggagctttgaagcacctctcacagaattgctgactcatccttgatttaaagagcaatgaacaggtctgacctttttagaaacaaaccatggcactacctccaggagacaggacaaatttcctttgacagtggactacagtgccagcgtgtatggggtggtgccttgcccaaggagtaaccctctagcctagtttctgataaaaccaccaggagcaggactatttattcatttgagaaggggtctggctgtattgtccaggctggtgttgaactcctggcctcaagtgatccttgtgtcctggcatctcaaagagctgggattacagatacgagccaccacgttgtgccagacccaggttttgtaaggtggctttgatgataggttctcagaaagaagctcctttctcaagcaaatttgtcctccaaactcagagccgatgggctacaggcctccgtgtaggacatgtgcacgttctgcatttctcaaggcaaggagacgtgagcagccatgtgctcatctgctttgccaaggtcatcctttgcgttcccctgacatcacagtggccctgacatttcataaaagcacacacacgtgcctcttcagtttggccttttcggatgctgtgtctgccaggccaactctgtctccctacttgttgatggtgggcagaaagtctcactaattcataaattcttggccagagtgtgcccatcaacaggggttacacttgccacctccttaaatcccagctcaatgcattctccatgctcctggctattcaggtaggaccgccgcacctctgtgtttcggtatggggctcgcccagagaggccgcagccttcggcaatgcatcagtgcacggaacctccgccattcccaaggttcgctcaagaggatgagtgtgctttgggtatagggtttcggcaagtcttggtcctgagggccagggtcactgagcgtaggcttcagaaggcgacttcagtgtgaaaacacccacgcctccctaccacacaaacaacgagcctcggaggagggctggaggaggggactcccgaaagcgggaggcttgcgttacgtagttgagatatatccgagctgctaagttacaagggggtgggggctgtcctattttgccaccttggagatgtggagggagctggggttttgcgacggagacctggatagctgggactggcggcggaacgcgaggccggggcgggacgggggcggagcgggcgctgcgctgactgccgcggcagaaagggggcggccgcgcccatttcctctgctccgccgcggccggaggtatccgcatcggcgagctgcgtctcccgggtgtcggccccggcggctccccgaccgtgcccggctgtggcgaggcggctccagcccagcctgtggcagccgcgacccccggggcgctccggagcccactgcgcggcgcgcgtgccggctgcctgcatggacgcggc

SEQ ID NO: 29090 - DNA, 2300 bp, Homo sapien
tcttctgcctcagcctctcgagtagctgggattacaggcatgtgccaccatgcccagctaatttttgtatttttaccatgttgtcctggctggtctcaaactcctgacctcaggtgatccacctgcctcggcctcccaaagtgctaggattacagatgtgagccaccatgcctggcctagagaccaggtcttgctttgttgtccaggctggtctcaaacgcctggcctcaagcgatcgtctctcctgcctcggcctcccaaaggactgagattacaggcatgagccaccacatctggcccctcctgtatactttattatttatatatatatatttattttgagacagggtcttgctgtcacctaagctggggggcagtggtgcaatctcagctcactgcaacctctacctcctgggcttaagcaatcttcccatctcagcctcccaaatagctgtgactacaggcatgagccaccacacttggcgaattttttgtattttttgtagagatggtgtttcaccatgttgtccaggctggtcttgaactcctgagctcaagcaacccacccaccttggctttccaaagtattgagattacaggcatgaaccaccatgagcagcccctcctgtatactttaagtcagctctagatttcttacctgcaatacctaatacaatgcaaatatgtacatagttgtcatatactgtattttttttttttctagagagcaaggcagtctcgctttgttgcccaggctggtctggaactcccggcctccagtgatcctccttgcctcagcctcccaaaatgctaggattacaggtgttagccaccactcctggccatgtatttttaaatatgcatttttttaattgttgtgtttttttcccccaaatattttctatctgtggttagttgaatttacacatgtggaacctgagaggctatggagggttgactgtatatagtactgcctgtggtttatttatttttctcattttatctttagaaagactattaggattaacactatagctggcccagatctccaaaaaataagacaacaaaagtctgaactgatgttcttgagcagttggcctatgtctcatagatgtattttgctcttgacctaagcttaagcaggaatgtagtttggagtttgccatttagaatggagaggatagggttctgctagctgagaagcatttatcatagtcagggctgaccccagagttctgtttatttcaaactctgtctctcagttcattcagagctaggatgtacctgcaaagttggaggctcaattccaagccaccagagaaggttggtggctcctgtgttccaaagtgacccctatggctatcttgttcctggcttcatctatcattggaaaaccaaaagcaactatgtctttagcaaggagctttgaagcacctctcacagaattgctgactcatccttgatttaaagagcaatgaacaggtctgacctttttagaaacaaaccatggcactacctccaggagacaggacaaatttcctttgacagtggactacagtgccagcgtgtatggggtggtgccttgcccaaggagtaaccctctagcctagtttctgataaaaccaccaggagcaggactatttattcatttgagaaggggtctggctgtattgtccaggctggtgttgaactcctggcctcaagtgatccttgtgtcctggcatctcaaagagctgggattacagatacgagccaccacgttgtgccagacccaggttttgtaaggtggctttgatgataggttctcagaaagaagctcctttctcaagcaaatttgtcctccaaactcagagccgatgggctacaggcctccgtgtaggacatgtgcacgttctgcatttctcaaggcaaggagacgtgagcagccatgtgctcatctgctttgccaaggtcatcctttgcgttcccctgacatcacagtggccctgacatttcataaaagcacacacacgtgcctcttcagtttggccttttcggatgctgtgtctgccaggccaactctgtctccctacttgttgatggtgggcagaaagtctcactaattcataaattcttggccagagtgtgcccatcaacaggggttacacttgccacctccttaaatcccagctcaatgcattctccatgctcctggctattcaggtaggaccgccgcacctctgtgtttcggtatggggctcgcccagagaggccgcagccttcggcaatgcatcagtgcacggaacctccgccattcccaa

SEQ ID NO: 29091 - DNA, 2300 bp, Homo sapien
gcatccagtcaaagaagaggaaaacacacaaaggagcacatgtaggcaatttttgtcagacaggcatgaaagtggcatgtcactgctgttcactttgtcacaaagccacacctagccaaatggtaggtagggaaatgctgttgattttattgcttaaggaaggggagaatggatttggtggacagctagttatctccactatagacagctaacatcattgtgacacaaaattaatcactcataaactgactacatatccattcctttcaaaaccaagcttccaccgctgcccattgtgtcacagtctttgtccattatttcctctatagttgtcaggttacaacagcacaatgccaacataaattacataaaaattgatggcaaagtgaaactgtcagtcttgcaaaataaggttttaaaaagattaggaaagcaattttggggaactgccctaatcatttgctaagccattgacatatgaggaaacagcagcattagatgagagaaaaatctatgaggataaggaccaaaaagatacttcaaatgagaatgatttgaatatcaaagaggtaagagagacacctgggaaaattaacaaagacctcagctatttttgccaaaattacactgttaatgattgtgctgtgaaagtcaaatctgaatcgaccaattttttattatatgatcatataattttaccagaaaaacatatgcaaaaaattcctcaacagttgattgattcatttttgtgattattgttattttaagaatcagctggctggtgtcctcttgcctggcttcccctccaagtctcaatctctaaatgttgggacgccccagagctgtgtcctggtcctcttttcctccacatctcccctattctaagtgatttcagtcccttgatctcattcagtcccttggctttaaatatcatctacatgcagtcgactcttaaatttatatctgcagtcttggcctgtcccctgagcttcagacgtctatcctactgtctacttcacatctccacttgagtgtttaatagcctgtcagacttgggtgcctgaaaacaggcttcttgattgcaaaactgtttcttaagtctcccatacctcactctgtaaatggcagcttcagtcagctgcttgctcaagtcaaaattttgagttattcttgatgtctctgcctctgccccctctgcccccacatcggatggaattgcaagttttgttggagctaatttccaaatataacctaaatcaactccagtccatctccccactaccatcggaccccaagcccaggcagccacgtctctcactagggcccctgggacagcctgctgacctgtatccctactcctgctcttgccttcatggccatttcatgtccacacagcagccccagtgatcactgaagcaaatatactgactgtgtcattctttgaattcagtcccttcagtgcttcccatcacttttataataactgtaaaaacttattataaaacctattataaaggctggacatggtggctcatgcctataatcccagcacgttgggaggccaaggtgggtggatcacttgagcccaggagttcaagaccagtctgggcaaggtagtaagaccccatctctattttttaaaaataaaaaataaaaattaaaaagcaaaatagactagctagtgataaagataattgctatgaagaaaacaaaacagggtaatgagatagagaggaatattaatccattctcacactgttatgaagaaatacctgaacctgggtaattaaaggaaagaagttgaattgactgacagttctgcattgctggggaggcctcaggagacttacaatcatgctggaaggcaaaggagaagcaggcaccttcttcacagggtggcaggacagagtgagtgcaagcaggggaaatgccagacacttatgaactatcagatcttgtgagaactcattcattatcacgagaacaggatggaggaaactgcccccatgatccaatcacttcccaccaggtccctcccatgacacaattcaagatgagatttgggtggggatacagccaaactatatagagagggctggaggacaaactgttccagatgggagttggagaaagccttgctatggatgtgacatttgggctgagatgtggatgatgagaaggagtcaggcagccgtgccctggaggagatagcgatgcagacagcagaagccctgaggacagagccagctgacagcccatgtggtgccagagggtgagcgaggaggaggggcggtgagagg

SEQ ID NO: 29092 - DNA, 2300 bp, Homo sapien
ctcctcagttaaaaatgatttattaaaatgaagtcttgctcctgtagcagtagtgaatattacatgctttatagtgagtgatttattaatcagttttatctggtaacagtgataatttctatgtatacaagtggaaattggatcgccttttgatgttgtatttttctatatgtatcagcctagtggttgcattaaaattcatttgtatttcttccccctgtagcaaaatcctttatatgatacagaaagatgcaaggtattccagtgtgatctgactaaagatgatcttctggatcatgtaccgccagagtctgtggatgttgttatgttgatatttgtgctgtcagctgttcatcctgataagatgcaccttgtcttacaaaacatttacaaggttagtgatttggggcctgcacttgagggttggacagtctggattcttttacttaccttccctcatgaggctcatgtactgtctagattcacatagtctctccattctcactaggtaggctgtgtagtgagtgtatagaaaggggtcctctggcataaaacatccaccctaaattctgatttgtgcagtgccatggctgctcttcagagcttcgccagccctgggacaaggatgattttgcagttacctgggatccatggagtcctgctataaggtgagaggagttatggtttagtggtcaagagtacacagtttggccaggtgtggtgtttcatgcctgtaatcccaacactttgggatgccaaggcaggtgaatcacttgaggtcaggagtttgaaaccagcctggccaacatagcaagaccttgtctaaaaaaagctaatgtatgatcattggcagatcacttaaccctgttgagtattggtttccgtgtctcatgtgagaataataatcacattcctttgtcccacagttgggtgaagatacaatgagaaaatgtatggttaagcagtcaaatgctaggcatgtatcagtcattagcaccgtgattgagctatacattgtggcacaatgaaatgagagctgaggctcagaatgaggaaaaccaacctgaatcagtaaagagccaaaacgacattctggttttttgtttgtttgtttgtttgtttttttaagagacagttgaatacagtttgagtactaggagatggtgaataaaatgttgcaagaaagtgcttcaatgaggataacactttcatttattgtctctaacacttatttatttatttttgagacagggtcttgctgtgtcactcaggctggagtgcagtggcatggacgtggctcactgcagcctcaacttcctgggctcaagcagttctcccacctcagcctctgaagtagttgggactacaggacgcactaccagatccagctaatttttaatttttgtgtagagatggggtctcactatattgcccaggttggtctctaacattttaatcctgtgacactggacattccagggtgctcttggaggtactcaagaattgtcttcagggacgagcgaggtggctcacgcctgtaatcccaactttgggagactgaggtgggcaaattacttgaggtcaggagttcgagactagcctggccaacatggtgaaacctcatctctactaaaatacaaaaattagccgggcatggtggcgggcacctataatcccagctactcgggaggctgagacacgagaatcacttgaacgtgggagacggaggttgcagtgagctgagattatgccactgcactccagcctgggcgacagagcaagactccatctcaaaaaaaaaaaaaaaagaagtgtcttagtgttatggagccctgcctggtcttactatctttttaagtagtaggccattttggttccgtattatgggcatttcagtctgtccccttagtaactatcacaaatttattttaagtcctaacttaatcaggttttattttgacagggttctccaaagtcatgttcagcctgcttttgtttcataggtattaaaaccaggcaaaagtgtcttgtttcgtgactacggactgtatgatcatgccatgcttaggtttaaagccagcagcaaacttggagaaaacttttatgttagacaagatgggaccagatcatatttttttactgatggtaagatgaatggaatccagtctttaaatgttttattctttgtttctgtttatttgattgcattatcactgcaaggctgcttggagaaggcttgcgacatgtgcacgagaccctgaaacaagccctctactgcacaatatttacccagcacctgg

SEQ ID NO: 29093 - DNA, 2300 bp, Homo sapien
catagatggtgcaccaaccttaacatattcaatggctcttggagaaaaatcacaggcataggcaaagatattcggatcttcttctaaaagtgggaataaacagtttccaaccccacagccagcttcaagcattgttaacttttgatcttcaaactggggaaagacagctcaaagttatagtatatcacatttgcataatgaagaaataaaccaaactaaaaggtccagaatatgagaggtctccgaccccatggagcagacgatcaacaagagaactaataagcaaaagctaatactggtacttcatttgtcatccaacattaacaatttggtgtggaggaaaaaaacagcacaatggctaactcggctctggagttaaactgccagcacccaaatctcaactcctcccctgcattctatccttgggtaaatcacttaaacagctctgtgcctcaattttaccttggggacaaatgagtacaatactaatacttacacttcacagagccggtataagggtcaaatgataggccatgtagaaaacagccatggtaaatagttactaacattaactattatattattctgaatctgtcactgaagtcacttagcatgaatttatatttttgtttttaaaatttttaatgtttaaaattttaaaattcagaacatagggtctcactatgctgcctaggcttggctaattcatgttgactattcacaggcacaagccgcctgcctcagcctctggagtagctggcaatagccaccagacctggctcttgaatttaatatataatgtttacaactatcagatcagcttaaagaaatagaaaacacccactaaagttctctctcctatatgttaaccaaaccagaaactgctaaaactttggtgttaagaccaaacagtatatttctctcctaaaacgcaaagcattttgataggcttcttaaattctctacttcgcactctccctaggaatgcaatacagcacacctcttcacatttttttttcttttgagacagagtctcgttctgtcaccaggctggagtgcagtggcacaatctcggctcactgctatctccgcctcccgggttcaagcgattctcctgcctcagccttccaagtagctgggactacaggcgagcaccaccacacccagctaatttttgtatttttagtaaagacggggtttcatcatgttggccaggatggtctcgatctcttgacttcgtgatccgcctgccttggcctccccaagtactgggattacaggcatgagccatggcaccctcttcacattttaaatgaagaacagctcagataaggcgtaatattagcttacctctctacatgatcttagctcctcaaactctctggtggtccagtgtctgtctttgaagaaattagtgctatttcttttgtaaaaaagatcccaatttttctgagcctcttgttccaatttctgctgtttaaaatcagacaccaaagtttggtctcttttcagtttctcctcttcttcagaggtgagaatccttgcctgcagccctttcctttgcaaagaagccatctctgaaactgacggtaacacttaacacagctgaagattctccatcaccaaataatatgaatccacgctaatggatcagatacatttcctgaggtgagtttcacgcctcaaacagcacagggggcttcgcagagaaaagaattagattctggttagtggttacagttcaagacgccaggttcaattcaccaaatgtttatgagatgcagactgtacaaaaaaaaatccttcccgctatatgagaggtcacaaagaagacaaacacacagtccctaccttcagtgggcttacattcatttcagtggccagactatctcatgcaccatacttttattcaaaccagatgagtcaactattacaataaatcgatttagtttacgaaaaaggacgctctcaagaactgactgggaaaccttgcgaagaaaatattcctcaattttcggtgcccgcgaaaggggtgacttaaaaaccacaatggccttagctggaagcgggtggtcaattgtcagatacaagtgaggtcatcgtttcccaagggtcggacctccgttttttcgggggaaatgaagctaagcctgggtgggctcatttcctgatcacactcacaagaggctgtcataggaaccagagggagcgtcactttgcagggactgagaccctcgcaccgccatcaccgggcaaagtggagaaagagacccaatgacgcgtggctgaggtcccgagga

SEQ ID NO: 29094 - DNA, 2300 bp, Homo sapien
tattctgaatctgtcactgaagtcacttagcatgaatttatatttttgtttttaaaatttttaatgtttaaaattttaaaattcagaacatagggtctcactatgctgcctaggcttggctaattcatgttgactattcacaggcacaagccgcctgcctcagcctctggagtagctggcaatagccaccagacctggctcttgaatttaatatataatgtttacaactatcagatcagcttaaagaaatagaaaacacccactaaagttctctctcctatatgttaaccaaaccagaaactgctaaaactttggtgttaagaccaaacagtatatttctctcctaaaacgcaaagcattttgataggcttcttaaattctctacttcgcactctccctaggaatgcaatacagcacacctcttcacatttttttttcttttgagacagagtctcgttctgtcaccaggctggagtgcagtggcacaatctcggctcactgctatctccgcctcccgggttcaagcgattctcctgcctcagccttccaagtagctgggactacaggcgagcaccaccacacccagctaatttttgtatttttagtaaagacggggtttcatcatgttggccaggatggtctcgatctcttgacttcgtgatccgcctgccttggcctccccaagtactgggattacaggcatgagccatggcaccctcttcacattttaaatgaagaacagctcagataaggcgtaatattagcttacctctctacatgatcttagctcctcaaactctctggtggtccagtgtctgtctttgaagaaattagtgctatttcttttgtaaaaaagatcccaatttttctgagcctcttgttccaatttctgctgtttaaaatcagacaccaaagtttggtctcttttcagtttctcctcttcttcagaggtgagaatccttgcctgcagccctttcctttgcaaagaagccatctctgaaactgacggtaacacttaacacagctgaagattctccatcaccaaataatatgaatccacgctaatggatcagatacatttcctgaggtgagtttcacgcctcaaacagcacagggggcttcgcagagaaaagaattagattctggttagtggttacagttcaagacgccaggttcaattcaccaaatgtttatgagatgcagactgtacaaaaaaaaatccttcccgctatatgagaggtcacaaagaagacaaacacacagtccctaccttcagtgggcttacattcatttcagtggccagactatctcatgcaccatacttttattcaaaccagatgagtcaactattacaataaatcgatttagtttacgaaaaaggacgctctcaagaactgactgggaaaccttgcgaagaaaatattcctcaattttcggtgcccgcgaaaggggtgacttaaaaaccacaatggccttagctggaagcgggtggtcaattgtcagatacaagtgaggtcatcgtttcccaagggtcggacctccgttttttcgggggaaatgaagctaagcctgggtgggctcatttcctgatcacactcacaagaggctgtcataggaaccagagggagcgtcactttgcagggactgagaccctcgcaccgccatcaccgggcaaagtggagaaagagacccaatgacgcgtggctgaggtcccgaggatccatctcaggaccctcaggatagactaggctgcatgggcccctagaccctgaggagggcgtccatgatggctagccgacccgcgttaatttagtcagccacgctcagggctcaccgtcatcagttcctaaattcacctgcagggctagggccaggcgcactcaccccacagccagccccactgggcctcggaggcagaatacgggaagaaccgcgaaacaaccctaaaccaattctgaggaccacgaattcggattatccgggagttcttttgccatggcaccgcccccgccacttccgctaggaacccggaagttcctacccgacgccggaagtcccacggccttgcctcctcagattcctctctcacccccacgcagaggagagaacttgcttctggacccgggtgggtgccggctcggctctccttgtcttccagagcggtggcccggaagcacagtcctcccagacgccagcgccagaagctcggatcgcggctgcaccgggagagcgccgatctgggtgcgaggcaggtgcggggccatgaatgggaccgcaaacccgctgctggaccgcgagga

SEQ ID NO: 29095 - DNA, 2300 bp, Homo sapien
ttttgattattctagagggaaaaaagaatttacaggccattttattaaacaaagatattcccttctcccaagggagagaggaaaattgtctcatcatccataataagttgcttttttagggttgtgaggatcaaaagtaacagcatatgaaacagattctgtgactgtaaactctatatgaaatatgaaaggccacagcatcatcaaaagctgatttcattccgcatagaaactgtcaaaattaggatttgccatactcaagttccatagctgttttttgtttttttttttttttaatagtgatggggtctcactatgctgcccaggctggtctcaaactcctgggctcaagctatctgtcgacctcggcctcccaaagtactgggattatagtgtcagccaccactctcagccagttccacagctttaacaaagacacttcgtagatgttcatagcagacaactgaactgtatctccgcaagttatcctgctcgtgtttctaaactgcagttagaatacaacataatagccatcttaattcacattcacacctgcctcaaactgcaggacaggtgcacacatgaactatatgatttaaattccacattgcccttcaccaaaagaaaacatcaacttagtaaactcttcaggaaatgatgttcttatcttattcccatctcttctctctgaaagagctggatctgctgtcagtaggaagcatagcaatggcatggcaagtgactacacaaagatgggatttcattatctaaaacgccctcttcacatgtgttgagtcacatctattaggtcctctgacaaaaacaagtcttaacaacagcgttagcaccacggaaaccagaagttcatgaatcacggagggatgctctgtcagccaattcctaactgccaaaccttcacccaggacatagggtggaagtgcactctctcaacagcgtctataattatgtagaaaaaggtccggcataatgactatttggacattccttacgcctgctctcttctgcttccaaacgtagaccaatctttaacctatcccaggctcacgaactctgatttgactctttacccacaaggaacttggtctggaggaaaagcccgggtggtataggtgacctcaaaagacatccaagtcaaatgaagcacagaaaggagatggaagaagactctgatgaggcgcagagaggatgccaattctttggctgtagaggggacaaagcacagtatttgggagtccaggaccaagtcggaggagaaaagcagggaagagaatgggttctaaggcagtggatgaggctcataacaaacaagaagcgtcttttaaatgtggagaaccctgatgggagcatcggaaaggaggggaggggtttcgagggagaagtggacccggataagaggggggaggtttgccttgggggagggaggtttgccttaggggcgaggttgggggcggggagggatggaaatggaaagaggccaaagacctttggaactagtgtttgagactgtgaggtagaagaatagtagggagtgacgaagatttgggagaaataatctgggtaaaagaagggacaaatcgatgtcccaaaggatttggggttcgagagaaagtaactgacgctggcagggggttccctggaatctgaagggccgagggaagaaaggaaggagtcaaggttgatatgtggcggctggagcggccgaagggaaccgtggggagcgctgacttacaacgaatagtgtggaaggaggcccgcggccgcttctcgaagctctccccgagcctcaggcaatgttcctcgcggtccagcagcgggtttgcggtcccattcatggccccgcacctgcctcgcacccagatcggcgctctcccggtgcagccgcgatccgagcttctggcgctggcgtctgggaggactgtgcttccgggccaccgctctggaagacaaggagagccgagccggcacccacccgggtccagaagcaagttctctcctctgcgtgggggtgagagaggaatctgaggaggcaaggccgtgggacttccggcgtcgggtaggaacttccgggttcctagcggaagtggcgggggcggtgccatggcaaaagaactcccggataatccgaattcgtggtcctcagaattggtttagggttgtttcgcggttcttcccgtattctgcctccgaggcccagtggggctggctgtggggtgagtgcgcctggccctagccctgcaggtgaatttaggaactgatgacggtgagccctgagcgtggct

SEQ ID NO: 29096 - DNA, 2300 bp, Homo sapien
atctctactaaaaatacaaaaaattagccgggcgtggtggcgggcgcctatagtcccagctacttgggaggctgaggcaggagaacggcatgaacctgggaggcggagcttgcagtgagtcgagatcgcgcaactgcactccagcctgggtgacagagcgagactccatctcaaaataaataaataaataaataaataaataaataaataaataaataaatcaaaatataaagtctgttattgagaagggcatagatacactgcttccttgtatgttgttttcaagacggagccttgctctgtcgcccaggttggagtgcagtggtgcgatcttggctcactgcaacctccacctcccgggttcaagtgattcccctgcctcagcctcctgagtagatgggattacaggtgccttccaccacgcctggctaattcttgtatttttagtagagatggggtttcaccattttgttcaggctggtctggaactccggacctcgtgatccgcccacctcggcctcccaaagtgctgggaatacaggcgtgagccaccacacccagctgctgcttcctcttttacctcattcaattttattagctaagccctttatttcgttcccttgtcagctcatggtaggggctttcacagcacatcaactgtataaagacagtatcaagaagatcatttgttgactgcaacattttctgtcttcagttatacaaaaggaatccaaacaatttttattccaacttttttcttaagaaaatgaagacatttacaattccacagtgtattccccctcctcctgtgtttatggaactatatttgcaaccacatcatgggatgggcaagaaatgtcatattttgttagatcctttaaactaagttaaatctggctctgagagtccaacctactaggatgccaaataaattaattcaggcattattaggattttcactactcctccaacaaccacaaataggttgggcaaagatcctggtgaattatggcagaaaaatgtcagggaaggtccctccaacctttggtctactccattcacctctgaaatagagtagaaatagaaatagacttgttgtccaagtccctgtggtccacagatacctggtggctgctgttctcatgccatacgtgggtatcagaacattttcaaggctgggagtcctggtccccacagttcaactttccaaggagcaccccacaaccattctttctgagacctgtctctttctcaggatacaaggggtccctctcctgtccatgtctagggaggtctctcctcttccatccctgacccctccttcctcatactcctcatataccagcaccccaattaggagctttgtccttcagagaacagaaggcagaaagaaaagtttgtttccaatagtacctgcttttagcaagggcaagaaagcacaaactcttgctacctccttgaaatagggagaggaggaaggaaatactgggagaacaaacactgattagtatgggtaataacttatgtttgctgcgcctgtttccatgttgttaggggaatcagatttgagatgcagcccaggccatgtgcccacactccataattcatttctggaattggctggatgatctgaatgggggtcctttcaactagtcctcttcctccttggttctggaaggcatgatgtccccctggagccccataactatgagctaccaaccgcagagactgagagcttggcctgagttgtgccttcagaagggactctcttggcccctggggtacctaggggctcacaaaactgaggagtaggccaggcgcggtggctcacacctgtaatcccagcactttggaaggccgaggtgggcagatcatgaggtcaggagatcgagaccatcctggctaacacagtgaaaccccatctctactaaaaatacaaaaaattagccgggcgtagtggcgggcgcctgtagtcccagctacatgggaggctgaggcaggagaatggcatgaacccgggaggcggagcttgcagtaagccaagatcgagtcactgcactccagcctgggtgacagagcaagactccatctcaaaaaaaacaaaaaacaaaaaacaacaaaaacaacaaaaaaaaacaaaaccaaaaccaaaaaaaactgaggagtagtccaggggcaatgggattggtggatgtgggatgtgtaggagatccttagcggactgggatcttaatggtctcactgtgtttatctctttgtaaaggccagccctcacctgacttgtctggttccctcctggg

SEQ ID NO: 29097 - DNA, 2300 bp, Homo sapien
gggcttagagctcatctggtccaaggctttcattgtacatctagaaaaatccagacccacaggggaaatgggttgtcctaggtcacacagtgagttagtgccagggctaaagaccagggctcttaatcccaggctggcacacttggctggagagcaattaaaagtagttgagcatacatccagaaatttgacttaaattaaatggtgcatgcttggaaagacagagacaatgccagagaatgagacaaagttatagatagagagacacagagacagagaaagacagagacagaaaagagagtagcagaaggagagaaacacagagaagaggcagaagatattcgtgaacctgaaccattaggttcaaatagagattcaaacacctgccaagttggacaggaccccagcgatcatctagtccagctacttttgtttttacaataatgaaacaaactacagctgagtggtttacatatgtcaaacctttttagaaaaagtttgatgccatgtggttaaaaaaaacacagtaagtgcttttggtgtgaaaagtggcaaaacttccatctctgaaggtttgcgaaatgaaatttgaaaaatgaagagctgcaagaatatgactcagaatagagaaagtcaggaaaatgtgatgcagatacttctgcaactctctaggactcaggactgaggactccctggccttattgctactttctctgaggtcttagacccagtttctgagaaggacaaaggggaattccccagagaaggaacacagcctaagcctcacctcccactcctcccatcttgatatagcaagtctctgctttcaagtatcagctcaaatcccacctcttccaggaatccttccttgatatctcacttggaccctctacccctcaaccgttacccatttcttccttctataaatcccttcaggcatccctgccctatgttagccactcttctttttttaccttatacaacagttatccaagaatatgtcaataagagagcccttattcggtgccaggaattccaaaagctgtagctctaatcctcacagcaaactatcaaagtcggctttgcacgcccactttataagtaagaaagcttagactccgaaagaatgaataacttcctcaaggtcacacagctactaagtggcaaaaccaggacttaagcccaacttggatgactccagggccagtactcttcccgtgacactgaacgacacattccaagggcgggaactgtgtctagtcattatgtcttgcacaatttggtacttactgtgtttctgaatgaataaaacagtaaatgaatgaatgaacataagtgtcctttcttttgaaggttatagtgcagggcttggcaaactacagcctgtgggccgaatccagcctgcctcctatatttgtgtaaacttttacaaaacatgaccaatctcattccttcatgtattgtctatggctgctgtcctgtacaatggcaaagtgaggttgtaacggagaccatgtgacccacaaagcctaaatatttactatgttgacctttatagcaaaagtttgctgactcctgctatagcttatggtctttactaagctgatcaaaacaacagtgcttattgctaagtagtataataataatcttgtcttttataatctaaaatattgtgtgtgtccatgcttgtgcactgggtgtgcctataaagtaccagatagatttaagcatgtaactggtatatgccgcttcatccaaaaagacttgcctacatgccctttggaaatctatatattttgtttgtttgtggtttcgttgttgttgttttagttacgtttagctttgtcagcaacactttggcccagacaggattagagctgagacccctggccatgaaggtcttccctgaagcagaggagggcaggctccccttggacggtctcggtggggggttgactttgaggcttaccagagcagtcaatactgctgtggtattttgagtcaagtcggtttttgagccaaatgaaaagcagcctgtttgattgctctcaatttcctcttggcttgcagggggataagtatccctgggctcccaacctcatatcctcccctgggctgaaggcactcttgtcctccaagcctcccctacagcagtgttcatgggcagctggagcagggctgcctacccattgctactcccaggagctcaggactggctccagacccctggcatctggagcagaagcaacatcaaagcagggattggccaactcccacccctaatgccaaacaggccaggc

SEQ ID NO: 29098 - DNA, 2300 bp, Homo sapien
ttcaaaaacaatagcagcaggtgtcaccggtaggacgtattgacagaatttgttccaagggtatggtcagtggtgaattctttgtgctgagagaaggaagaagtcatactggctttgcagaggaggaatctgagctagatagtaaaaattcatattctgacaccaagttactcaaaagataccttcctcccaggtagactgtaccttctccaagccactggaagctggctgctggggctccaggagttaacaagagtgagcctgagaatgtcctgattgagtttggccagcaatcacagctccttcttgtaaaaattttgggagcagctaaatgggggtaccctctctttaatctgtcctataaattttgaatgtagttcaggtatatttttcatgctttcaaaagctttccttatcaactctgtatcagttagctattgctgatgagcaagtcatcctaaaacttactggtttgaaacaatagccgttttatttgctcatgacttcgtaatctgggctgggcagttctttcgagggtctcacttggggtcactcctgtggctggcatcatctgagaccaggacagggctagatgttccaaaatggcctcactcgcctgttgatgctgcatctgggatagtcagaacagctggaggctggctgcttccccctccatgtggcctcttcaatagtccagactttttaaagtggcagctgattttcaagaaaaggcaaaagcaggagctgccaggccttttaaggcctaggccaggagatggcacagtgtccctttagccacattctattggtcaaagtaagtcacagagccacctcagatttaagggaggggaactagccctgctttttgctgggaagagtgtcatgcacacactgggttgggaggacttttggaggccatctttgcacccaggctaccatggctcccttgggtctcctttgtgctgttcctatgtgcaagttctaatccgtgtaggattcatccccattacctcacttaactttccaacaaacctttaaagggaacattgtctccattgtatggatgagaaaactgaggcttagagaggtgagcttgtccactgccactcagagctgagagtcaagcccaagtgtggtgctacagctgtaaaatatcactttataccacgccctgacccaactccaccttccccataatgagcacaggggcaggatgcccaccccagcatccagtaactagcagactgtttctgagttaactcctatgaggcatgtaatatgtaaattaaagcaaaatgaacaactctgtgaattattattttgttttagtcatctaatcatctctataacaggcttttataaactcataaaaggtattaagaatgtgataatttttatttgaataattttgtctagccaaagattaagttagtgatgttatttttctgaatatagtttgataaaaatcattcacttttctatacttttactgttttcatttattttgccttgcattgaatcaaaaggttgcagcttttggagagagaaacactttttcacagagaaagctgtttggaaatataaactacttccttcctcctttttattggatgattaaagaaaaaaattaaaagttaactttacatttgttacacaatgggtaaaaatgtcacaggctgacagtggaggggtttttctccatgaaattcagtttgaatcaggagagttgtttctgcccagttccaaggaggtagatggtggcacataaccaattaggaatctctctgcccttgaggactgcctccagtgaacatctgagacttggctgccttctcatcacctcttcactagccacttacctcagtctccaaaaaagaaaattttgacatcttaattttaatgtgggcatttgatatggagcttgagataaatataactctctgtagcatggagacagtttaatgggatatggttggcattctttcttggtaaaggcatgggagacaggagaggtgggggagggagagagagggagggggtgaggaggagggagagggaaagagaaagagggaaagacacacacacacacagacacacacacacacgcacacacacacacacaaacacacgcgcacgcaaacagcagtgaggaagagaaaagcagagataagcaaggctccgcagcagcctcctttctaacttgaccctcgccagaccctggccagcatggttgtcctgaatccaatgactttgggaatttatcttcagcttttcttcctctctatcgtgtctcagccgac

SEQ ID NO: 29099 - DNA, 2300 bp, Homo sapien
tctctgtcctcaaagagaaccagtcaccccttctgtgctactacatctattgtgagagttataatagatgagtctttttctgtaagtcttaccctcaccttccaggactgatcaacgtgaagatcaagactaaacctcactccttctttacatccctctctcctacaggttatgtagcacaatccttagtatacagtacttagtcaataaatgtttgctgtatgaagaaatcagtggcagatatgtcatctctacaaaaacagttaagtataggttccattcataggtcaatagcttcattttttcacacagatgaaagaacagaatgttgttctaacaaagacaagtaaaatgtagaagcaacagaaactcaaaacctcctagttttaagattaaaaaatacaaatctcaaaccttgtagataaagaatgtcattcaataaagaatgtcattcaataaagaatgtcattcaattaataaataatgtataatattaagcatctacaccacgtgaaagcacaaaccaagccaggcactgtggtgatataacaaatgaatcacaacttctgccctccaggcactcatgtatgatggcaaaaggcaccacttagggtggccaggcagttgtttgggcaagaggaggcaagaatttaaattagaaggcaacggtgggagtgtaaagcaggaatatttagcctcagctggactgagagtatgtgatatcacagaagtggattcttgacctttcaagcccgcactactgagagaagagcaaggtggattggcagaggatgcacttaaagtggattgacaaaacgtcgtatcttccttatcctgcttccaaataagcctctaagaaaggtggcagcatgatgtggtggaaaaagcatcaggctaggatctgagccatctgagtttccatcaaggcactaccatttgtgatatcctccaccctgccccgaaccaatcatacaacaaagccttggccttcactcatttatcccacaggtaatctctgaacacctttcttatgcaggcaccacactaagcactgggggtacagatgtgtcgtgaagaaataatatccctgctctaatggagcttgtagcctaatagggaagtcagactttactcataaactgtccattccaatcatgacatacagtatagtagtaagagaatggactcagacccagaatacgtgggttcaaaccctggctctgctactaccagctgtgtcaccaaaggcaagttttacttaacctgtgtcttttctcatctgtcaacttggtgtaacaacagttaatattcaacagtgattgatatgatatatgtaaagtagcagaagagtggtaagcgctatctgggtgtttgcaatgcatacctaccgctattactgatcattcccagtaacgcattcagccacctgagtccatactcaccgcttgctcattcctcatcccgatgtacttgatgcctagctgctgggcagcaatggcgatttcggtcactgggatgcctacgatgccaaatatgtactccacatcctgaggaacgaagaacaggggagtaaactcccaaggccccaccatatcgccacatccttccctccctcccgggcgctaaaaggaaaaccccccgacccccatcgcccatttctactcgtctccaagacaacatcgcggtccccgccagcttccgtaggagcctttcattccaggaaggtccatcgtacttgcgttttcagggcctgagcgatgactttagcaccagacacctgctcctcgctgcgctctgcgaagttactgtccggcatcttccaccgaaaagctctaagcactcacgcagccggcaaacaagcggaatcatccagcaaggcaaacgcgaaatcggcagcacgccacctctggtactgcacctctgacggacaggagggcaaccaactgccttaaacaacgggaaggaagaggcggtctaaattcgtccacttcccgggagaggtgagaatgtaaacacgcgcgttctccaatcagaactgcgctctcttctcggctcctccattcgcgcgccagaatgccagagggaggcgggactagcaggagattgctgcctatgcaaagcaggtaagaagccgaactctgaggcctctcgccattgtctccgagtcggccagctggagcgttttcggggctgtaaagggagaatggcgcatgcgcatattcagggcggaaggcgcgctaagagcaggtacggagggggcgtggtgcggcgcggagggggtgtggtaagggcgtgcggtc

SEQ ID NO: 29100 - DNA, 2300 bp, Homo sapien
ttattattttttttgagacggagtctcgatctgtcccccaggctggagtgcagtggcccaatctcagctcactgcaagctctgcctcccgggttcacaccattctcctgcctcagcctcctgagtagctgggattacaggcgcctgccaccatgcccgcctaattttttgtatttttagtagagatagggtttcaccgtgttgaccaggatggtctccatctcttgacctcatgatccgcccgcctcggcctcccaaagtgctgggattacaggtgtgagccactgcgcccagccactagcttgcttttgattttacaggctcataggcggaagggacttgccttgtctcagatgaaactctggactgtggactttcgagttaatgctgaaatgagttaagactttgggggactgttgggaaggcatgattggttttgaaatgtgaggatatgatatttgggaggggccaggggcagaacagtttggctgtgtcctcatccaaatctcatcttgaattatagctcccataatccccacatgtggtgagagggacccagtgggaagtaactgaatcatggggaggggatttttcccatgctgttctaatgatagtaagtctcatgagatctgatggttttataaagggcagttcccctgcacacgctctcttgcctgccaccatgtaagacatgcctttgctcctccttcaccttctgccatgattgtgaggcctccgtagccatttggaactgtgagaccattaaacctctttttctttataaattacccagttttgggtatttctttatagcagtatgaaaatggactaacaccgtccacatatgcagggaggcaaccacttcactctcctctgcttggggtggggttgaggggttgagaaaaagaggggaagaccttttgaaaagacccaggactacagtttgaaaatgtctgggtttagaaatcgtttcacttccagtgcttctcactcatttcactacccatgacccactcccctctcatctctttactgtccacttatcactgttctttttgcttaaaatgactccaaatcctcaaaaaattaaaagttccactgtttattacaattggaaattttatgtttattgtcactgagcagagggtctaatgactccaaggcagtagtttcagatattgcacattgcaaacgattttcacacaaaaatgttttaaaaggctatcgggtgcagggctggttgtaggtagggacccaacctaagaattatgaaacgccatagttcctaattttggaaagatattagcggagagtaatatggattagtagcaagggctggagaaaacagtgctctatactaccttcaaggtgctcttttcatcgcttgtgacccaatggctgaatagtgggtaggaaacaggattcaggatctcaggcacggtctggatctactgactctgagcgtcattttatctcttgctggggtacacatctgcttctggatttaagtaacgtgcgctacaataatttaaggactataaaaccacaaggttatgagagcgtaaaccacaaagcgtgtaagtaaatgcctagaaaacgcaacgcggtagcacagcagcaacgcacaaacagccccagcaaacgacgcgcgccgggcttcccagctcccggcagcctttgcgcagccctccccaagtccaactgggcgcccggggcggggtctggaccgcacgcccttaccacaccccctccgcgccgcaccacgccccctccgtacctgctcttagcgcgccttccgccctgaatatgcgcatgcgccattctccctttacagccccgaaaacgctccagctggccgactcggagacaatggcgagaggcctcagagttcggcttcttacctgctttgcataggcagcaatctcctgctagtcccgcctccctctggcattctggcgcgcgaatggaggagccgagaagagagcgcagttctgattggagaacgcgcgtgtttacattctcacctctcccgggaagtggacgaatttagaccgcctcttccttcccgttgtttaaggcagttggttgccctcctgtccgtcagaggtgcagtaccagaggtggcgtgctgccgatttcgcgtttgccttgctggatgattccgcttgtttgccggctgcgtgagtgcttagagcttttcggtggaagatgccggacagtaacttcgcagagcgcagcgaggagcaggtgtctggtgctaaagtcatcgctcaggccctgaaaacgcaagtacgatggacc

SEQ ID NO: 29101 - DNA, 2300 bp, Homo sapien
aaatttttctttcagtgataatcctaatttttggtaaattatcggggaacctgcccccaataattcaaagtgagtccttttctattttccctaagtgtcggctggtctgagaaataaagggaaagagtacaaaagagagaaattttaaagctgggtgtctggggagacatcacatgcccaagccgcaaaaccagcaagtttttattagtgattttcaaaaggggagggagtgtacgaatagggtatgagtcacagagatcacatgcttcacaaggtaataaaatattacaaggcaaatggaggcagggcgagatcacaggaccaggtgaaattaacattgctaatgaagttttgggcacacattgtcattgataacatcttatcaggagacaggggccgggcacagtggcgcgtgcctgtagtcccagctactcgggaggctgaggtgggaggatcgcttgagcccaggagttctgggctgtagtgcgctatgccgatcgggtgtccgcactaagttcggcatcaatatggtgacctcccgggagcgggggaccaccaggttgcctaaggaggggtgaaccggcccaggtcggaaacagagcaggtcaaaactcccgtgctgatcaggagacagagtttgtgagcagacaactggtctgaccaaaatttatgaggtgggaatttcctcttcctaataggcctgggagcgctatgggagactggggcttatttcatcccttatctgcaagtgtaaaaagacagacgttcccagagcagccattttagagacctccccctaggaatgcattctctttctcagggatgttccttgctgagaaaaagaattcagcgatatttctcctatttgcttttgaaagaagataaatatggctctgttccgcccggctctcaggcagcctgacctaatggttatctcccttgttccctaaacatcgctgttatcctgttctttttttaaggtgcccggatttcatatcgttcaaacaatttgtgcagttaactcaatcatcacagggtcctgaggtgatgtacatcctcagcttacaaagatgatgggattaagagattaaagtaaagacaggcataggaaatcacaagaataatgactggggaagtgatgtgtccatgaaatcttcaccatttatgttcagagactgcagtaaagacaggcataagaaatcataaaagtattaatttggggaactaataaatgtccatgaaatcttcacagtttatgttcttctgccatggcttcagccagtccctccacttggggtccctgacttcccgcaacagtaaatgaatgccaaactacatatgaaaatgaaaacgaccaaaaccgaaagagatctgggttctcatgtcaattctattatttacaaggcatactattcaagtcctataaaactaaccctaaatgttcttatctgtaaaggagatgggggtgggggaaataacatctgcctaccactcttttcaagtatgctataaagcacaataaactaatgtacatgaaaagtgttagaaagtgaaaatagctataaatatacagagcatcaaggaagactgaacaaaatgctattagccatgaatcacccataccattttaggcctctgaaataaaaagtagtcagaacagtttgaaacatgggaaatagcaccagtacttaacagggatggcaaaagactgaagaaatgcccagtcatctatcgaattgctaaggaagtcagccagctaatcaaagatatatggaggcctatcactccacaattccacaacagtgatttatccaaaagatttaaaaaatccatccaagaatgctcatagcagttttattcctaaccaccaaaaaccagaaatgcaaatgtccatcaacagaaaaatggataaacaaacagtatatctgtactattactcagcaatgaaaatgaaccaataatgcatgaaacatggataaatctcaaaaacgttgaacaaaagaagtcgtgacacaagaatacatattgtatgattccatttttataaagttctagaatacggaaattatgctaagagaaatcagaacagtggttgcctctggggacagggaagactgaaaacggacatgagggaacttgctggggtaacagaaatcttctatatcttgactgggataaaggttacacaggtgtatacatttggcaaaacttaagggtgtacactaaaaaattcatgcattttaattgtaagttatatttcaatttaaaaaggaatatggaaagaatacatatatgaatac

SEQ ID NO: 29102 - DNA, 2300 bp, Homo sapien
gtgccgtcaggattgattcctttggaaggctgagagggaaggatctgttcagggtatctctctctggcttgcaaaatcgctgtcttctccctttattttccctctgtccatgtctttttgcaaatttcttcttgtaaggacaccagtcatactgtattagggcccaccctaatgacctcattttaattacctctgtaaagagtctatctccagttaaagtcatattctgagttgccaggggttgggagttgaacaaacccacaatagctggtatccacaacactcttaaaagatacagtgcagcagctatttttttcagcattatagttggaaaagtggaaatgtcattggtttttgctcattctactctgagcctgaaaaccgaatctgaaccttttgccactgcactgttaggtagccaaagaaaagcattatttccagtttgggaagagggataaaagtacttagcttctggcccagctcactggttatggactatctcctctgtgatttaggagcaaggaagaaaacaattctctgcaaatagaagttttggaaaatgatttgtgagactatttataattattacaaacatgtataaagttagcaataactttaatagtacctactatcaagttcttagcctagatcagaggttggctaacgttttctgtaaagggccagatactagttacaggccatacagactctggcaagatacaagttacaggccattcaactctgttgtcatagtgaaagctacatatttaatatttaaattgaatagatgtggctctgttccagtaaaactttacaaattaggtggcttgaagcctgtggatagtagtttgaagacccctaacatagatctttttaatgttagagtgaggtgtcttagtcctttcgggctgccataacagaatatcacagactgagtgacttaaaaatttttctcagttctggggcctgggaagatcgtgatgccagaagatttggtatctggtgagggcccacttcttatttatagccagcagtctttttagtataacctcatatggtggaaagggtgagggagcgctcttgggccacttttacaagggcattaatcccattcactgccttcatgacccaattacctcacaaaagacctcgcctcctaataccatgacattggggttgggattttaacataaattttgggggaacgcaaacattcagaccatttgacaaggtttaataagtatgacataatttattctgaatattccaaaataggatagaacgttataactggaaatggatcataaggatgatttagcacaatgctttattttacaggtatagttgacccttgaacaatgtggaggttaggggcactgactcccccaaccccaacacaataggaactttgaatataacctttggctccctaaaaactactaatagcctaatgttgaccaaaagccttactaataacataaacagttaacacatattttacatgttatatgtattatatactgtattcttacaataaaataagcaataaaatgaaaatactaagaaaatcataaagagaaaacactgtgtattgaatggacgcagatcatcataaacatcttcatccttgtcatcttcacattgaataaggtgaagaggaagtggagggcttgctgtctggggttgcagagatggaagaaaatctacatataagtggactcatgcagtttgaaccagtgttgtttaagggtcagctgtaattgaggttcaaaaatcaaagaattggaagaatttagtgaccaattagattaggagaaaataagtcaatcagttgtcttgcagaatgaaatctggagtcaaatgggatactcctaatagaattgctgactgtagaacttcgcagaaagagtgccctttgttgtttaaatctggggcccatcctcacccaatcctgtccatacatattcatatccacctccccctcacctcaccacacacacagcctaggagcagggattatgatttgcaaaatgaagacccaggccccaggaaacacttccaggtcacacagccaactagttatacagccattatgagatcacgtatctctcctgctccagtgttccttccactaacccatgactgtgtcttcacaacgttagacctctcttcagctgcattgctggctgcctagagccctagactaatgtaagtaagtaaatcaagtttttgtttttgaatttatgttttatttccgaatagctagacatttaattctagatttaggtaaccttttcttt

SEQ ID NO: 29103 - DNA, 2300 bp, Homo sapien
tgttcaaaagtaactattatgtttattattgtttattaataaaaatgctagttaatatgaagaacacagattgaagggggaccatggtattttctttgtaagttttctcttgagaaatatcccccatgttgggtaaacagagaaagaagaaaaaaaacgatgaaatgattggctttgacatttatttatggctttgggaaatttatagggagggagattatttgtattaccctgtgcccttttgacataggtaattcaggacgaaggacattttttttttcatgtacctctttaacagatttttaaggctttattccctatccaaatgggaaggtaggattattttatttcttcagtgaaaaatcaaatgatttatataattttagagttaggatttctacattatgaaatttttgcttttccctttaaaatatgaatcaatgattgattaaattcaccaatttagaaattgttagacaatcttaaatttcatttgtttaagctttgcattctagaaaataaaatacacctggcagattaaaactgatcttggtaaaaatatgaataaaacaatttcatggtttttataatctaataaaatatttctccatctttaaaccttttttatgagtccattgcaggcatattcttactgcaactgtcattatagggttaaacatttgctttattgtaacacacgaaagcagttaagccgtttggaattgtttacttgctaaaaccactgttagtcagcagaggcagtacaccagatttccttgtggcttttagtggaaaatgttaaaagcgcactcatttttcagttatagaattttttagtttgatttggattagtcacagaactggcatgaaccttctaattgtgaaggctgtccaaatgcactatttttttctcctgctagaggaagttacatcccgagaagtagctcagatctctggtaagtgtaacatgtgagcattactaggcatttcatcctgtgggtctgcagtctttgctcttcagactgttgctccgttggaatgcttctgtgggactgatactgaggttctatagatattttttaaggacctactcatttggggatgtcagtggtgttttgcaagatcatctgaggaacaggaaagcatttgaaatctgaaaaggataactgtggcggttttcacagtggaaggaaactatattggcaaagaggcagatgactgaataaagtagttggctcaaagaagatgcacagtctgctatttttttctctgaatgaagactgtttaatggaagctgtattcatgtggagatcaaaggaaacactggaatgatacactactatgtttttcccccccctttttttttttaaagaaaacaaaaagcctgaagcagtaatttgagctcaaatgccttctaattccttcacagcctgcttgttctactaggattctccactaacaccatttctgcctggtgcctgtgcccttttgctggagcagccacagacaactgcctgatggagaaagaatgaacgctctgccttgcttatgctatcgatgggaataaagctaactgtgtttcttctattatatgggaaacctggattaatcaagctgtattctagtaccaagagtcgtattgtctcttgtggtctgactcatcacatgtaaacgtactgcagctttgctattaatgcagagtggtttttttttttttgtttttgttttttgcccctttcccaaacactgaaagaattgttaacctctgagcttcattttcaggatttgtgctgagctctagatcttttttctgtgaatagtatctgcattaaaccagtgatgaagaaatgaagacaaattagaagtggaaacagaatagtgagattttattttttattttcaattataagcaaaacagctactggtaactatatgaccttgcaggcaagagtgggtatcgctgtgatcatctctgtcacagcagttgtttctcatttcattctatattgtgtggtgttgtgtcaccaaaaacaatgattgttttgtgcaagtaaatttcagagatagagcaataagactattttggtagaggaaaaatatttttaaatgagcttggactcagttttagttattgacatgttggtgtgaaatttcttcttaagtattgcagtaatccaacagaaataatagaatttcgttatatttaggaagttacaaattatgtagtcataattttaaacttgtttttccagtagtacttattaactttaaaaaaaaaaaaaacccagctgtgctgttca

SEQ ID NO: 29104 - DNA, 2300 bp, Homo sapien
ttttaaattctagaaatttaacctagaggagagattatttggtgggaagaggagggctatattaattcctggctcaacatccatagtgcttaacaggcttacttataaatgagggtaaatcctaacactcctaggccaagatagaacacgactggatatggcacattggtaattatttacaaagctaacttgtaatcacaaagtactgtagtaatattatcacaacatctttgttttggagaactcaagtgctttcacgacattaactcattcaccctcactgaactgataaggaggggttgggtgacaaatagtatctctattttatctgctggagttgaaataaagggtaaaggagctactgaagagaatgcaaagcaagagcagtttgatttcctttttagcctcattatgacggttagatcacagttatgagaattcctccattttaagtagaaaatatcatgacgagggacataattttaggtaagaaattgtttcaatggaaccatagcatggatatctcaaagaatattggaagggtcgtactatcagttaatcaggtgtgtttttttatcttgcactctattttcttttttttttttttttttgcgtggctaaatctaagttttttgttataagtgcagcattacaataatctgatagtcctgacgaagatctccatttctctagactgccattaggctcgaatcgattctctaaagtccatcccaagagacacaactgatgtagtgggtagaagagacttttaaaaaccgaccctgacgtcacacgtttgtgttttaaccatctgcaccttttataaaccagaggctggagccgcccgggcggacagacccaggcgcacaacaatcttctcccacacgagcctggaatggcaacagcgtgcggctggctaagaaagaaaagccgtttcagagctgcggggtggcgtgggggtgtgtgtggcaggatgagggagtcattcctcttctcctccatccaaggatgctatttattagaaatcctgcacatctttttttttgtttgtttaagaaaattgatttctctcgagtgggaggcaaaatgcttcagatgcgaaaggggtggaggcagcaagcctggctggggagctttcaagggaaaaccacacagcttagcttcggattgggactacgggcagaaaaacgattgggcgtccacaacctgttcggctgcgaagacgacgcccttccgtccagagtgccagcatcacccccgcccctcacccggtctcggcctgcagcccccggggaggacagcagcgccccccattccgtgaccacctctcatcccactccttggctccccaccctccccaaacccaggggcacattctcacgctttctccacgtgcaagtccggctcgcccatcgccactcgccgcagcccccaggtgcccaccccttccagcccttccggtccctcacccagctccttagtcttgccctggctgagggaggcgtccgcgctccacctccacgtgcgagtcccgggccgttccccacctccccacgccacctccgccccggactccgcctaccacgcctgaggcggcagcgcctgggagccgggacacctggccgccctcccccggcccgcacccctgccgactcccccgccccgcccgagccgcggccccgcgcccacccttgcggcttcctccgcatgcccctcccgtcgcggtaggcgggggggtcaccagcgagcgcggcggcgtggccaatgggcgctcggcttactctggcctctcccccgcgcggccgccaatcgcggcgggcggtggtggtaatattgtggagtttggatgccgccgctgccgcgggctggaacggcgcggccgcgggggctgccagggtatttcgggaagggggcgtgaggaggcggcggcggcagcggcgggtagggcaggcagcagagggaaggagaaagaaaggaaggaagagggcggggagtcctcagaggaggaggcgggaccggccgggcacctcacctctcggcggcggcggcggcggcggcggcggcgggcggccggggaggcggcgccgccccctgcccgcaggtcttctcagcgcagtcggccgcggacccgctggtcccgggcagcggccaaggctactggggcgggagcagtgggccggtcggcggcggcagcggcagcggcggaggaggaggaggctggagtgggcgcggaggcgaccgccatggcgttcctcaaactccgtgaccaggtaggtgaggggctgcagggcgggatcgcg

SEQ ID NO: 29105 - DNA, 2300 bp, Homo sapien
gttgttcaggtttcaggctaaactgtaaaactaaagtcagctgattgataatttatggtattattgtattctgtaaaaaggcttcttttagaaaattcctctattagctcttcttcagataacagaacagatttattggtctgctgcttttatatatgccttgccagcaccccagcagatcctagatttaatgaatttatttgcgtgactcaagtttacaagatcagccatcccttctctctgctgctgatcttcctgatctcatttggctgccactttacatcccagttaattccatttcagtttcctcagagactgcaggaccagtttttccctgggaaaaggaaagctgatgactgtgagtccatttgggggcccaaaaaacagaatgcagatgtcaaaggtgctaatatctgattttctcaccaggactgcttagactaaatcctttgtataagaaagccacaaggacaagcctttttggagggtatcaggatagttatgtatgtgcaggtgccagggagtggcttctgttctagaagggccccacagctcagcatttcctcccacgtgctttcttgaatatgcaagctgcatatatatttataactctgcaggaaaaatgtgaactttattaacagagataactgtcataattcaagcagttgcactctatagagcaaccagagactacaggcatcaggattatgcatgttcagtaaaattatatgcaaatgttggggaattatgagatactaactagggatgaatgaggaagaaggaagggctagagttgaccgtgcctgtgggggactgtaggagtctagagaacatgtctgagtgctcttccagggaatgtatatccttgagggcagtaaattcattatgcatttttgcattctcccatcctagtagcaaccctcaataaatatttgttaagtgaaggagtgaatgaaatgttgaccttggcaatgcacaataacttctgaattggtctatgtgtatgcacatttcctccctttcctatttaaacatttattctaaatcagtggagccacagctgtccaagttaagagtcatacttacagtcattattaaccaagtgaggttccaagccagtggttctcaacattggctacatgttacaatgacttagggagcatttcaaaattccagtgctcaggcttcatctcagactagaaaaacaatctctgagctgaggcgcaggcatcagaattccaaggctgagtaccactataagctagcatagaaactgccatatctgtggaattaggagacctagaagaaatcccacagcacaaaaaagtgctagtgccactttcactgatgttcaaagtgcagaaaagttggggaaaaaattctgatgggagttagaaatgtgtttcatttatttattgtattgtatttttttttgagatggaatcttgctctgtcacccaggctggagtgcagtggcatgatcttggctcactgcagcctccgcttcctaggttcaagccattctcctgactcagcctcctgagtagctgggattacaggcgtgggccaccatgcctggctaatttttgaatttttagtagagttggggtttcaccatgttagtcaggctggtctcgaactcctgacctcgggaaatctgccagcctcggcctcccaaagtgctgggattacaggcatgagccactgtgcttggccaggaatgtgtttttgtgctcatctggaacttgaggactggaaggtgagtcacatgtctaggaatacataacacttcaaacaacaaaatgatgccacactgtgaaaagagatgggaagctattgaatatccctgtcctgccctggctggtgacccctccccaacattcaggctgcaggaacacctgagctctggggctctctgcctgatacccagtggtggccttatttattccactgccgagttctttctggcaaccttgtaccattcttgggaaaggttggggaagcaataggtaaatgttgttttggtttgtagacatcttttggtggggatgggggagcagctgtgctggaactgggggaaggggagctgtgactcaggggaaattctaagttgctacaagctgcagcaagtgtgtgtcagtgggaggtgagaaaggcaaacagagggctgaaaactgagccaggaacctgcctagtggataatcaaaactcgactataaataactaatggaacgacgaacgtgtttagtgaagttattttctaaagcagcgtacaggcaaaatgagtgctttcctggagc

SEQ ID NO: 29106 - DNA, 2300 bp, Homo sapien
cctggatttggaaccttctaatccttcatcctcattaacctcaaaatgtccccagatattctgaactacatctcccagggtgtctgcctcttgaatttggaaatgacacagtattcccacctggcaatacaccgtgatttgagatttggaagacacaattcaatccagaaattgctaagcactgtccactggggcattacaatgggattccaggagaacaaccacacataacccactatttcacctctgacttcatgaaaacacacgtgtatacatgcttgtgcacgtgagtgtgcacagacacaccacacacactggaagaaacaactgagtcaaaaggtaaaacatttttttccacaaacattttagctgacattctaagatcaaaataaagacaaaaacaatgagcaagttcattgcaggacttccccaatggcagttttcccccctccactcttggttgcagacagcatggctgctttacagccatcagaagaaacactgctcatggtgatggtcagctatccttcaacctgttcaagccagaagcctgaaaactgagcatgctggattctcttctcccttctacctacctcactccctcagtgatctcaggtctcacggcttcaaacactatctgagtgctgctggagtccagctttgtatatgcaggccagacctccccctgaccttcagctatcctacaactgctgccttcacttcatctcctcttagctgtctagaggacatctcgaatgtcacatgttccaaatcaagccactggcatgcattcatctccttccaccttctctccttccccatcttggttaatggcaagtctattcttccaactactcagaacaaaaatttgaactcatcttgactcttctcttcctctcacattagtcattaattcatcagcaaatcctataggttcttccttaaagtatatccacaagctgacccctgtcaccaccgatgccacttagtgcaagccaagaacctcttggttggtctccctgctcctgctttttgccccccactgattagtctcaacccagcagccagaatgatccagttaaaacccaagtcagattgtgtctctcctctaagggctcccctctcactcagaggaaaagccaaagttccttcaatgcaaccagggggtgtcctgcatggtcctcctgccccccgcccccttgcctctcttattccacttcccatcaggctccaccctgctctctttgcttcagccatgccggctgttcctcagacatgccagcatactcttgccttggaaccttcacatttatcattctgtctgccccgaacactcaacctcaaatagctgtgcagccctctcctttacacaaatggtaactcttccatgaaacctttctccaccactcaatgtccatttccaagcccagcccatgctccccagccccatccctgctctgcttttttgccttcatcctcatcactatctgacccagtggatagttttaattgtatctgtcactagaatgcaagctccatgagacacacatttttgtctgtgttattcattgctctacttccagttcccagaacaattttggcacatagcatgtgttcattaattatgtgttggttaaatgaaggaagctttatgagggaaagagcatgccactcctcttccagcgtcccccttggtggccagggcagagcaggcattcagctgctcttgtgggagaagaagggacttgcaagatcatctcccttagctccctcattttcaggaggccagggacagtggtccccaggaagggaaggagagtccaacctagtttgcctgatcccccatgggaggctgaggttgcaaacagacagctgcagctccttgcagctatgccacacacacagcctttctgaatcagagggtattagtctttccttctgaactcttgggatattcctgttttgatttggctctagcagtgaccacaccgagttgtgcaaagcctgggaacagtgagggcattaggaccaggagtgacgcgcacgcttggctctgggttgtgtctggcagagggctctcggctgagtggagctatgtgtgaaaggaaaccaggcactgcctgccggctttacatctgttgatctgacctgactggaagcgtccaaagagggacggctgtcagccctgcttgactgagaacccaccagctcatcccagacacctcatagcaacctatttatacaaagggggaaagaaacacctgagcagaatggaatcattatttttttcccaaggagaa

SEQ ID NO: 29107 - DNA, 2300 bp, Homo sapien
taatgttcacagaggtgagagtgattcatcctagacagggtcatgacagacatcttttcaggggaggtcacatctgaagaatggctgaatgggttcaactcagacatccagaggaggagttgggggaagactctggagcccctgagggtcaggctaaacagtttagactttattcaattagcaacagggagcaactggccttctacagagttctgtagaggtccacagagcttctctggtttttactctcttgggtttcttttggccaaaccatctatttttctctcttgggatttagtattagctctttgctttcagaggacattttcttaacattggcacagactgcatttgtaaagaactcttaaagaagtgttaaatgttgcatagtttttgatgcgccagactaactttccaccagacagggtcattaggacatggcatgttggctgtggccagcctaatgcaacagcatgcaaattatttacagaacttcaaccttcttcccacattggttggtgcaattagaagtgcctgtgaatatatactttgttctagacaattacagaaattggggactggcatgattttttagagcatgactggtctgcttttgggaaaatccagtttgcttgtccagatggtgattgcaggattttttaagtgcttgtttgtattcacccaagtccttcattctataaaacagaaaactgaggtcccatgagagggtgagttgctaaagagaagtggggaaagaaccagaagtagaactagaactagtccaaccttttagtattttttctctcttagctctctaacatcgaaacagtaatcctcaaatgtagacaccatacttttccagaaatagttggacgtccataaataagctatcctctacagttctgtctgaatttgggggaaggcaaggatgtatttggtatatcgaaggtgctcggctgggcacagtggctcatgcctgtaatcccagcactttgggaggccgaggtgggtggatcatgaggtcaagaaatcgagaccatcctggctaacatggtgaaaccccgtctccactaaaaatacagaaattagttgggcatggtgacacgtgcctatagtcacaggtgctcaggaggctgaggcaggagaattgcttgaacccagaaggcggaggttgtagtgagctgagatcatgccactgcactccagcctggcaacagagggagactccgccaaaaaaaaaaaaaaaaaaagaagaggaagaagaagaagaagaaggcgctcaataaatgttccacagacttacaagctcaaaaagggcaggaagagtatttattctgctgacctttaaatctccaatgcctggttgaatcccatgcacatagtacgtgttccataaacatttattggtggaatggaatggatggatggcaaaaaaatttttaaacctgagatcaacctttggctcttgttatcagtggtgaatctatatggttctgcagcaacctcaattattgccttctcagaagaaagaattcaactgaggggcataaggcagagtgagggaccaaagcaagttttaaagcaggagtgaaagtttattaaaaagtctaccaggagctcaagaccagcctgggcaacatggtgaaaccttgtgtctacaaaaaactacaaaaattagctgggcgtggtggtgtgcacctgtagtgccagctactcgggaggctgaggtggaaggatggcttgagctagggaggtggagtttgtagtgagctgatatcgccccactgcactttagcctgcgagccagagcaagactctgtctcgggaaaaaaaaaaaaagtttagggcagaaatgaaagtaagtaaagtacatttggaacagggccaagtgggggacttgagcgatcaattaagtgcgcagtttgatttttcacttggggtcttatacattggcatgcttctgggggcttgtgtccctttttccctgattcttcccctggcgggggctgttcacacgtgcagtggcctgttagcccttgggaggggagcatgcgcagtgtgtttactgaaatttttcgcatgctcacgtgaggcgttaccagttgcgcattcccggaggaaggtcatgtaccagttaaacgccaccattttgcctcttagtgcacatgcttgagcccacttgcccaactcctgagatcatatcgggaagctgatcaccaatttcaggtttttctatctgttgggagactgccgttccctggtgccagctgcaactaattattattttagagagacagtta

SEQ ID NO: 29108 - DNA, 2300 bp, Homo sapien
cccaatggttccctatatcactcacaacaagagcctaagtccttaaagtgatccacaacttcttacgctactctcatcctgctctgctctggtcacactggcctcctttttgttccttgataaaatcaggcatgttcctgtcttaggtccccttcactgaacgatcctttgctcgactctcttacctcataccctcatatgtacatggctcactccctcacctccttcaaatctttacctattaaggcctttctcagtaaggcctgccatgatcaccctatggaaaactgcaacttcctcccagaccagcactcctgatcttccttaccgtttgctttctgttgcagagcacattttaatacaagaatgaatcattatatttctaaattatagtctaaattatagcccgcttctctcatgaggctctgtgcctcatccccactttccctatattcattttggacttcatccttgagagtgttaaggtccttacctaagattccattccaagtactgaacaaaactttgggtaggagtgggcagtaataacattttttttttctattgtcaacatccttgggtgaaagataatagggcaactaaagactaaaatgaaattgtaaagctgcacctaggaattatatctcaaacaagataatgcagaattctgtgtataagccagcacgaaataccatacaattgttcccttcaaagtaagtctagcagctctaaacaattttaattacatattaaatagaagagaaatataaaaaattgtccactaaaataatctatatactttctatttaataaataataattttcactaaagctagatttatctctaaagctaaaataaattacgtaatctgaactttaaacgttttaatttactattcggctgtttatcaatggtgtttaaaacctgcctaaaaaaataccgcactttacctagcacaatgaaacattctcctgcactcatcactgacaagctgatctaagtccttgccactgacttacaatacccttcccccgttttaaaattatatcccttactttgtcataaatcacttttataatgagagagcagctaggacacgttgccacgtcttccccattctccaaatcttcctacaacgaaatcaaataccatgtggtcaggatagcttctcttcgccatctcctcccccaaacctatcccacccctagatgcaagtctcttggtggcttgccttccccccaaggtgggtgagaaccccagggccttcagcgagaaatgccgacatcattttcccctagaagcgtcacttaggggaaacacctaggaaggtcaggcgagcttcggtcgccccaaaagccctgggaaacaaaaaacgagtcccctcctcgacagaaatatcccaggttgggaccctaaggcagggatcgggcagagagacagaggctctccgccaccctctccctgacctaatctaaggccagaactgcgtgcctaccgagagagctcagggcattagttggggtggggggacgcgggaggaggaagattcagcaacgggaaagagggcgtgggtgacacagcgcagcaaaggctacccaatgatggaaggaacgggcggaaccaaactgcgcttgcttgggtgaaccgccgggcgggaccctgaagttaccttggtgatggagaagttatctccacatgggcagggatagaaatacgtctccgagtcctcgtcatattggaagtcctcgatttccacctcgtcatgaaacactgccatggtcagcgggggtggccgaaggggtaacgccccagcagtccgaggccagctccgagggtttaacttcgccggaaccggcctgggctcggcatcatcaggtcgcgccgggcaaggactagcccttccggcgcataggcaatgacgcaactccgccctgcgcggccaaatggataaccggtagcggtcaccatggagatggctgaactaggggcggagacactgggaagactgaaagcttgctcagcggggtcgcgcaccgctcctcctattgggcggcagcgaccaatagaatgtggggctcgcccgcgctgctacgtcacgtctgggaccgcggagtattccaggcgcctgcaactaaacgtggccgggtctgcaagctaggtgccagcggggaaagtttccctgcttcttatcgtctgctttaacgccttaaatagcccgctgaaggctgcagcaggtgctaggtagcagcctcccggccctcgggaaaggcggggtggggaggcgagagcagcttagcct

SEQ ID NO: 29109 - DNA, 2300 bp, Homo sapien
ttcaaagaacaatcatgacatctgtcaatttagaatcttaggtgtcactgaggaagaaaaagggctcctcttgctccaacaggcaaagacaccttagtggtaaacaagtagtatacacagagtatttgaccggaaatcagcggaactgggctcaggtgtgactccttcctgctttctaatcttcagcaagtctcctcttgccattttaacattacccacgccacctcactggattactgagaggaataaataaaatgtctaccaaagtacctggcaagcaacagtgttactaaaatcaatcctaatacattgaccccttctcttccttgtcaaacaacctagagaggtggaggtttggtattgccaataaacaactccttctggcctgatatacaacagcactcatcaaatatagtttgcattatacaattatgacctacttcttttttttttttttttttttttttgagacagcgtctagctctgtcgcccaggctggagtgcagtggcgtgatctcagctcactgcaatctctgccttccaggttcaagagattctcctgcctcagcctcctgagtggctgggattacaggcacaccaccacacctggctaatttgtgtattttttagtaaagacggggcttcatcatgttggtcaggctggtctcgtattcctgacctcgtgatccgcccttttaggaataaatgtaaagtttagtagtcattgtaatgttttcttcaaaagtgcacagggatatattatgtatatgtgttacgtaaatgtaaactaaatgttatatatcattgctgaaccaagtaaagctcataatttccgtgcaaaagtggaacattacatctaaaaaggatcttatatcatctctactccaatcctttcttagaagaggaaataaggcccaaagaatgtaaatatccagttgccagaggtaatcaacaactcaagattccgatcccagatcttctctcgaaagtgctttttcactacaatgcatttcttctctactaagatattaaaatgcctagtaattaagtaagacccaatgtaatcggttttaccaaaacaggcactagcactgctttcaagacaaaaatgccttttatctgcatttcgcttcaaggcatacataggcctcacactgataaacctgcctactgacaccatttctttcacaacgaaaaaactggtactcacataagtaatttgttcctgggctttggagacagacaagctcttcattatttcccaggtgtatgattttagtcaagatgcccaactctctgtacctcagtttaaagattaataaaatggaataacatgtaaactcctagagttgacaattccacttagtgcaatagctggcacataacttcccaataataaaaggtgatgttattactattactaaaaatcatcgtcgttaataatgttataagcctggcaaacagaagactagaactcaatccctgccttccagggcttggtcctttcagcaacacaatttagggtattttaaggcgtctggggtgaggaagaagcggaatgtacctgcagccaggaattaacaagctgaccgtcgccctgggctcaaggtcactcggtgaagcgaaattctacgggaactgttcgtccgtcaccaggaagggaggtcgaggaggctaagctgctctcgcctccccaccccgcctttcccgagggccgggaggctgctacctagcacctgctgcagccttcagcgggctatttaaggcgttaaagcagacgataagaagcagggaaactttccccgctggcacctagcttgcagacccggccacgtttagttgcaggcgcctggaatactccgcggtcccagacgtgacgtagcagcgcgggcgagccccacattctattggtcgctgccgcccaataggaggagcggtgcgcgaccccgctgagcaagctttcagtcttcccagtgtctccgcccctagttcagccatctccatggtgaccgctaccggttatccatttggccgcgcagggcggagttgcgtcattgcctatgcgccggaagggctagtccttgcccggcgcgacctgatgatgccgagcccaggccggttccggcgaagttaaaccctcggagctggcctcggactgctggggcgttaccccttcggccacccccgctgaccatggcagtgtttcatgacgaggtggaaatcgaggacttccaatatgacgaggactcggagacgtatttctatccctgcccatgtggagataacttctccatcaccaa

SEQ ID NO: 29110 - DNA, 2300 bp, Homo sapien
tgctattttcttttaaaatttgtgttgctgtgccttcttttaggagctttatagaataatttttaacataggtggatatcatagattaatgagggaaaaaattttcagaatggaatagatggctttaagatttttttgtcttttgttttttttaacttttgaagagtgaattgagccaactcggggcgtatgagtggacacatacatgcccatagacatgtatgtagttgatgctttgacatgtgtccactgagtcttgtgattaaaagaatgaactttggcccaggccagacctggttttgcactctggctactcactgcttgttttatgactttaatgtctctgggctccagtgtcctcatctgaaatggagacaatgataccatgcagcatcattgaaggatgaaacgttttgttgttttaatttatgtaaaatgcctagctcaatgcctagacatagtaggtctacagtagacagtaattactactattcttattttatgtctagcacaggctaggatttaaagactggactgcatgtttgcaactgcagttttccaggttgcgcagtgtggaacaaaaatgactttccatttaatgtcagggtggttcttccgaggagagctgtcagggcagcttctcctttagagagaatacctctgtgctggcaaaactgactctcaaatgagggtagattatcattgcagaggcctcaagattttctgaggtcatctgcttagagcttggtgactaagacttagacagctctgaggtctgcaccgccttatttatttgtaaaatgacttaagcatccttgcctggaaagtcccctaaaggctaccttctggctttggctggctcttgctttattttattaggttatttattttcaatttttctttcaaacttatgacttacattcaacccaattgccttgggctattttttagggagagggaaagttcaagtacctcggtactgcaggtgggtgttcatcccccatcccgttggtacagggagtgagaaggaaccatcacctcgctgctgatggtgtggaccaggacttggagagccaagagtcagtctgtggctgtgggctgggcatgatctgtgggctcctttgaccttccctaagcctgagagcaccagggagcaaggtgtccatcagatgatacctctcagggaggatttgcccacagccttggcacaggggtgattttcccacctctgcccttctctgccaaaactattgtccaaaaaggaagctctttgggccataaaatgccatctgttgtttgtatatggttatatagacaagctgtagttatacagtagcctgatgggcaggaagtcagtgattcgtccgaaaaaaagtgacaaaaaaaactaaactcttaataaaacaaacttcctccttcaaactctttgtttagaactttttccagcctctttaaaaaatgttaataaggactagtgtagtgtttcaaagtagtgatttcaactcttcaaagccaaatgctttatctttccatcagacaatatagttaaaacaaattaaaaaaactgtcttcttcagactagggtgtgggggcaggtgcccctgaggacatggagttcctgtcagcttggaattcttctcctgcacctgaaacagcctcgcaggcctcggggaggcgctttgcacgctgcacgtgtccctttgatagaccatttcattcacttgtttcccttccttttgtttgcctcacagatccaggaggctgcaagccagggcctgaaattcgttggtgttatacctcagtaccattcctctgtgaactcggcaggcagcagtgctccggtgtctactgccaacagcaccgaggatgccagagatgcaaaaaacgcacgtggggatcacgcgtcactggagaatgagaaaccggggactggggatgtgtgcagtgctccggctgggagaaaccaaagcccagagcccagctcaggccccagaggggaggtgcccctcgccaagcagcccagctcaccctccggagagggagatggtggagaactttcaccacagggggtgagcaagacactggatggaccggagagcaaccccttggaggtgcatgaagagccactctcagggagtaagtatgtcagcaatgggagttttgacccacttaaagagcagctaacagcttttcattaatccccatggtatctcagagaaaaaggaatggaatttagagtgtagagacagcagtccatcaaacaggagaaactttatcaagcagttatctgtgccacctga

SEQ ID NO: 29111 - DNA, 2300 bp, Homo sapien
cctactgttgtattaatctcttctaaacaaactaacaacaatcttatgaggtaggtggagtcacccccacggtatagaagaataaattgagatattgagtttggagcagttataaaagaaacttgctaggccaccaagcacttggagctttgcaggatatcttgtagttttactgaacagcaaagccttcactttggctttcttggttcctgaatcttctgtgtgctgtggtgggtttaaactaaattgaagggcttcaacatgaaaaagttcaaaggtaatttattcacctttgcccctttctcaagcttgtcttcttctatttctattcttaagttcctccttataagacattcccatgacacgcattacaatttcgaggatcattccacactgctgcattttacaaattcccatctttgtggttttcctgtctaagaggactttaagaactgattttcgggatgttttcttcgacattgtgctgaccaggctcatacttggctttcggccaccagcattctagccttaaactctgtatataaattttgggtggtcatgataataacaggatgacattccttattcaagacatgcacattgcgcaataagttttctacaggtccagtttttctttgacctccagtctggggggtgttagtctgacacacaactacagaagcagctgataatcattgtttataagagttgtcctttcagtctcccttcacggctgggaaaaagactaatctaaaaaaatggatcatgatttacattatattctgaaaattaagaaatgaaagttgtggggagctaagtgtttgggtgcctaatggctagttataaatcctggcactattagcctttctgatttcgtgaagggagatgataggccagttccatggcctcatctaaaataatgtcaatctccagaaaagcctttaaaactaatcattagcttaaaggagtggttcccaaccttgagagtgaatcagaatagcctggagggcttgtcaaaatgcagagtcctgggccccatcctcaaagtttctgatttagtaagtctagggcaaggcctgagaatctgcttttgtaataagttcccaggcaatgctgatgctgctggtctggggaccacacttggagaaccttaaaagatcatgtggagtacaatttttttttttttaatttgagtggagatggcagaaaaaaattatactagtgtgatcttttgagtataaaataaattcaacaaatgtttacttacctacctatgtattatgaccaaatcataacttactttctttaggtgacttggaatatatttgggaggacaggccagaggaataaaaataaggatacaaggtgacacaatgattctcaaagtttgtttaaaaagttcccatgcccagctgcacaccagacccattaagtcagtcttggtgttgtggtttggttctgtgtccccaccccacctacagttgacactacagaacaggtgtcaacagactcagcttaagtctgtgatgtctcagggagctggctaagatggatacctggctgctggtgcctgcaggttctgggagggaggggggtgctttacaggggagcccaacatcgtaaactagggaaaggaaggaagagaattggaggggatgagtacttatttgcattacaggaggattcttggtttaaagtgggtttcaccatggggttcctttagatagagcctcaagtactctgaagtgtttgttttgcctttccttaatgaggtatttattacctctctgtaaatatgatacctgcagttttagaacataacaaatccatctataacatttgcagctcttcagcagaactgagcatacagtcactgacgttgatggcattttttctaagtaaaaacaaacaaaccttggagcaaaatgtcagaagccctggaggagggaaggtggatggctagaagggaggctctaagcagcccttgatactgctgcaagaggccccagggtcagagttgggtggggcgggactttctatatttccgcaaatttaagctcaccccggtgggaggctcctcctcgtacagtccttcatcttcatggcagaaaggctgttctgcccctgcgccctccctggcctctctggggatccctgcagctgatgtattgtgatggagcagtggacttggatgctgctggtattgatataatcattgttaacagtagcaacagtaataacagctaatgtggcatgcatggtgctcagtgtcaattaatccttatagagatcttgatttt

SEQ ID NO: 29112 - DNA, 2300 bp, Homo sapien
gaaaatccaggcagctctctacagaacacaagtgaatccaacatttggctcctcattaaatattccaggtgaaagagaattggaacaccctggataattgctgaatgcaggttaagaagagccttgaaagatctgcatgctattggctcatccactcattccacacatatttactgaacacctactatgtgccagtaggaagcatcagaatatcaagaagatcaggagttctagaaaaccctcaaaaatgcagatccaagcagggaaaaaagtcatttaagacatttgcccatgattattagcactcgggaaaatattgagtggaagaaaatggaagcaatcagaatagcatattaacctcaagcactggtgtcttaaaaaaaaaaagcacaaaaaacacaacggtgtgcaaaagttttatagagtgaaaatgatttgcttaaaagaaatcaagcacactgcaactaggttatgctgcattcccccacccccaccctcctttttcctttatcttcttttaaatgcctaccggttaacacctatcaattttattttctttctgtggcctagtgaccagcaaaggatcagaaagattttggatggaccctgacttgcagcaattcaaggcctcgggcagatagatagcatgaagacccctccctttggcttcataaatgggtgttcacaacctctggtgatgcccctgagcaaatgtccctgcgcactactgtctgaacctggacttacgtggtcacctggtcttattttctttcatgtggcaagctcaagtgtaggggggaaatgggggacactggggatagtggtggtgagtgtgacaccaggaaaaggtggggtggaaagggaaaggagaaaaacaaataaaaacaaaacagtggtgagggagggggagcaaaacagaactagaaaggctatggaaagagaaaataaggaagaaaatctctgagaagctgtggtaacaggaagagtccctgaaaacaaaatagtgcttccttacttgctggaggagtgttattagtgccagaaggacctcatcgaaacactgctgggcccctaaaccagccctccaccctgtgtgctccagtgcttaactttgcccacacagggtcttctttgcccaattagaaaatggagataattaattaaattatctcacccttcttgttctagcccccttaaaataatgataatagctaagttatagagtggttgctaaacactttacatataataacccacgaagaagtgccatgtgacaaataggcgcagagcagttaagtcacttacccaaagtcacacagccagtaagtactaaagccaggaatccaaccctgattatttgactttaaagttccccctcttaacccctacactgtaattctgcttggtttagttttacgaagaaaatattttctaatggctccttgcctcacatcttcactttactaatgcagcctggtttactagtgcttcactctttatataattttctccctgggtgcctcaagttgccacgcaaggtgattctccagatcttctcaaacctctggacatcttaagtaggtagaccaagggatggcaacggagacagtggcattacccttccctgaagcactaactcgcaagagagaatttcagcagcacctgagatgtttagggatgctcccacctgtggaatggggtcgagaaatggtcctctctcaagtcggccccaaccccacccccagccatcagcaccttgatggcagtcgccctttcagcatcctggctcaaatcttgaaggatccttgtctcccaggcgctcttcctgacagcacacaaccttgattaggaggggctgggagggaggatcgatgagcccctgacccctgggttctgaggctgccagggtcgcttgcagctcggccgcgtggaggtgaccgggcggaactccgagggggcgcggggagagctgggcgggcccaccgctccagcggctgctgtcaggggccgcgaggctttccctgaagatgcagcgtagcatattttgcacatgagttcagaggaagaggaagtgtagccggcggacgcgcggcggcggcggcgggggcgcgtcggggctggagccggagcgcgccgggcgctgggcgcagcgagcgagagcgcggcggccgcgggctccggcgagggacagacgcaccgatcgccggagggacagacacacgaccacgcggcgccaccgcccacgcctccacccaccggcgcccaagtcctccccgcgccgcctcctctgtatggcacaa

SEQ ID NO: 29113 - DNA, 2300 bp, Homo sapien
agatttggaggggtcaaatttcaacatgagatttggaggggtcacatttcaacatgagatttggaggggtcacatttcaacatgagatttggaggggtcaaatttcaacatgagatttggaggggtcacatttcaacatgagatttggaggagtgaaatttcaacatgagatttggaggagtgaaatttcagcatgagatttggaagggtcaaacaagcccaactatagcaggtggtatctcattgtggtgttgatgtgcatttccctaatgattactgatgttgagcaccttcttatgtgccttttggccacttgtgtgtcttctttggagaaatgtctactcaaagtcctctgcctctttttgccttttgaggtaaaatttacatatgataaagtgcacaaatcttaagtgtgccataagatgagttctgacaaatgcatctcaaactctgtcgaggtacagaacattatcatcaccccagacagttccttcagattccttctcagtaatccactccctccaccctccagacacaaccactatcctggttcttaaaagtctgtcatagattcgttttgcctgttatagaactttatgtggatttatacagtatgtgctctttcgcgtctggcttctttcactcggcataatggttttgagattcacccatgttcattccttttgatcgctgagcagtattcttttccatgaataggccagagtttctttattcttttgttgatggactggactgtttccagtttggggatataatgaataaagctttttaagagcttatgttttattataacaaaagcaaaatgtcatgagcttgaagccttgataaaaatctcccaccaagcctaatatccttttggatagaaaaataaacaaatcaataagttctgccctttgtagagggcttataatgtgccaggccgtctgctgagcgttttccttccatcaatcattccatttaatcctcacagccccatctgctagatgagtaaataaaggtttacagcaggaaactgacttgcccaaactctaatagcctgtgtgtggcagaccctattttgccttttgggaagtgctgtgagcatcagtagttatcccaaggccaagaaaagatgagtatggtgttttgctttctcagttatcacactttattacaatactgatgtcatttttatttgccctctgtgatgagcattaattatattacgggaaaggggagaaagccaagtattgcaactttagaagtaaagaccactcccttactaagaaatctttggagacagcaaggaattttaaaaaagtaatggtacatgggcccggtgcggtggctcacgcctgtaatcccagcactttgggaggctgaggtgggcggatcactagtccaggagttcgagaccagcctggccaatatggtgaaaccccgtctctacaaaaaacacacaaaaaattagccgggcgtggtggcgtgtgcctgtagtcccagctactcgggaggctgaggcaggagaattgctcgaacccaggagacagaagttgcagtgagctgagatcgttccactgactccagctggggcaagagagcaagactccgtctcaaaaaaaaaaaaaaaaaattaatgctacatgaaaaaatttctattacaaaatattagaaaataataagagcaccaaaagataagtgcctgatcagcttgctatccatatgtaaatgtagatatgaccaaattggaaagttttggcagaaaacttgcagaggaaggaaagaaagatttatgactagtgtttatctactgtccgcgaagtgccaggaaagccccctgctgggtaacttacatatgtttaactcattccagcttccctgcagcctcagcagcccttctccccttgttttttaggaatggaactcctggcttttagctaaacttgtggtctcccagaaaaaacatttctcgcagcttccctgatggctagatttggcacgtgactgaatttgaccaatgggatgtcaactgaagggtcgcgtacaacttccaggaagggcgtgaccttaaaggggcttgtgcctttctttgccccttccgccttccggatggatgaaagcagaagcagtggctggagctagagcagctatttaggactatgagatggaagaaatgtggtgacaatagcagaacaaaaatatagaaatcttgggtacttgatgaccacggagccgccatacaaactctggactataatttccagagactgtttatgtgagagagaaatatacttctcctg

SEQ ID NO: 29114 - DNA, 2300 bp, Homo sapien
taaatacatattttcttcatccagagatgggacaagcctcctcatctgctcgccatgggtgtttcacattttccctactccatccttttcctaaggattttagggacaatggcgttttgcagagtactcagttccagctcccaccctgagcccttacctcctaccactaaacatccagatctcaagttacagagagtaacaacactttgcccacacctaggatgaccaatccttctggtttccttagggacgtaggaatttctcagtgctaaaatcatgtaagtcctgggcaaactagtatgactggctgccctacagcccagcccccatatcccgggcaggagaagaatcagttgaataagtcattgctctggttttcagtttatttttggtacttggaatttcccttcttttcttatgggtttagctgcatattgaaaataaaacgttttattttaatcccgcattactaggtgttagtaatgagatactgctcacgttatagaagtccaccgttttgccagctcaaaaagtaacattttaatgctttccgtcagtacagaagtgaagtttgtggataaaggtcatagctacttagccctgtgtgtatagctaaggtgctgcagtggttcccgaagttacgtgatgggctccaccaactggcccacagcttgctcctgctctacgcccgtattctgaccttaagaatgttctagaattctctaggcaggcctagcgccttcctgtaaggcctggaaggtgaattctcccattaaaatgtaagatccctgagcaaacacatgttctgttattctgttcactcctgcatctgctgtacctggtaatcacaggcactcagtaactatttcttgaaagaacaaacatcctgaatgtcaaactggcatttcctcccatccaaccccttctatctcaaacttgacagaaaggagtgcaagtttctggcctgttgatgtctccttctgttttccacagacttgcttcgatttatttctgtaggcatttaaaaaagattttggggtgagtgtgaagctaaaagtgatggcgctaaccctgtgccttagagaagccatttggaaactgcagcctagacacattagattatcatttttgtaaactataccatacatttcagtatgcatacttattttaggggtgttttgggggtgatgtgtgtgtctgtgggtctatgtgagcgcggcgccttcctgggactgaggcaccggacctgcgcacacgcgctgcgtaccctacgcccccgccgcgtgggcgccgtcgtcccccgcagcccccccacgcagggggcggggcgctgccacccattggctgaggccgataccacgcgccccgatacccggcgcaggagccacctccctgagccccgcggaccacgcctcagtccgcctgcgctcctcagcctgacggtccgcctttcggggctcctcagccttgtcacccgctcttggttttccttttctcttcatctttggctcctttgaccactcgaagccgcgcagcgggttccagcggacctcacagcagccccagaagtggtgcgccaagcacagcctctgctcctcctggagccggtcgggaactgctgcctgccgccatcatggtgagttgagggagaggcccgaggggcaaggctggcggagtcttcactcgtgggtgaaactcggctctgcagggtcggaaagtgaagtcatcctcggctttcctgtttggggggcacctgcctggacgcaccacagccatggcccacagagttgggagaggcggcctggcagtggcgcggcctacacagagaggcaggcgcgggacgccaagggcggcaaggtgggggtgggccccgaggacgcgctgcctcgccggccacgtgcaagggccacggccttcttgaggcacccatttcccggttcgggttctctactggcagaggtttggggtgcgggttccccacccccgactgccccaccccgcccccactcccacgcgctcccccactcacgcgcctccgcccctcccccactcccacgcgcctccgccccgccagcctcatttctggcgcgctctccccgtggctccgcaagatggcggcgggcctgctgagggacttgccttcttaaacttcgagggccggagcttccttaggaagtggttccctcctggtccctgtacttggtggggtgggcggggttcgtgggggcctcagcgtggggtgtggggcgtcctgaaggcatggccctgtagctgagggggctgggccggaagtgcctctg

SEQ ID NO: 29115 - DNA, 2300 bp, Homo sapien
cctagctaacacggtgaaaccccatctctactaaaaatacaaaaacaaaattagccgggcttggtggcaggcgcctatagtcccagctactcgggagactgaggcaggagaatggcatgaacccaggaggcggggcttgcagtgagccgagattgcgccactgcactccagcctgggcaacagagcgagactctgtctcaaaatatatatatatatataattaatataatataattaatataatataattaataattaatataatataattaataattaataattaatataatacatatacacacacatagagagagagagagagagagccagagcgtgagcattactccaaataagttgaggaaaaaaactgagaaaaagaaaaaaaaaccacgtatacacaatgcaaaagaagctgcttctgttagtttttgacattttaactttctttttcgtatgccattcttattcaaggtaagtagtattgtataattttttattgtgagcttttcattaaagggtcattttcttatgagaatcactttcagcctaggttgcagaagcattcattcaagtcggttttatgtttgcttctgccaggcattctagatgccccatgtctaggatctcttaaggcaggagagagggtgatggtgtaggaggatccatttcttggcttggggattccaataatatattatagatttaaactccaaacgttgatgaaatgcaggtctagggttttgaaatttaatcagagttaaatacatattttcttcatccagagatgggacaagcctcctcatctgctcgccatgggtgtttcacattttccctactccatccttttcctaaggattttagggacaatggcgttttgcagagtactcagttccagctcccaccctgagcccttacctcctaccactaaacatccagatctcaagttacagagagtaacaacactttgcccacacctaggatgaccaatccttctggtttccttagggacgtaggaatttctcagtgctaaaatcatgtaagtcctgggcaaactagtatgactggctgccctacagcccagcccccatatcccgggcaggagaagaatcagttgaataagtcattgctctggttttcagtttatttttggtacttggaatttcccttcttttcttatgggtttagctgcatattgaaaataaaacgttttattttaatcccgcattactaggtgttagtaatgagatactgctcacgttatagaagtccaccgttttgccagctcaaaaagtaacattttaatgctttccgtcagtacagaagtgaagtttgtggataaaggtcatagctacttagccctgtgtgtatagctaaggtgctgcagtggttcccgaagttacgtgatgggctccaccaactggcccacagcttgctcctgctctacgcccgtattctgaccttaagaatgttctagaattctctaggcaggcctagcgccttcctgtaaggcctggaaggtgaattctcccattaaaatgtaagatccctgagcaaacacatgttctgttattctgttcactcctgcatctgctgtacctggtaatcacaggcactcagtaactatttcttgaaagaacaaacatcctgaatgtcaaactggcatttcctcccatccaaccccttctatctcaaacttgacagaaaggagtgcaagtttctggcctgttgatgtctccttctgttttccacagacttgcttcgatttatttctgtaggcatttaaaaaagattttggggtgagtgtgaagctaaaagtgatggcgctaaccctgtgccttagagaagccatttggaaactgcagcctagacacattagattatcatttttgtaaactataccatacatttcagtatgcatacttattttaggggtgttttgggggtgatgtgtgtgtctgtgggtctatgtgagcgcggcgccttcctgggactgaggcaccggacctgcgcacacgcgctgcgtaccctacgcccccgccgcgtgggcgccgtcgtcccccgcagcccccccacgcagggggcggggcgctgccacccattggctgaggccgataccacgcgccccgatacccggcgcaggagccacctccctgagccccgcggaccacgcctcagtccgcctgcgctcctcagcctgacggtccgcctttcggggctcctcagccttgtcacccgctcttggttttccttttctcttcatctttggctcctttgaccactcgaagccgcgcagcggg

SEQ ID NO: 29116 - DNA, 2300 bp, Homo sapien
aattatttcaatatttttcctccaaaactatcacaagacagaaaaaataaacattttgaaacacaacgagaaaaaagaaagaaaagagttgagactgaataaaacactaagcattgtccttcgatgtaaaaaactatttctgttagtgtgtaggcccaggttggaaagagatgtacaaaaacacgaattcagaggatcggaagaattaaaacgcccccaagaataacatgaaagtatttgatgttgcttcaggggcaagggcgagtatgtatatgtacgtaaatccatttccttagaggctccttggcagtctgttacaacaccacgctaatgaaagccaggtctttaagttcaccccgcctctggactattagtttctcctttgcgccctgcggggactgcattcctggaaatgaaagcacacgagttggggaagggctggggtgccagagagggtaggaagctggagcccacggagcctgggatggagaggtgggtgggcccaggcctggggcgtggggtggcggtggaaggtctggggtctcacccttcggagttttgagtcttgtctggctccagggagggagatccaggggagatatttacgaacggaagccacacgatcagcttggacttttaggccagtcactccgccttaagtgggtgcgtgagaaccagaagagggactggctgtagcgctgcaagtgagatcctgtcccaaaagatgagcctgacttaggctgggccccgcaggccggcagggccagccggcatccctggtaggggaatcgggaaggtctcaatgataaatctgtgtgtggagactcagagggcacgaaataggctctgctgatgtcctctgcccctcatagcctgccagccaccccagccttcacccctgcctcagcatccttccaactagttgaatcaatcaggagcccaagggaaaggaattggtcccagtgtatgaaatgggtctgacctactggggaagtcagagaggagtgtcccgaactgggtgggaaggaaacgagttccgtgcgcggggctggggcaggagtgaggcgcagcggccgagatcctgagccccgggacccttgttccgggccccgaggcctacttggtagttgcccctcggggttccgggtgggtgactgacagttgcagcagctctggggaggcgaaggataggcaatgacttggggctcccgtccactcggctttgaggtccccgcggcccgatgacccggcctcggtgacagcagccgcgacggcggcaatctcgacagggagctaggcggctcatggtgggtcagggggcgaccgaggagggaccacgcggcctgtagggggcagcgccgagctcgggaggagacagcagccggcgggtggggtgggtctgggctgccccctccgggagctgccccggggccgcacggcgattgtcatacccggccgcccctgcccgccgtgggcttcctctcggcgccgcgggccttaacggggctctgaggggacgtgacagagctcggcacgcggcagcctctggggagttagggtccggagagacccacgcgtcgccccccgcccgcccggggccgggagatcctcgggagccgcctccgcgtgtccagagagtgtcggggcggccgccacttcccctcgcccttcgccggaggtgggcgccttttcctgcgtggcgggtgctccgaccccagttgctctgagccccggggaagcgcgccccgagcccctgacgtgggcgccccgttacctcggggtgggtgcctggggcccctgaggtgggcgcgggttgccccggggtgggcgcccggcccgcgcgggttatttttggcgcccgcagaggcgcgtgtgttggggcgtgttttccttccccaggtgccgagagccggggctccgccggcgccggagctgactcgtctctctcttctttcccctgcaggaatcttccgataattctgccgccgcgactttaaccgtgcgcaaggcgagagctcgaaacaaacatcacatctaaattaaaaaaaaaaaaaaagcggaagaagcggccgaggcggcggcgggaggagaggagaggggccgcgcgcggcggcccgaggcggcggcggggacgcgggggcgcgaggacgcggctttgtgcaggcgggtctgctggggcgcccatggctggattgcgtgcgtgggtgggctgccgtcggcggggccctgcccacctccccgggcccgtccctcggtgccaagggcgccctgaaagccggagtgggggaagacggtgtcgg

SEQ ID NO: 29117 - DNA, 2300 bp, Homo sapien
agggtaggatccatatctgtaactccaatgccttctgcttggaagataatgcttcctgctggccagttcccattcctcagcccaaatactacatccttggcaagccattcctctctgaacctccttcccaggaagatgcattcacttcttcctctggattgccatttatttttttttttaactctaatgctcatgaaactttgtggtaaaattttatttgaaggtctggctcttctgctacattctgagatctttgagagtaggaacccagattgtacttagatccgtgtctggcacatatgtaagcacaaaagctattgactatatttaagtgacttgaattagaaaaagatgtatgaaatagaagaggaacaattaaatgcttatttgtatttgatctcattttagtctttttctcttcccatttcattctctcctctcccttagaaaaaaagcacgtaaatgttctgttcctataaaaacaatttaaatagagactttctttatcagcagacagaataacctggttgcattgtcaatgttctgtctaaatgaagtttaactaacaactgttgcctttaagggatagaaaagaaaacctcacaaatattatttatagagaacatgcattggtcttagagtctgagggtccaggttccagttcggttgctgccatttattacgtgaatgaccccaggcaagtctctttttttaaggttcagttttctcccttgcaatgagaataacacctccctgacaaggttattttaagaacttgatgagatgttggatatgaaagcatcttgtataggtaagacactaagttctgacatagaataaacttatgattgcatgtttgtatccctgcaaaattcatacattgagatacaatccccagtgtgatgatttgagataattaggtcatgaaggaggagccctcatgaatgggattagtgcccttataagaagaggccagagagctagctcactgtctttctgccatgtgaagatataaggaaaaggtggccatctgcagcctggagagggccctcaccagaacccgaccacactggcaccctgatctcacacttccagccttcagaactgtgagaaacaaatttatgttgttttaagctaccagtctatggtaattcgttatggctgccagaattaggatagctcttaatttttagttgaatctgaatttatatgtatttcttaggcctggatttgaaaaccattctgctatgtggtttaggtagtatcagctgttagcatacgcattgtctcaaggactaacttttcaatatctatctttatttcaggttagtaacatcctttgtttgggaataacatgcatattatttcatctgatgttttcctaagacaattagattgaatttttttcttctcacttaagcattttggagtaccattagtcctcttccatgtcttagataatattgaattcagggtgtacttttaaaaatcttggtagttaaatttagcagttttgtttggaggtatttattttcatcttggtaataagacaagaagtaagatgtttcataattaccatattttgtttgggatttctgctgaattttctctctctccattgcagttctctttttggagaggtccttctctctacagccatatgctggtagataatgcacggtagctgatcagtgctagaaaatacaggagatccagagcatattactcccttgaacgtatcttttagctgcagggaaaacagatctaaggcatgaattacaacttattagttgtagatggactctgtagcccagtactgattaagaagaaacagcctcactctgtcttgccatgatggctgttccaagtcaaaggaaaaggagaagtctgttggagaagattttctttcttttttccttcttcttcttttctttagttcatccattcatttattttctaatattatgggacacaaaagcagaatttgtagttagtactcttggctgtagaaattcgtagttttgcttttcctttaaggttgattccagcaccactttgtgagaagaaactgtcatagtttcacattgcctctaagaaaatgaaacgtacctaagtattattggacagccggagtattttacagtggttgctgctcaggaaatttgagtgaaggactgcaaaagaggagcaaagcagacccgagagagaaggcagcagtgctcccctgtgacgtgctccatcaccgggcagggaagacaccgctgccacctctccacagccttgttcaagagcactggaaa

SEQ ID NO: 29118 - DNA, 2300 bp, Homo sapien
ctcatcatttggtgcaaatagtttccagaaatagtctagacgtcttagcccaagtagtcaggaaatggtttttaaactttagtgtacatcctccgtcacatggagtgctaccttgatgtaaattcctgggcaccagccccagggagctggttccatgggcctagcaatctgcattgtaaccaggtaacccagatgattctgaggcaggtggtctggtgacaagcctttgagaagtattggtgtaggaggcgtacgtagaaacagggcctgtttcatggtgtatgacctgtacagttgcacaggcttcacactgactcagaagagccctgggcttcacttagctcctctgtcaccttgaaattcttaataatttttaatcagggaatcctgcattttcacttttctctgggctctgaaaattgtttctttctttctattttttgagacaggatcttgttctgttgtccacattggagtgctgtggcaagatcatagctcattgcagcctcaatctcctgggctcaagcaatcttcccatctcagccccctgaatagctaggactacaggcatgagccaccatatctggctaattaattttttttttttttgagacggattctcactctgttgcccaggctggagtgcagtgacacaatctcagctcactgcaacctttgcctcacggattcaaacgattctcctgcctcagcctcccgagtaggtgggattacaggcacccgccaccatgcccggctaatttttgtatttttagtagagacagggtttcagcacgttggccaggctggtctcaaacttctgaccttgggtgatctgccccttcttggcctcccaaagtgctgggattacaggcatgagccaccatgcccggccaaaaaaaatttttttttgtagagatgggatctcactgtattacccaggttggtctcaaactcctcacctcaagcaatcctcctgccttagcctcccaaagtgctgagtttataggtgtgaacctccgtccctggcctgaaattgttcttcttgataaatatgaattgcaattattcaataatgatttcatacctgttggtattaggctgtcaactgcaaggccaattctgagctttagagatgaatgagtatcattcatcacaggaatctagaataggaaatcttaatagtatgatttttttctaggaaattaaatttctattcataatcttgaacatagaaacctatatttatgttattctaatatacggtctttttttcctctcaggatggtacaaaacagaagagggaacggaaaaagacagtctcattcagcagcatgccaacagagaagaagatcagcagtgcaagtgattgtattaattcaatggttgagggttcagaactcaaaaaggttcgctccaactctagaatttatcataggtactttttactggatgctgacatgcagagcctaaggtgggagccatctaagaaggattctgagaaagccaagattgacattaaatccatcaaggaagtgagaacaggaaaaaacacagacatattccgcagcaatggcatttctgaccagatatctgaagattgtgcgttttccgtcatatatggagagaattatgagtcactggatttggttgccaactccgcagatgttgcaaacatctgggttacaggactgcggtacctaatttcttatggaaaacatacacttgatatgttagaaagtagccaagataacatgaggacttcttgggtttcacaaatgtttagtgaaattgatgtagataaccttggacatataactctgtgtaatgctgtgcaatgtatcagaaacctcaatcctggtttaaaaacgagcaaaattgagcttaagttcaaagaattgcataaatcaaaggacaaagctggtaccgaggtcacaaaggaagaatttattgaggtttttcatgagctttgtactagacctgaaatttatttccttttagttcagttttcaagcaataaagaattccttgataccaaggaccttatgatgtttcttgaggcagaacagggtgtggcacatataaatgaggaaataagccttgaaattattcacaaatatgaaccatccaaagagggtcaggaaaagggctggctctccatagacgggttcactaattaccttatgtcacctgactgttatatattcgatccagaacataagaaggtctgtcaggatatgaagcaacctctgtctcattactttataaactcatctcataatacatacttaatagaggatcag

SEQ ID NO: 29119 - DNA, 2300 bp, Homo sapien
gaggaaggattcacatcttacacagccagagaaggaggaagtgagggggaggtgctacacacttttaaaaaccaaatttcatgagaacccatcacaataacagcaagggcgaaatccacccctgtaatccaaatgatccaatcacctcccatcctgcctctgctgtaacactggggattacagttcaagatgagatttgggcagggatgaaaatccaaatgagatttgggcagggacacaaatccaaaccatatcaggcacctttacccaagcttcctctcttttcctgatctctgctatttaccctcccagctttctgccccaagttgtccatgtgtcagaaattaatacacctggaagtattgctggcagtaagcacccggaatctcatgcctgaagcatgggagaaagagacaacccagggtcttaaaaccgagctcacgctgtgttcactaagcagcacaccctggtctggggttcatatttgcctagagaaggggccgtgttttttttcactctccaaattctgcactgaaagagggtgaagttggggagtaaattaaattaaaggcatgctttaagttcttgaaggccctaagttaatgaagagggaactgcaactgttggaaaaaatcaggacctttctaatttgtggcagtgatgataaaaaaaaatttggattttaccaggaaaacatgttagcagtaacatgaagaactaataagaagagaaaaaaacaaataattcttttgaccataagaatattaataccaagcacaccaagtcatttacacagagttccccattcatgcctaattattaatcctcttaatacacatgtttatcattacaaatttatcagattgactttaagttgcatttgactaaactattgtacttggcttgaataagattgaccttggtatggaatgtttgtactgcttgttgctcaggagaaattttttaaaacatctgaaaaaacaactaaaaccctattcagccgtgatgttacagtgtagccaaaggatttaaaaagcattgaatgtatggatcaccagaaggtaatataatcaaatttccaaacttcctttttatttaagatgacaatttcccttagaattgttaccaactatagcagcagtccccaacctctttgtcaccagggaccgtttcacggaaaacagtttttccacagatgcggttgcaggggcatggtttcaggatcaaacaggttccctgttccacctcagatcatcagacattagattctcataaggagcacacaacctagatcccttgcatgtgcagttcacaataggcttcacactcctatgagaatctaatgctgctgctgatctgacaggaggtgggactcaggtggtaatgcttgcttgcctgctgctcacctcctactgtgcagcatggttcctaacaggccgcgaacaactactggtctgtagcccggggtttggggacccctgaactatagtacagtgtttatgtacagttctatctatggccttatcatttccagtcaatatgttgctttccaaagttactttggtcagtagacaggaactttaacagcaaaatatagtgtttataataagccaagaacaaattggccttatgttaaatcctaaaaagttataggctatatttgaaaagagagaaaagaataagaaaattatttctacttgaaaaacaattgtgaaaagggaagctccctcctttcccctctctagctcatcagttgttcatagacccaagactagactcagacttctggctttcatggtcacatttctctacttttctcacctttaatgttcttactgttctgctttaacatttgatatctttcttatttttgcctctgtgaggaactctgaaagatggcctgatctcattaaataaaccaaattcaaccataccttgtccgtgctacaaaaagggcctttcagatcaacatcaaggattacctccaggtaatcgctctggcctcttgatcatcatcacctttttattcctggtggctatcccaaaggtgggacagtttgcaacattttacctgagtccttccataggtcccttcagtacatatatatactaccacatggtccaaaatttgaaggaggcctcaatacaatgtcccaatcaacttaaaacagtgagaagtgctgccaaattgcttaactttgggatgttctcagttggattctaagcaaccatttgggtttgaagcatatttgtacactctacatgcaactgttattcatgtatcatgatgtgaaaatatt

SEQ ID NO: 29120 - DNA, 2300 bp, Homo sapien
gactgctgcagtgaagattgctgcatatgtgtatcttcagagtcaagaagggtgcaagagaagtttgaggaataactgggcagtttgttgtagaaataatgggtatagaaattatttctaggaaatgggctactttggtttttttgttgttgtgcttaaagcactatctgtgatgaaatctaagatgtgattgctgataagaaaatggcaaggatttgagctgtaaggaaagagggggaagattgtattcctaactgtagttgtgtattaaccttcatctactttcctcattgatggaggaaagttgtgtcagccgaataactgtaaccacattctacatgttttcatcgtttaagagtgcaaacatttgtatcggttaaaaatcctttgaacaagggcccaaaatggtttagttcatgtacttttttgctgtgcccatctctggttcccctggtactctttgcaagatcagttaattctttgtaattaagaatagcagcctatttaatttagagatgtttttgtacttcttggaatagtaaatattagcatttgtaatttgaaagaattagaaatgtgtggagaagtattttttttcctaagccatgtaaacacagccatattagacaaaaaaaaattgtgttaatcacccctcattttattaatagtagtggagtaaaaattgaaaattataaaagataaaaattataaaagacattgtaacatttttaaaaattgaacatttaaaacattttaaatattttaaagtggaaaattataaaagatgctgtaacatttttaagaagataaacaatacttcggcatttaaattttttatactgaaaaattgagtaattgatgtagttgaaaatataatctaattattctattgattaatatgagaatgtgaataaaaaaacttgtgtttaatcacatggttcctaataaactatgatacatatttgtgagtatacagtattttgtcacatctttgatttctccttaaatatattgctctctaaggaaaatatttgaattttttttgccttgctttaaccccacaaatggttatatttggtttcaaatttacataaaattaacatctcttaactaatttttaaaggttattctatactatttgatggtgctaaaaatttggaatttttaattctttgctatttgctagaatcacatagaattctagctgaagtccttagaaaaagacttatgtaaggaaattgtagccatgtcatgtaaaattagaggtaaatgaataaaaacatcaaaccaaatttttttcttataagaattagatataaatagtttaacatttattgaaagtctaaagtgtcactattatgtacaattatatatagatgttgcttagtattcacattagctgcttatgtttactctgtggcatagatactcattttctagataatagaagtaagtttgaaaaacactcctcgaaaggtagccttactgatcaggtatatctgttgcaaagctaaaaaaaataagtatgactatatccttcatttaaaataactgtctatgcttgaccaaaaaaatggttatctactggctttttcccacacttaattttaaaatgaattattttaaatagaagtgagatgtgagaacgcagttttctaagtttctattggatttgtcatacaaatatttgcagaagggcaattaacaacaacagaaaatcagtagagatcatgaaattttggaaaattttatttttaacttacaaccttacctatggaagcaactaccagactactaaacattcattttttcttcaccttttgggaatttgtgatttctattaaatatgaaagattttgacttttttcatatatatgtataatacgtgtgtatataatagtatttaatgatgatggcctagttatacaattataaaattcatttgaaagcttaaaatatagattttactatattatatttttgatatataatatttgctcactgtgttcagttaatagtttttcacagttacttgagaaaatgatcactctttattctcaaaagtactgtcttctgaatttttgttttgtttctttccagaaggtgggtgcggctgctatttggacgagagttccccctgcaggaccttctggtggtctgggatgccttgtttgcagacggcctcagcctgggtttagtagattatatcttcgtagccatgttactttacatccgagatgcttgtaagtattaatgacctttcctacatttgactaggtactcctgattttcaaaaatgt

SEQ ID NO: 29121 - DNA, 2300 bp, Homo sapien
aaatatttttataaagtaatgtctggggaggtcgtttttttcctccaatttgcttttccagtttaaactatctttattttttgttaatgtataagtactccatgtttttgctaaaatagtcaaacaatacagaaatgtatgaagttaaaaatcacctgtaaggccgggcacggtggctcatgcctgtaatcccagcactttgggaggccaaggcgggcggatcacaaggtcaggagatcgagaccatcctggctaacacggtgaaaccccgtctctactaaaaatacaaaaaattagccaggcatggtggcgggcgcttgtagtcccagctactcgggaggctgaggcaggagaatggcgtgaagccaggaggcggagcttgcagagagctgagatcaagccactgcactccagcctgggcaacagagggagactccgtctcaaaaaaaaccaaaaaaacaaaaaacaaaaaacaaaaacaacaacaacaaaccaccagtaattctttccccagtgatgaccattgtttcttacttggatatgtccttccagactcctttttaaaaatatgtttgtcttctctcatttcctttttaaaattttataagccctttctaaagatactgttttgaaatcttaattctttactcttcacattgtgaatctataaccttatattatacagaatgtactttgataattccaggtgacattttcagaccttaaatttaactttactccgttttgaaatatatttttgcctttgcttctatgatattataccttcctgattttcctgattcattgtgttgtattcctcaagatctagtgcttttctcttctcactgtacccttttcttggtaatctagtctgtgtctatgacttcagttaaccactttgtatgcaagactcccaagttaacagatccagcctaggctattgttatgacctccaggcccgcataccgaactatttgatgtcgcttttcttggattccatgatggatcctcaaatttgacgagtctagaattaaatttattatattcttcctttgttcagaccttctctgtctagtattcccaattttagtcaagaatatctttctatccagttgtgcaacctgaaaactctctcttactcactataactaatccatcaacaaatatcccctcatcatttacataactgtgatatacttacggatttgtttaggacttagttttaatccgttgatctgtatgtctctctttacacaaaccttacacttttaagtaagaggatttattgtttttctgcattacagggctattccctttatatcattattcttttaaaaattgtaggtattctcagacaatctacatagacttcagaatcttcctgccatcttctgtctcacagtccctttggaatttttattagatttgcattagatgtattgattatagaaaatttatatatccccaataatgagcattcccatccaggaatatgttgtgcatcttgatttgccatttgggtccttcaaacaagtcacacatttttttatatctaggttttcacaatgcaccaagactgttgttgcccttgtgctgggttattttagttatggttggtattggtttgtctggtgtttagcacagtccctggcatatcactcacagtaaatattaagttttgagcagtgtttagtgtatagggaatctttctttcttttttttttttgttttaagtcatgcagtcttactcattttatgatttaaaaattttttaatttcattatcttgaatagttatagacactattaggtgcaaattataattttgtcttccttttaaaatttatacttctaatttcttttacttgacctattgggttgggtaaaatctctctaacaatgttgaattaataggattggcattaatagctaatatctttaggtgtctgtttttaaatgtcaaaatccatttatgttttgccattataaatactatttgtgggttttttttcaccctaatgctgtattgaccaatggaagttttatattttgtttgcttagtttatttttattttaatttaattaattaaattttttttagagatggggtctcactctgtcatccaggctggaatatagtggcacaatcatagcccattgtagcctccatctcaaggactcaggggatcctcccttctaggcctcccaagtagctgggattacaggtatgtgccatcatactctgctaattgaaacaaagttttttttaatcaaaggtttgccatattcagtgacacattg

SEQ ID NO: 29122 - DNA, 2300 bp, Homo sapien
tgaacctctgactaagacccaggagctggttcccagcctccagccgcgcgccggttggaagcagggagagaagggaggggtaaaagccctcaggcgcatgcgctcagcagcctgccggctcagccaaggagagctctgcccgcggctcactccccacctactcgcttctcgcgcctcgcgggccccagaaacccggacccgagagcgagcgcgttgcgctcgcgcgcagacttcaggtcccgtgcgggcgcctgcgcacgagcttcccaggcgcgcgggccgcgaggttattagaggtggagcgcggggagggcgcgcggcgggaggcggccgccgttacggcgcgagcgtggtcacgtggccgctggtcaccgccgccaccccctcccgccctgttctctttcaggtcgggccgggcccggccgcttccgcgagcgccctgcagactgagggagagagagagaaagaggaggggaggaggaggaggattcagggaataggagctggggagcccttctgcgccacaggtaaaataaaataatgatgatgatcgtaaaaaagcccaagccctctgaacgcctccgccttcctccagtgcagccccacatgcagtcgttcccgccccggcctcccactcagcctcaggacaggtttcgccccccttcgcgccgctgctgcagccgcagccgccgccgccttctcacgggagggcctgagggtgccgccgccacggcggacgggttgccgcaccgccccccgtttgtgcgcctcggagtcggcgtcgggggtggatggcgggaggggtggacccttcagctccctggcgggcagggcgggcagggcgagctgggcggggtggctgcttgcagtctgcctgctttccctgccccaggaggtcggggtctagactggaaggccaactgcagtaaaggcagggcctggcggctggactagtgctcaacttcctacttagtaaatttccatgttcatttgggccccgggaagcacgcttccttccctagccggaagcgaaacgggccctgaatcctcaaaccttaatagtctttagaagagagaagccttgacttcacttttgaggaagggaaccgtgacctggatttagtacgacttaagtttattcacacgtaagaaacggaggtctttcaggataagagcaaaaaaaaaaaaaaaaaaaaaaaaaaaaaaattcgcagggagggcaaatcccgctccccaccccgacttttcctggaaaaacacacagaccttcactacaagattcgattctacaagtgacctagaatttgttcgataccagttactcgttttagttacaggaattataatctgtgtttaaagttaacatcctgtaggtttttttcgaataataactttctggaaagagttcatttgtcaactctgaattggacaaaatcctaagattttaacatgcaggtttcacacgtttggaccaggttgcctggaatttctagacccggtaattcttttgtaaacctttataagtgttgtgctcttgcacaaaatacttaaagcaggaagcaataaataggtattgttgaaaaatgagcctttgctatcggtggcaaagaaattcatttatatattggtttttctctttgggcttttctgattccgtgtcttggtacttttcataccatatctctgaattcatttgtaaacttgagcatttttaatttttacagctatctgcagtatcacagaacactcaaaccttaatgtgggtgggaatcacttggggctcttattaaaaatgcattttctggttcagtaggcctatggtgcattttgatattgtacatttctgataacatgtgcagctggacaagggactatctttgagtagcaaggaagtggataacttgtgtgcaaataaataaagtgttgtatttatcaataaacatgttctttttaataactcacccccgggtgtagaggtggcttgggagaaggggcaaatggcaggatgaactgagaaagctttcagagtgagcaggctgagtctggattccaggggaggggataggaagagtgcaaatattgtgtctgtatgctgtatggtgactgcatcacctggtctgtgaattttccattagaagcttggtgtgctgttaggtgaaagacttgctcagctatgcgtcattgggttttatcaacatataggcgaaaaaaatcctggtctctgagtgtacagctgagatgaaaatttcttttattggaggaagtattgagtgtgtgctctcaaatgcggcctcagttga

SEQ ID NO: 29123 - DNA, 2300 bp, Homo sapien
ataaaattattcttatatctggagccaagattgggtgagacagctttttctaatgacttcctttggggcaggcaagtagatctttttttctagatcatcctctcatcgagattgtggcctctttgagggtccaattattatgtaggggtttgaattcagcttatttacattgttcagtcttgtggcctagtctttcattttggtggagaccattgatttccacatctctaggttcacatgttgacttttacccccaggactgtcttgactaccaagttttcttagcactctgatttcaattctttgtttaatcttattttatttttgccccagtgatttccctttattttattgtgagctcaataatgtatttaaaaacaagtttattgtactatattcagcagaaggtattttgcaatggaccatctttttcccttagaatatttaagccatcatattgccagaagtggaagactcccatcttgcaatagattcttaatcagcctctgtttccactctttttcttcctcaattcattctccataaagtaactggaataatatttttacagtatcaatcaagtcatgttatacaagaataaaattaaactctttaacttggtacacaaggcctatgtgacctggccatgcctacctcttcaaactcaccttccacctatcctccacaccgactttcatcatccacattgtctctcattctcttccttcacaggccgatcatatccttgccttagatcttttattgatctgtctcctgtgcctaaaatgttctcttccaaaatctttgtggcctagttccatctatcattcatatttcaacacaaatgtcactttttcagagaagacctccttgactattccatctgaagttgcccatccacaatttcacatcaccctggttgtttttcacagtacttactgccatctgaaattatcttatttattagtttacttgttaattatctctctcttcctactaagatattagctccatagaacggggagatgatttattaatatgtgaccagtgcctagatagtttaaatattcaatatacatttatcacataaaattcattaaaataatatgtattgaatacctgctatgagccagacactgttctaggtgctgaggatacatacatgaaatgaacaaataaagattcctgcctcgtagttcttacgttctaaaggggtggatagacattaaataataagcataccacataaataaattatagagtatggtgaaaggtcatatggcaatggaaaaagaaaagtaaggtggaatagtggggagggacaggttgcaattttgaatagaatagattaggccttattgagaaagtgatacaaaagctgggtgggtgtctgggaaaagaacatttcagacagagagaacagcatgtgctaaggtcctaaggagtccaagtggtgggaataaagtgagagggtgagaggagatgaatttagggaggcagctggaggccaaagtataaagccttgtaggctattataaggattttggtttttcctctgagtgaagtgggagccactggagaattttgagctgaagaacgacacaatctgacttacattctaaaaggatgtctctggctgctgtgttgagaacaggcatggggcaaggatagaagtagagagacctatgaagaggcagttacaataacccaggttattgattgttttgattaagtctagtagcagtagaggtggtgagaagtgactggattccagaaagattttgaagattgagccaacaggatttgctaacagtacagacatggcttctgaaagaaagagaggcatcagttatgttactaacaactagaggaatggagttgttaccagttgatagaaagaccatgggtgagataggtttggggtaaaagatcaagagttttggacctgtcgaatttaaacacacaagtgataatattgagtaggcagttggagttcagaacagggctctggggaggaggtacaaatttgggagtagttagcatagaggcggtatttaaaattcagggagtgaatgtgtgtagagaagagaagaagaccaaggactgagcactgggagactccaatggggagaaggggaggaacaagcaaaaagatggagaaaaagctaccaccagtgacctaggagaaccagggggctggcatcctgcagccacatgcacatggtgagtgatctttcatacactcctgtaaatgtataatttttgaaatttctataaatgtaagcctaaaatgagggcta

SEQ ID NO: 29124 - DNA, 2300 bp, Homo sapien
tactcctttttgtggcttttgtggcgtgtgggtggttggttagttttctcccctggccctcgccccctcctccccgtcattttccttccccccgccccccgtgcccgtcctgcccgtcctgcccctcctccctcccactcacacacctgcccctgccgcccgcgcgccgcgcgctcccctccccgctccggcggacgctgccagggaagccccctctcctcctcccctctgcgccctccctggcgcgtctggcggcggccggcgctagccctcgcacagcgccctgttattctgggtattgtgtgtaataaatgtcgggccgcctcactctaatcaagctcattacaaattcttgcgcgcccggggccggaaatcgtgcgctccccccattccctcactcattcactagttacttgtctttcggctttttaactcgccgcccccgccccctcccccaatcccggccctccagcccgggttttaatccccatcccttttccgcccgctccgtgcaccctgcccccccacgccgccttcctcctcggctccgcacccccttcctcctctcctcccccctcctcctcctccgccgccgccgccgccgccgccactttctcgctcgctcccgttccccggacgcggcggatgagccggccccgctggggaaggctccgggcggcggcgggcggccgggaggaggctgcgtgctcggggctggggctgcgagcggggtgattttgtattaaaatgaggaggaggaagaagaggcacccacagcggcagcggcggcggcggcggcagcagcagcaggagcagcggcggagagggctgcagcccgggcggacgcgcggagccgagcggggcacggcggcggcagcgacagcggccgggatgagtcaactaataatttaatgggggcagagacggcagcgaggggtagagctagcgagggagagagcgagagaagcagccccgtccggggactcgcgctcacactcacgcacacacacaaacacacacacacctctccctgtgccacccagcaacacccggcctcgtcacaacaacaacagccgcggccgccctctatcctgcccgggggcccagccgaaagccagggcgactctagaggacgctgcccgcccccctctttcatttcgggaaactcctgatcagttttgtcggggtttctgggtttcttttcccccaaagtcctagtgccattgtggtgctcgttgtttacctcggactctggacgagtgagagcttggcgactttttggggggagggggcggggagtttgtcgctgcctaggcggtggaggtggctgggggtgccttctgatcttcctcctcctccccctccccccgaacctcttctctcctcacttgctgggaccccagacgctcacagccccgcgtcaatgggcagggagagggtccttgcggctgttgtcagcgagggcagaatcaaaagtggcattttagtgcctttccggggcttttctcgcgaccccctgccccccaccctcgctgtcccccgctagatgccctcgttgggggtgcgaggctgtggggaaaagtttaaggtttgttaatattagtcgcgattgttggcgaggggggtgggggtgattggaagggaggcgaggtggccttcccaatgcgcgttattcggggttattgaagaataatattgcaagtgacagccagaagtagactttctgtcctcacaccgaagaacccgagtgagcaggagggagggagagacgcgaagagaccttttttcctttttggagaccttgtccgcagtgatttttttttttttaagagaatcctcagtcaccacgtcgtttccccagcaccatcacagtgtacagctcataacgggttttgctttgtttttacgatttccccccaacgaatcacttgtcagatcaattttatcttcttcctcctccctgcttcccactctcccctcctccccatcgcaaaccctgttctctgaggttagacattttacaaacccctatatgttggttttcgaattgtgattttttttttaaacccctttctcatggctactcttctagacgtttatttctgcccttcccccgcttaggggggcgggggtaggggaaaggaaaataatacaatttcaggggaagtcgccttcaggtctgctgcttttttatttttttttttttaattaaaaaaaaaaaggacatagaaaacatcagtcttgaacttctcttcaagaacccgggctgcaaaggaaatctcctttgtttttgttattta

SEQ ID NO: 29125 - DNA, 2300 bp, Homo sapien
agcttgaggtgacattgcctggctaaattacatttgtgtgtgtgtggaccactataatttttctttatttttaaatgttgctattgtttgtaaatttgtacaacaaggcactagagtgcacagtccctactgaaaacaaggcaggtttcagggaaacatgtcaggcattactagtttgaagcaactattaaagtatccatattggaaatttcaaatttaacctaccatatttctatttcttatactttagctaacatatcttccttcagatttccccacattttaacttttaaaaatttactatcatttgggctttttactaaaaatttgccttaaatttcttttcctatttttgatgctgtgttttctgtttatcacatgttcattcttttgctcaaggcttgggtttgtgtgccaagattcacggttgccttcccagatttggctaacctttctggtttgtgggtgaaacgtgggtgctattagagtgatatattttcattttgtttctcctaaacttactctcccctaggaggccatcatttcctacacttttctgctttaccttttggcttttctttagatttgtaatgtaaacagtgtgcctaagagtgtattggtggctttacagagcttaatttgcaaatttcccttttatctcagtacttgtgctaacttgttgcttttttatgtgtaacaaaatgtttatctgactgatttttctcttttccctaccagcaaattctgaaaaataattcttgttttttgttaatgattaactgccttcagggtgctaaaatggtagaactaaaacctaagcgataaatgaggcatttctattttgggttacattgtaatattctttatttttacatgaactatatttaatagattgtctaaataataggatcatacttatgtggtaatgaccatttatctaactgggtaacctaccctagattacagcagaagtgtttattgctacaacagatgtatttaccaacccaaactttcctcttttgcctagcgtaaattatttgaagaatgatggcatcttttcctttataataacaagtcaggtctctttcaagtgacccaaattttgtttaactcggccacgtatttcttcttccaaagtattctatggctcagaagtgagggcgatttgaaccaacgtctgactagtacagaacgctcttactcagttctttctaatgttggctcctcatagtttaaggaccaccctccttagaggataaacattccgagcgtttcgaggctcctggcctttattgctgtacacgtttctgcaccctccgcgcttccccggagagaactgccttccgtctgtacccctccagccacttcctgatggctccctacctcattcctcagcgcctgtcacctgcgtacccgcgcccttctcccacggggccggtgcgtctccctgtccccccacctcgcctgtccctctgcgacgctccaggcgtactcctttttgtggcttttgtggcgtgtgggtggttggttagttttctcccctggccctcgccccctcctccccgtcattttccttccccccgccccccgtgcccgtcctgcccgtcctgcccctcctccctcccactcacacacctgcccctgccgcccgcgcgccgcgcgctcccctccccgctccggcggacgctgccagggaagccccctctcctcctcccctctgcgccctccctggcgcgtctggcggcggccggcgctagccctcgcacagcgccctgttattctgggtattgtgtgtaataaatgtcgggccgcctcactctaatcaagctcattacaaattcttgcgcgcccggggccggaaatcgtgcgctccccccattccctcactcattcactagttacttgtctttcggctttttaactcgccgcccccgccccctcccccaatcccggccctccagcccgggttttaatccccatcccttttccgcccgctccgtgcaccctgcccccccacgccgccttcctcctcggctccgcacccccttcctcctctcctcccccctcctcctcctccgccgccgccgccgccgccgccactttctcgctcgctcccgttccccggacgcggcggatgagccggccccgctggggaaggctccgggcggcggcgggcggccgggaggaggctgcgtgctcggggctggggctgcgagcggggtgattttgtattaaaatgaggaggaggaagaagaggcacccacagcggcagcggcggcggcggcggcagcagcagcagg

SEQ ID NO: 29126 - DNA, 2300 bp, Homo sapien
gatttggttttcaaactccaaaactctgtgatgatttttacaaattggtttacattttgacagaacagagttaagttaattaatagatcaggcacgaaaaatcatccacagtagggtatattttctggtaaaatgaaagttatgtttcagcatgatgagcatcaggcttcagtaatctgttcctcgtgtggaatgaacacttcctacttcgagctagcaggcacctactgtttatttacgctgcattaaactgacagtgcagcaatcagaggaaaaatattacttaccttcctgaagtaaataccagtttatagtttagtgcacgtatttatattcctgtcaccactaaataacggctctgtctccattttaatatctacctgtgctataatccagggcttcagactcttcctggttggggataggggtcgagaggagtttttcttatcatttccctatggcaaaactttaaagacaagtaatttcatcttttcatttctgtcatgtgagaaccagttgaaagaaatgttatgcacttttactttgcatacctcaactataacatcaaaaccccaaaagaatctgcatgccacttaaaatagtcatcttaaagcaacctcaggataaatatgttcaaacacattcaaatgtgttttgctaaattaactttctacaaagttccaaaaagattaaactatttgattcctcagataataacttcaataaagtgtctcctcttccaagtcttagatggaatgtttaagtttttaatggagttctgaaaatatgaatataaagtggggctcattgattgatttattgattgactcgctaagcttttctctgaaaatattcttaactccttcatttgacttcttgttaatctgccatccttaaaataagggagatttctactttgttgtaatactaaatgtatttgttgtttttcttttatgataaaaatcctttctttttcaagacccctttgaaacatcaaaatactgttaaagttgaattccagaactcacaattaacttgagaaaaggcttattttcacttaaattatctaaaaagcggttacacttaactgtctatacacagttatcaatacctagtcacatattccactgacatcagggtagaatatggtcttaataacaacatataaatcaaatctgttacataaggttctccttcactacactgaagaaaaagtgtctactatagtaatttatatatcgttcctaaatgctgttctcagtggtaagtctatttaaacttgatgtcttcatagagtgtgatcaacacattaacacacattatttcatacttttgaacttatgccaatggtatcttttgctgtttatttttttaagtcttttttaagattagatatttcagagtaaatagatacagattgtgtgtgtatatattcagggtgagatttagtagtgtagcatttcttcaacatattggcctatttttatgctttcaagttattttgtatcacttttacagttgttgcagtttgaaagttcagaagcgaaattctaataacctctttcaatggactttcaaggatgtaattcagtttatgcggtgatgtagtttagttacaagagatgaaaattagttaactggtacctcaggatttatgtccctggtttctgctgaaatttattcagtccagttatttgacatttggtagagaagtggcttgtaatcaaaaattaagagttggttcagtttccagtggagaaaagatttcgctggataaaacatttaactgtgcaatattttattacactcctcactcattttagagcctgcttattgttgcacacatttttgaatacctaggggtgcaggtccccagatgaggctgaaatgcttgcggaagaagcagatgtcaggctgcacctcgctgtgcctttactagtacctatgtggacttaagctgcccgccccccgcacccctttcccccaggtgtgcaggaagtagagggcgttatactgggtgaagtgggtggactctacccagagctatgacctgatttgtgacgcaccctcagaactgcagtaatggtccagctgcttcacaggcaactggtaaccacctcatttggggatgtttctgccttgctagcagtgccagagagaacttcatcattgtcacctcatcaaagactactttttcagacatctcctgtagggctagattcagagagcagcttctgatatttggagggtaagtgccagaaaagttactgtaatgttacatgtggagaatcaggactcca

SEQ ID NO: 29127 - DNA, 2300 bp, Homo sapien
tttcttttgggttgtcatttttaagccactatgtggcttgcttcttgcagtgatttcatatattaggtaacagatcaggaccacgaggaaacaatttttacacacacggccctacagtgcaaattgttatgaaccacagtcatagcttacaactaatacatttcatcctgaacttcgagccaattcacgggtggcgtttatctccgttttacatcggcagcaacagcctgaattttctgggacacgatgcgccacccaaacaacagggactccctcatctttttctccccagctccgcccaagactgagccacatagccacctgcagttgcgatcggctcgccgcgtgggggactccacccgcgtgagctcggtttccgaaaagcgaagctggggtgggacacaaggattgaggggaggacagggacggacctgcggcagaagcagggtgcagctgggcgaggaaccccacgttggtagcttctcttctgggatggccgccccgcgccgcccactccggaatcctgtcccctccccggcgcgcccccgcccagctagcctagagcctctgccggatcttctcgaatttcaacacaaagggaatcctcggccgcaggaagtgcatcacgagaaagggggcctgggggcggggagagggggatgccgcttctctctcttctccccctccctcccggagcccaaggcagacgtgacgaaacccgcggggtcccccccgaagccccaacagccgagataattgaaacaagaaacccccttagtaagggggcggggggtgggccctccctccctcctcccgccacgcccgagttcctggagatcagagctgcctcgccgcggctctgacacctgtttgctttttccctcctttccttccgggtgcactagcacctgggcttacgtttgtttttctaccctggggctctcaacttcccttccacactccacctcccttgcagagttttctataaagttcgggctctgggtgtccccttgcactccccacagggctgtgccgcaggcttgggcgactttccccgcagaacgttggccgagagggagtccccgcggggggggccaggggggaggactgggagagaccactttcgttttctgagacgccttcagttcctggccgtccgccaggctttcttcttggaggtgtcagtcttcgggagtgggggctggggaaaggggggcaggctaggggatttgtgtttgaagctatttttggaaggcagccttactgtttttacttacgtggtattttgcaaattaataaaaatagcaaacttttctagaaatgctttattcacattttaccggagaatgggaaaccatccattgtccgttcaaaaggctatttttttaaagtttgggatggcttggggaggccaatggcaatttggggagaagggctgaagcacccctttttggagctcggggccagtttcccggactaaaagaccctggtgactggggatgggcctcacaactaactcgggctgccctgcccctgtcgcgtgggctcgcaatggcaagtgctccggaagggggccgcctccccgtggggctcctggctgcctctgctcccttggacaccactggggggcctccccctcctaagttctaggttgaggccggatacctgccccgacctgtctcctccctttctccaataccacacccacgggactccagtctccccgggagtgggacggagagggaacaaaggggtctttgttcactggctcccggggcgtgggagttgcgctcgctctcctttcccggcgtcccgtggagaccgggaggctcagcgcctctcccagctctcagcgccgccctcccagaccccagagacgtcggtcagggcgcggcgccccgggccactgcgggctctttccgggcgggcgacgtggggggcgaggcaccgcgcggcggcgcctggcgggcactgttgcccgcggagggacggtgggggggtttcagcagctggcgggggtggagggggcgggagagggagcctgcgccgggctgagcctggaggtgcggggcgggctcggggagcgctcttggggctcctcctgccacagccggggcggctggaactctctccctttctccctccatccttccacttcccctgctcggccccgccgtcaggccgggtcccccttccctgccgtcatcaggttccccttctcccttcttggcactttcctttcgaaccatccttctggacaaactttgatggagaatttcacaccacgctggaaaaatgcc

SEQ ID NO: 29128 - DNA, 2300 bp, Homo sapien
caaaggagtcattagggttatggggtcccaaaggtaataacaattgtctatacatggctcttcttgatcaggataatcccctctgtcacatatgaacattcactctacagacatggaaagcatcaataccaattaaatattcaggcttggaagccgtagcaataatacatggttatctttaattcttctctgcaaactgtgcccaaaccccattaactgaattcggacatccttccctaccatcctctcccaggactgactatgatgatgactttgggaactgtatccaaaccataaaaatgtgagaatctcaccccactgaacagatgcatccctcttgaagacctggagcccttggtcctacttctaatcatctttctccctaaagcggatgagatcagggcttgggggagggagggattaagggtgcagagggagagaatggctttgcactagtaagtaagaaatatttactttgattttgagtggcatggtggtggcatggtagctccatgaaacaaaccaccagtgttttcagtgcacacaaagccctgcatattaggcggtaatttatcgttgacagcatctgtttcagttttggggctctcttgattcaacagccacatcccgcattgcttttcagctaggatgagtgtgggtttgcatttttggttgtagtagagacttttgtttgtttttgagatggaatttcactcttgttgcccagtctggagtgcaatggcgcagtctcggctcactgcaacctcggcctcctggattcaagcgattctcctgcctcagcctcccgagtagctgggattacaggcatgtgccaccacgctggctaattttgtattttcagtagagacgggatttctccgtgttggtcaggctcccaaagtgctgggattacaggcatgagccaccgtgcctggcctgtagtagagacttttataaaggagtctgctttaatccagggcatttgcagctgtattgtcaagatcatatattttaagttctcattctgtttgaatacaagggttaagtagggaagttttccagggctgtgggtctgactgcaagaatttataattcatcgagtcagtttctcgttctccaggggattgcctccatcagcattgtaaatccagtcctgggcagtaagagcttaaatactacgcagtgactcatttatgattcctcttgggagttatttcctctcagggaagtctctctgagggggccaaagctcccttatagcaggaagaattcactgcagaaacaaacaagaaaactgggacctttgccatcatctctgaatggatttaaggttggcttgatagactgcaggagggactgagtgctaagatgtcccagctgttgacattcttccttaacgaacattgtgtgctctgccccttcatctcccaagtgaatcagccagtttctgctgagagcccttatacatttccctctgttcatactcagtgtaggtacttctgtctttaactgctgtctgaaaggaggtgagactttttccctccaccctcctccccctacttaccaggatgaatcttagtgttacttgtttcaatggggctgaccatcagattggtagcatttccctcttgcccataggagtgttatgaaaaccagaccactgtctttgaacccacctccgtgaacttgtcctgcaactatctccccaatttctccttaataacaggcaatgaaatgaagggccatttattgccaggttaaaacacagaaggtattaaaaactttgtaaggataaaaattgtagagagctgtcaaaagtacacacctattggtcatatgaaatgtcaagcccatatcatggtaataatgctctaccacggtctaaccagcgtatttgactcctcttctgtgaaaattgagacaaatttgaatttatgtgatgaagctatttcttttttcttaaactaaataatgttgcctactctgctcttgaagacaactcccattttatgttcttttgcttcctgtataacagaagggagatgggatgatagataaagacgagctgcaggaagcttgtgaccaggccaacttgagtttagatgacaagctcctggaccagctatttgactactgtgatgtggataatgatggcttcattaactatctggaattcgcaaattttcttaactggaaagacaaaatgcttcttaaagagtatgaagagagggtcattattaaaggtatttaatttttgaaggtttgatgaattattatttttttaaattttaaaatttatt

SEQ ID NO: 29129 - DNA, 2300 bp, Homo sapien
gcaatggtgcaatgatggctcactgccgcatagacctcctgggctcaagtgatcctcccacttcagcctctcagatagctgagactacagatgtgagccaccacgctgggctaattgaattcttggcgttaagcaattcttctgccttggcttcccgaagtgttgagattacaggtgagtgactatgtccagacccctacacacttttaaaaaaatatttttggattttaaggggtttttgtagagttctggaatcctgtaaattcttttcaaattctgttttgctttttttttttttttttttttgagatggagtctcactctgtcgccaggctggagtgcagtggtgtgatctcggcttactgcaacctccgcctcccaggttcaagcgattcttctacctcagcctcccaagtagctgggactacaggcgcctgccatcaggcccagctaatttttgtattttaagtagaaacggggtttcaccatgttggccaggatggtctcgaactcctgacctcgtgatccacccgcctctacctcccaaagtgccgggattacaggcatgagccactgcgcccggccatttttggttttttatttttaaatggaatctcactctgttgttcaggcttgagtgtcgtggcaccatcaaggctcactgcaacctctgcctccgggtttaaatgattctcttgcctcagcctcctgagtagctgggattacaggcgctggacaccatgcccagctaatttttatatttttagtagagacagggtttcgcgatgttggccaggctggtctcaaactcctgacctcaagtgatctgcctgcctcggcctcccaaagtgctgggattaaaggtgtgagccactgtgcccagcctaattcagttcaaattccaagctaggggtttcatatcctatatgtgtagaacatgacaaatatttaccaaatatactttcattaaaatctgaaaggtgaaacctcaatttaaaaaaaaatctcctacttaaaaacaatgaagttttagtttgccacattatctttaaaatacaatatgccttattgtgtagcatatctcaaactttaaaatatttagtttaggccaggagcagtggctcacgcctgtaatccgacactttggaaggccgaggcggtggatcacttgaggtcaggtgtttgagaccagcctggccaacatggtgaaaccccgtttctactcaagatacaaaaattagcctagcatggtggcgcatgcctgtaatcccagctacccggaaggctgaggcaggagaatcgcttggacccaggaggcggagtttgcagtgagcccagattgtgccactgcactccagcctgggcgacaaagggagactccatctcaaaaaaaaaaaaaattactttaaatgtgatttaaagcctagttgttaaagtgtaagtgttctcaaggactttaagatgtctttatgccacagttgtcaaatataatatttctagaatttaaagtcattttttagcactaaaataactacatgcagggcggaggtacttggacaaggaaggacctaaaaaaagtgttcatcaccagaaagtttatttgttcatcatcaccaacattaagaggccaatggccaggaagaagccaattgttgaaaccattctaaaacgactgtgttgcttgggaaaccagagaagttggtgaacatttgatgcgccgaaagccacatcactcaaattttctcgccctccaaatctagcaaagaaaaagagagaggaagcagggatagaggggaagagggggagggaggggagagagggagaaaggagagaggaaaggcaagagagagagacacacagagagggagagagagggagagggcaaaggagaggagagggagagagaggagagagaagggggggcagagagaaacagaggagagagaagaggggagagagagagacagaggagagagaagaggggagagagagagagattgagagagagagagagaagaatgagagatgggcagggatctgtccaagcaggacttgagcgccaagccccgcccctgtttcccaggtaacctgataaacagactccatcttttcctctgtgaactcggctaggtgttaagaggcaggcaggaagcaatggacagggagtccgagtgaggttgtgctctttcctgagagaggggttccgcaagggattggaggcgtctttgtagccaggtacagctttccccttagagatgagcgctcttggagaaatgagaatggggagaaatcgtccatga

SEQ ID NO: 29130 - DNA, 2300 bp, Homo sapien
atggcaacacacaggcaatattcagggaacacagaccagatacgtgtgatcagggaacaaataaagagtatggggagaggaattctatagaaatagaatgaaagaaacttgggttgggactagagttaaagaactttagactgtcaagtaatgacatagcattgaacattttttagtagagtggctaaaatgtaaagaatggacagaaagaacagcagtatgcattaatttcagtttatataaacactaccatggaccaggtgttgggattagacttcaaatttggggattagataatttgttgatagaatggacaatggtttgtgaggagaagaaagaggtgaagctgattctgcagttccaagtctgggtgactgggaggatgttaatgccagtctctaagcagaagcaggtttggagtggaataggtttcgttttgggcatactgttgacatgacaaaactgatgtcacatatcctatttcctgactcctcctgggattgtcccagagctattaccatgattaatagttcatattgaacaactccttgagaataaaatgccacaggtatcatttacgtatgacacattacgttcttctggcaactaggtagttgatctgaaagacgggctgttcaaagttcaaatcatcttaattgcacaatgccgccgactgtacgcccataagataccttaacccggtacacttcaaagacaatattctcgcccttacaacagagctatacattgtaaactgcaaactgaaaagtagcctttattctgaaggaaaatcaatttaatattcttccactaaattatcaaaacaatttttttggcggaggctggggagggggtggtggctgaagcctcgccagagactgaatgtggtgtgggattcaactaaagcagcacatcttcagtaggtcccccgtggagggtaacgaacatcttgggttgtctttcaccagaattgtgttcaacaactcacgttctggagccaacccgccgcagatcagaatccagcttctgcaccacacagccgtgatctcggacaagttactcaatctcttgtgtctcaaattctttacctataaaacatctacaactagaactgaagacttggctgccaggcactgggctagacatagatttacagcggtgaggaccaccaaggggagctaaaattcgaatgtagggaacagacgattaacaagttagtttcagaatgaaagactcgagtgtaagaattcaatgggataattcctgtaaagcgtttagtacagtaaagagcgaagggaaattctgaataaaaggcagacactattttaggatttggccttccccgccccctaccaaaaccacgtaaactcttaacagaagcgacttcttattgtcaggcgcctaaaggcggcttttgggatagggagggtcctttcttcctccttggggtaaatgcgatttagcagcctttaccgacctacccaaccccagggccattttgtgggaggaggttctctcgtgctagacaagttccctctaataaagccccttagccgagatgccaggattggggttagggaacctcgccgctcccacaagggctgggcacaaaaaacaaacaaaaaaacacaagttattttgatcttcccccaaagaatagtaaaggaatttcccccgaccccggccgccaggagcccagagaccccccagcctaaataacaatggcgctggagagggcgtggccgcgcgtacctggggtgggggaaggggagaaaggcggccagttcggatctgagccactcgcagggtcacgtgacatcctgcctcgccccgccccgcgaacaaacctaggcggggagggattcgggaaggggcgaggaagcggaaggagcaggcggactggcgatgatgggaagtgacgaagtggcgcagttcgctgcgtgcagcgacgtggcggcggggccggcaccgggcagcggaagtggctccggcggtgggacttgagtgtttgtgttttggttcgtgaaggagccggcggctggccttaggggaggaggcagagggaggaggaggaggaagaattagtcggaactccagcgccggcggcggcggcggcggcggaggaggagaaaggaaagaggaagggggagcggcgagaggcggagacggagcccgacaggggcggcaccacggcacgagccccgcacagtccagtgtgaggggagcggcgctaagagcaggcgacgccgccgccgccaccaccaccgccatagatacactctcatcctacgggccacgcc

SEQ ID NO: 29131 - DNA, 2300 bp, Homo sapien
tggctataccaatttccgtctgggcaaactctttaatttccaagtttctattcccataatatctaacttgcatagctgatgtgacaattaaataaaacaatacatgtaaacaatctctaatatacatagtagggattgaaattgccaataatgtgctcctttgataagaaaatgataaaatatcaatagaacatcatatatactgaaaatgcaccaatacatcttcagatattacacacaatcaaaacattttccatttgtctttttatttaagaaaacaagaaattacttatcaaggacaatatgctccaaatttctacggcacttccaaaattttagggaaaatatcagactcccattaaaaaaaaaaatcaaacaagattctgatttcactttgacttttaaggtttaaagctacttaattgtggctactccccctaaggatctcaaacaggaaataactaaagttaatggtaaatatacacttagcataacactaaggttaaaaattacgtgcattcatttgtattcactgcttactgaaacttctgttttgcaaaacaagaattttgcataatatacatttgtaatcttttgaaaataactgttattcattctatagttaaaatccttctaagggttctttgatcaaaaaattgactgggcacttattttgtgccaggcactgttccatttactttgtttatacaaatgctgagttatcacttccattttactttaggaataaagtttatgagcagtcttgagtattcccagaggtgtacaagtgtttttttcttattatgtgaaaggcaactgattgaacgctttgattccatttaagcaagacaaaaaccaagtatgtgaactatgacgttcagaacttaacaagtttgaaagtctcagaggtaagcagcttccagggaagataacgccagagcaagttccatggtctctacccagtgaaggagttcagcggtcctgttatcttgaatttatttaacgctgtagttcactaccttccaaacagaaaacaagtctctagacagcctattttgacgagcctcccacccaccgacactactcatctttggaagttgaagataggcggagctccccacattgacacctgcagtaggcccaggttcctgcttggagagcacctgagtagctaatagccaactacagatcgcctggataagcagcactcgccaggtcccttggcctttccaacctcctcccccgaacctgccttgctttgaccgagacccccaggactgccaggacggagaccaggcggaaccgcggcctccagtacactttccacggcgccatcttgagaagggaaagggtgacacccgtcgctccctcagtcagtccccaaatcccggtctccagagcccctggaggatgagtcaccagggctggcagaacaagacgccgggttcgatagttctctggtccagggcactgctgcgcgtgagggagaaggggtggggggtctcagtaccggcagggccgcggacaggctggggaccgcggataacctggggtccaggcccccgctgcgcaggaggaggggcggttcggttacctgagaccgcagcaagccgagctgcggggccgaagcttcctggcagcaaggcccaggcgtggcccgtaggatgagagtgtatctatggcggtggtggtggcggcggcggcgtcgcctgctcttagcgccgctcccctcacactggactgtgcggggctcgtgccgtggtgccgcccctgtcgggctccgtctccgcctctcgccgctcccccttcctctttcctttctcctcctccgccgccgccgccgccgccggcgctggagttccgactaattcttcctcctcctcctccctctgcctcctcccctaaggccagccgccggctccttcacgaaccaaaacacaaacactcaagtcccaccgccggagccacttccgctgcccggtgccggccccgccgccacgtcgctgcacgcagcgaactgcgccacttcgtcacttcccatcatcgccagtccgcctgctccttccgcttcctcgccccttcccgaatccctccccgcctaggtttgttcgcggggcggggcgaggcaggatgtcacgtgaccctgcgagtggctcagatccgaactggccgcctttctccccttcccccaccccaggtacgcgcggccacgccctctccagcgccattgttatttaggctggggggtctctgggctcctggcggccggggtcgggggaaattcctttactattctttgg

SEQ ID NO: 29132 - DNA, 2300 bp, Homo sapien
atggggtgatgttggtctctgtattagctagggttcagtcagtaaagcagaaccctaggcattgtggaataaaggatttattgttaaaattagtttgtgggagaagctggtcaactaaacatctgggaagaggagatggggcatcagggaagtccccagccagtcagtctgagaagccagggacatccagatgcccaagctggaccatgaaggagaagctgatggggaaggctagaggaaatgtttgcttctgtgggcccaaagacgggtgccagctaataggcctggggctgctattggtcagcaagacctggagctggaggaaaagctggaggcagagtagtggggaacaaaggacaagcagaaacctgctaggcacttcagcatctgtgggtgaactcattggatgatgatagcattccaatataaacccctaagttttaaatattaagattcccttcttggccaaatttaacctggaaccacacaggaaaagggattctctgagacgttccagttaaactaagttgatgatcaaagaagattctggagggaaggttagtgagttccattttgaacatgttgactttgatacctcttcagggagacacctagttgacagttgggcttgtccaaacttcttcagcattcaggcaacctgctctaggactcttgttctaactcagccttggggtaagggagtggcatgcagctgtggattaaacatttgggaactaaagatattagtcaggagtgaaggcaggggaaagagtgaaggcagtccagtcaagatctacaactctcaggcagttaattgagacagcaagatggggtgggcaggctctacagagcagatagaggaggtgtcctcgagagatggcctgaggtgctgtaacactgggtgggaagacatcccatctgtacagtaaggatagtctcctaaaatggctatttgaaagtgccacaagttataaaaataattgacagtcactccttttacattttcatttctactacataggcataagacagtttatttatttattttaaagacagggtctcgctctgtcacccaggctggagtggaatggcacaatcatagttgactgcagctgactgcctcaaactcctgggctcatgtaactctcctgcctccgtctcctgagtagctaggactacaggtgtgtgccacaatgctcagctaatttttctttcctttcttctttttttttttttgttgaagcgatggggtctcgatatgcgctgcccaggctggtcttgaactccaggcctcaagcaatcctcctgtcttggcctcccaaagtgctgggattacagacatgagcccctgcatccagcagtaagatagtatatatatatatatatatatatatatatatactgtatatatatacacatatatatgtatatatgtgtatatatatatactgtctatatatatacactatatatatactgtctatgtatatatactgtctatatatatacatatatgtgtgtgtgtgtgtatatatatatatatatgcagagagagaaaaacgaaagacctcacatatttattactgaacccagccaaccagtgccttcatagcacacacagaaagaaaaaatatagtcccagtgaaacatgtccaattgtccagatagtggtaacattttcagcttgatatggtaaggtggtcgtgaccttcacacaacataaatatgtgcgccatctcatgtggaattccttatagactcagcttggttcttctccaatgtctccttttgaagttctactgattttattaccagttttcatccaaatccactggggaatgggacaattttgcttttgtttcttggccaggaaacgcttaatcctgaaggttttgtgagaagacatggcgagaagcagagtcaagcacacaccatgatggcggagaaaggaagagtaagacagtatatttaacaaatgctccttctttcagaaattccaaagtttacttcatacaacttgtgatgttattgcttcacagtccttctgaatcataaagtgagttctgactgaggttccaggtgatgtagtgaacattccacacagggagctctaccatcaagtgaggggaatgcccaccatcgctatcatcaccatcaccactacttctgccacagccatcacattcacctctacctccaccatcaccatcactactcaagttggagaaatagaggccaggggaaggggataaagggagggcaaagaaaggtaattccaaaggaacatgagcaccaataat

SEQ ID NO: 29133 - DNA, 2300 bp, Homo sapien
tgtgcacagaaagagcacactgaatgcttacaacaacctaattatggaaaagcaataagcctcctgaatcctttgcccttgaaatttccttgcctggtgctcataacacactttgaataggtcttgaaaccacgggccttcagcctaaggcagtatgtcatctgggtactctgagcagggaaataatgaaaaataatgttcagttaatggcacaagccattcgccactcagacagtgatggttttcagagtggattgaaaggagattggctacttctgcttcaaaacatcctggaaattgtctgcctcctgaattctgagggacgcttgggaggaggagttgataggtgacttaatgttaaatctgggttccctcccccaattgtcactgtgaaaattttcaaacatacagaaaagttgaaagaattgcgcactgtgcccattacctagactctattatatggacccctatttgctttatcatatctctgttcatccaccctttacccatgcatggaggcatccatacatcttatttttgatgtatctcaaagtacaaagagcaccattagagttcaatgcttgtgatttttctttttttaaaaatttttgaggcaacatttatatccagtgaaatgtacagatctcaagtggatcattccatcagtttgacaaatgcctgcaaggtggaacccaagctcttattagtatctgttaaatccatgttagaggttgatcagagaagcacagcctttaagactctcaccctgctttgcggagaatggcaaaaatctgcgaaacatctcagcagagccaggagagagtaacactggtaacgtgaagcacgtcaagctaagaaaggaagcactgaaattaattgtcctgaatggaacctgataagaatctgccatttcatcccctcaagactggactcaagttgggagagaatattgccttttgccctgtctaagctaatatcactgtttagatctacaaactcccccacctcccaatgtttatatattaacctgcattacaagtcaaaataacacagagaatctggaaaaagaagaaggggaatgtttcccacgaaaagcacaccccttaaagcgtctggcctgagagctatacagcatgcataaaatctgataataagcacattatgacccacattgcatataacaaaaagtagggcacttctgaagggtcctgagaaaaagccctgggcttttaaaacctgcttaagaaggcgatcaacggtacaccactttcaaacgcagcactgacttgtatgctccacagtcatcaacagtgaaaacaacagttttcaacaagagttggaaacactgagttgagggttttttttttctttttaaagtttgaggccaaaatcgatatttattcttttgaattatgcttatatctttttcctggttaatacgcacgcggtggcacaattttgaaaactacgtaacgttatagaaccaccacccagaaacgaatcctgttaacaaactttttgtattcaaactttttccactgcatagtttttgacaatgctttttagacaatctttcttttagcaaccagcactttcaaacaaaaattacagagaatagtaagtttttttcccctcctccggcagatttgacccagaaattgctatgggaagaaagtgttaattatattaaaaaatagtttgacagaaagtatttaaaaagagaaagggagaacatcacgtctttattttggtgaattagcaacaaagaaaaagattagcatggacgggtacttttcaaaaatatattttttttcctctggctcccgctagggtggaggaagttgtctctctgtcagagacagggtggaagagagtgaaaggacaaatgattgagaggctgccccctcccactggtgcaggcgtgcgggggtcggatggggggccgcggaggggggaggtggccagcaggtgcctgggctccaggcccctacccccaccctcgtccccaccctcacccacacccagggattggcctcgccccctggcgggcgagcggtaggtgtcgaagcactggggtggggggtgcaaaccccgcgggcagcggaaaagaggccgtggggggcctcccagcgctggcagacaccgtgaggctggcagccgccggcacgcacacctagtccgcagtcccgaggaacatgtccgcagccagggcgcggagcagagtcccgggcaggagaaccaagggagggcgtgtgctgtggcggcggcggcagcggcagcggagccgctagtcccctccc

SEQ ID NO: 29134 - DNA, 2300 bp, Homo sapien
gtgtcctttggtttcctttgatacagaatagatgtattgatttgaaatcgaattatgaaatgatactaaaggaaagaaaaattataatttaggaaaatactgaatttgtttttattacataattgttaaatttctgtttttcattggtattttctaaggcaaattcctcttgaagaaactgaacttccaggacaaggagaatcatttcaaatagaaggtaattcaagtgaaaatctaaaaatattattaagggcaaaataaggtctttgagaacaaataatacaattaaatttatctaattctttttttttaactttttaaatttgttcatctggtattctgctcaaagcaaatctgtttattttacacagagtaatagagtgttaaaatatatttattgtgtcaaatctgtaatctgaatctttggctataactatggcagcaatttactgattgctactacgtgtcaagctctatgttaggcattttatgtgcataatctcacctaaccctcacaacaacctaggactataagtacagttagtcctgttttataggaactcaagaaggtaaaatatctcacatgaagaagtctagatgttaacagctagcatttaaaatcaaagttgaactccaaagccatccctttcttactacttttaaattgatatgtccatgttctcaagtgtcaatctcctccacttgaaccaagcattgaagaaaggatagtatttgaataagcaaaaccagacgtcgaaggaaggatagtatttgaataagcaaaaccagacatagccccacttttccttaaaatacaaattatatttcttacctgagaagctttctagttattcaaatcttatttatttttcaaagaacaacttagctcccactttctcatttgtcccactttggaatatgcggttctacttctctgaatctgtactcaatgatacatatagactattcattttctttaaaccaagagcacataaaagcctgttataattttttttttttttgacagtcttgctctgtcgcccaggcttggagagcagtggtgcgatctcagctcactacaagctctgcctcctgggttcacgccattctcctgcctcagtctcccgagtagttgggactacaggcacccaccaccacgcctggctaattttttgtattttttttagtagagacggggtttcactgtgttagccaggatggtctcgatctcctgacctcgtgatctgcccgcctcggcctcccaaagtgctgggattacaagcgtaagccaccgtgcctggcctataatgtttttaaagattataaagattgaatgtcccttatccaaaatgcttgggaccagaagtgttttggatttattttttaaattttggagtatttacattatatcagttcatcatccctaatttgaaaatctgaaatccaaaaccctccagttagcatttccttggagcatcatgactgcactaaaaaagttttggatttcagattttcagattagggatactgaacctgtacaagattctttcacatgtcagatataagccatcagttgatcactgacaagtaaatagatggtaatatttaagttcccaggtttttatttacagattttataatgtaggaaaactacagaatgaccttttggtcattcacttttttagtttgaattctaaagttcttgaaattcaaatttccacaaagtaaaactacttttctcatttattttttaaattctcagatcagatacctactattcctcaagacacactgggagttgattttgattcaggtgaagctaagtctactgataatgtcttacctagaactgtatctgttcgtagcagtttaaagaaacattgtaacagtatatgtcagtttgatagcttggatgattttgaaaccagtcatttggcagggaagtcttttgaattcgaaagagttggatttttagacccactagtaaacatgcacatacctgaaaatgtacaacacaatgcttgtcaatggagcaaggaccaagttaacttatcaccaaagctgattcagccaggaacgtttactaaaacaaaagaagacattttagaatctaaatctgaacaaactaaaagtaagcaaagagatacacaagaaagaaaaagagaagagaaaagaaaagctaacaggagaaaatcaaaacgtatgtcaaaatataaagagaataaaagcgaaaataaaaaaactgttccccaaaaaaaaatgcacaaatctgtcagttccaatgatgcttacaattttaa

SEQ ID NO: 29135 - DNA, 2300 bp, Homo sapien
gttctggacgcgcctgcggcaggagggtcgccgcgtccacttccgccagccccacctccccccggccttcctggagtccctgaaagaggaagaagtaggttttaaggtgcgaaacaagggcgtagtgatccctgtttgacttcccttcggttttcagtatcattctaaattcggtggccgaaagctcgggccgtggagtcccactcgccgcgcttttcgccgttcagccactcgatctgcgctttcagatgttccggcttccatggagaccctaatttcctactttgcaaaattgtgtagattaagtgatgtgcaaataaagcttttacaatagctaaaagcctggctcaacgtaaggacacaagaaaattgacagcagttctttgtgcagcgtgataccgttgacgtcctccttgtccaggccattctcttcctcacttaccctggagaggccggcactgactagtatcctacctggctgtcttcgcagcaggactaattggagaattatggacggagatcaaatatgctaggttctttaaatccagagcgcttacacgagtactgtacagattgagaccgtcatctcgcgctgtggtctgtctttgctttcatcccttctgtctaccacaccccctgctaataaccatcgccttatttagacaggatataaaacttttgatatggcaagtttcttttgtgatttttaacttgattaaaagtaataacgaaagctttttaggtaaggctttgcctttaaaataccttaactaaactagatccgttacttaatctgtatgactctcaaacatctccaattctaacttaattgtgtaaaacaacccctttaccgttcgtgcttttaaaaatagctaccctatctctgctaggaacctcccagtacatattgtatataccttggtagaaagaaagttcttaagtggtatctacaatacctatatttaagattccagacactgcatagaggaaaataaggcctggaggaaatactcaagattaagtgtaaggtttaggaaaatatttgactatcgtagaggagatgaagatatcctttgtagtgaaaattctgtgcatagattgttattggaaacaagtcttttttttttgcaattttaagatctgcaaagtgcaatctagcgtaaaagatgtttgtgaaaagtggtttgacatgtttagtagcatgctaaagcctacctgatttgcaacgttgaaagattaagtatagttatgtatttaatactcaacgtttaactgtatgtacaacaatatttaatgtctgatttgttatgttcataatttactgggagttaacagccctaacttttagccacagtttgagaatactagagtgttcctctgcccaagttcctgctctagctctgtacttgttacaatagcctattaaaattgtatgtagtgctacatagtttaaacctctaaggagtaccttgactttcttgagactgtgtgcatatcataagtgataattgcgtttaaagagtatggaaaaatagttgaatgacctaatctgatgaattaatcattagagaagagctggaaaacaaaacccaaatatataattgcctcagaactaatgctgtaagcttaagcagtaaaagttggtcctaaacattttctataaaaagtgtaaataatgcatcaaaatataataataagcattttcaatagtgtctggcatataccccacagtgagtatttgttaaagaatgaataagtggcatattgtggaatctttgggttggaaatctatattcaataaaccttttctataaagtgcctgaggaggaagagagaatatcagaaatatgaatgagattttaaaaggggaaaatttatattatcaagttggttaactatctactttgagctaattctacagtttagtctatttaatgcattctttatgaacagcctatgttttttaagttttatatttgataatattctctctgagaaaaaatattttttattgtttaggcaaaagatggccaaggaaagatgcctgaaaaagtcctttcaagatagtcttgaagacataaagaagcgaatgaaagagaaaaggaataaaaacttggcagagattggcaaacgcaggtcttttatagctgcaccatgccaaataatcagtaagagatttttatgttgtccttttatatcacttttaagtttagatttaataactgataaatttttttatcctcttttagccaacacttctacactgctgaaaaattaccaagacaacaacaaaatgttag

SEQ ID NO: 29136 - DNA, 2300 bp, Homo sapien
caacatggcaaaactctgtctctacaaaaaaatacaaaaattagggggcgtagtggtgggtccctgtaatcccagctacctgggaggctgaggcaggagaactgcttgaacctgggaggcagaggttgcagtgagctaagatgatgtcactgcactccaacctgggagacacagcaaaactccgtctcaaagaaaataataataatttcaagagggcaagggtgagcccttctgagcactttgtacttaggtccctaactacaaaataagtggttcatggaggccatttagtgcgcatcctgaacattgtatgacatggggcaagaaacagtgacagacacacacattgcatgaatcacatctgctcacaagattgctccattgtctcatcagacatcacttacaaaacataagttcaaatataaactcctaagcatttcaagacggcaacagcagagcattaaaccaaatgtacagcccttctaagcaccggttgcctgctcatgaagctggccctattctctgctctcatgttccacttcataattttctgacctcaaacaacaaaaaacctctctgcccattccttcttgatgcttctacacatataagccacattgcccagtggcagtaaactgagggttaatggagttggtctggttaacttggaaaacgagggagttgttggctggagaagggtgtttcagcctcttccactcaagccaggatgggtacccagactagagcaagcatgtgttagctacctttaaaaaacaacaacacaccttcataaagaatgcctagattcaaaacatttgtttcgttttcatttatttgttcctttattgtcccagtgaatatttactacttacttcaaattgcaacgagatgctgacaatttagctatgaacaaagcagatgtagttcctgcccttattcaacttcaagaaacaggcaatgaacgacaagtcagtgtcacaaggaataccaaggggaaaatgcagggcactaagaaagtgtaaagcagacactcaggggctttaggggtagataagtctttctggaagaattcatctgtacagtgaaacttcagtatacataggagtaagttcggccaagggaaagagtgttcttgacagaacagcattggcaaaagtggcaagaattttaagaaaattaaagaaaatgtacaagtgatggaaccaggaatcatggggctctttaaggacaaaatatcttaaaggagtttgaaattcaccttaaatgcaatagggagccattgtaaagtttcctatttgatacttgttttgtaaaaatattaatctatgaagaatatagggagtggagtctgcggtcagagtgggtactagtgcaatttagggaatgagattaggctggaagctggattggggggaaaaagatgggcatgagagaaacttggaaagcagagttgagaagatcgtgtgaccgactggacgggcaaaggttaagagaggataaataatcattaaggacgatttctcaggcttctagtcggtaactggatggatgttggtgccatttctcgagaagagttaaagagccagagatagccggcaaagagaaacatggagctagaattttcaggtatctgcagtttccctaatacctttttaatccagaatttgctccttgttttggttttaattcctctaaaagctgcttccgtgttgcaagctggctgaccgctttaacaggcaaccaaagagattcttctcacaagagggaggctttgagcacaacccgggacatttgaagctgtcagactgaagaaacaggaagctttgaactacctatcacactcggccttaaaggtttcggagtaactccacccgtaaaatccccacgactctgattagaaagtcccggcgggtcgccgagacccgaccgcaggctccgccccagggccaggtggatgcccggatgtggacttgagcgaatgtgcgtcacgtgacgtcgcctggcggggcgggactctgcctgcgacggtggtgttgggtgcatcctgcgccacgtgaccgcctcccagccaaccaatggaggagcgaggcggaaaatttcgaatgtggcggcggtagttccaggcgacggcggacggtggtacggtcctggagggcccagtgcgcggggctagccgtggctggagagcttcgaagagccttgaaatgtgaggaggaggaagatagctgttgcagaagtagtggccaaggtatcgttctggacgcgcctgcggcaggagggtcgccgcgtccacttccgcc

SEQ ID NO: 29137 - DNA, 2300 bp, Homo sapien
gggaggcagagtttgcagcgagccaaggtcacaccactgcactccagcctgagtgacagagtgagaccctgtcaatagaaagagagagagagagaagaaagaaagaaagagagagagagagaggaaaagaaaggaagaaaggaaggaaggaaggaaggaaggaaggaagaaagaaaggaagaaagaaagaaagaaaggaagaaagagaaagaaaggaaaagaaaagaaaagaaaagaaagagaaagagagaaagagagagagagggagggagggaggaaggaaggaaggaaggaagggaagggaaaaaaatgtacactttatcaaaaaggaagcagattcattaagagtactcatatatgctacaagtaggaatatctctggcaaatggttcactcatgaggagaaggagccagaaatacaagattggcacactaaagcagaaaagagaaagggatgctaactcaaaacaggcaacaggctttcacttcagagaagtggccagatgagcaaggtacaatgtccaaaggaataataaaataaactgcatcacaatttcatttccaatcagatctatcttctagtgtattaattccatcttcagctgagtcaaatcttttcaatctgtctgctgagtttttaatatcagtgactatattttttatttctaaaagttcaatttggttgtatgtatttctttttttaaattttcttggtctttttgatagtgtttttttttctttcatgctttggatttcctatttatatccttaaccaatttatgcatatttattttctctttgctattcaatagttcttttatgtttttgatagtatattactaaagcttatcatgtatgctgattctcaattgtggcatgttgttttcttctgtattttgcaattttgtattatgaaatcttcagcagcaggattctattggcagtaattctatcgggattgaagatgttccttcaaagaggttttacatttacttcgccaatgctcagggttttacaggctttaaagaaagatattggtggctgcgcacagtggctcacatctgtaatcccagcactctaggatgccaaggtggttggatcacataaggccaagagttcaagaccagctggccaacgtagcgaaaccttgtctctactaaaaataccaaaaaaaaaaaaaagttatccgggcatggtggtgcacatctgtagtcccagctagtcagtaggccgaggcaggagaactgaggccgaggttgcagtgagccgagattgtgcctaggtgacccagaaagactctgtctgcaaaagggaaggggaggggagtggaggggaggggaggggaggggaggggaagggagaagggaaaggaaagggaaaaagaaaagggaaaggaaaggaaatcaggaagctttctgggtaaaataatttgccatattgccggaaatagaagtagaaaatggtagcatgatgccacaaatttagcaggatgtgttaaaactaagcatcccttttttcaccaaactgatgaaaaaaagaaaaagaaaagcaaactaagcatttcaaatctaaagaaaaactactacaattattcagggatttataaagtcacacaacactaatatagaatcttacaaagtatcatgaaatatagtaataaaaatgtagaagcttctttagagatttatcattttaaagcaaaggtaaaaagcacagccacgtccattggggcaacacttgttctttctgtcacggtaaaaatggctgaaacaatacaaaagaaagagcatatgatgaagcctaaatgcattcctttgtcagcaaatattgttagatgatatatagaaaacattatagtagattgcagaaacaaatgttggaacaaattatgtagtgttgaaagtttgctatatatttagatgaagcactgatgtttctaacacattttagctatggtattttctggattctgtttccaataataaaacacatgaataactgcttttttttgtatgtgagctgttaaaaaaaaaacaagtaatattttccttcaataataaatggtttcttttagaaaaactatgatacatgaaaaattgtggccgggcgcggtggctcacgcctgtaatcccagcactttgggaggccgaggcgggcggatcacgaggtcaggagatcgagaccatcccggctaaaacggtgaaaccccgtctctactaaaactacaaaaaattagccgggcgtagtggcgggcgcctgtagtcccagctacttgggaggctgaggcaggagaatggcgt

SEQ ID NO: 29138 - DNA, 2300 bp, Homo sapien
ttctcataggtcaggcataactcaggagttttgcagaaatttcagtgattgttgctcacatggaggttttaccctgcagtcaccatccaattgagcaaaaagcagttaaaaggatgcaataagggattcagccagcagagggcgggagagccacacccagttgcttggaccagttacacacctccaagccaactcgttctgaagacacaagccttttttttggtaagcgttttgctttcactaagtcccttctgacagaatgggcaagagtcaatctgcccggaattgaatactggctgcaccatgcgctagcttcatcatctttttgtgcctgattatttctcattggaaaaatgggaaaagcatagtcatggtgaggatgtcataagggtgttgcgaagatgatgaagttaacttatgtaacacattccaaacagtgcttggtaactacttgataaatattatttaatagtattataggctatccctttgccttctgtcttccatcctcccaagtctgaatgcaaaaataaattaatatggcaataggttatgtgggctgattcctcttcactctttgaaactcatctcaaaaagcgcaacataccttcgtgatatttctgccaaaaatgcttatgccaaatctaaccgcgagaaacagtttagagtagttccaaaccagagacattctactaaattcagggacattttttttttttttttttttttgagagacagagttttgctcttgttgcccaggctggagtgcaatggcacaatctcggctcaccacaacctccacctcctgggttcaagtgattctcctgcctcagcctcccgagtagctgggattacaggtgtgtgccaccacgcccggcttattttgtatttttagtagagacggggtttctccatgttggtcaggctggtctcgaactcccgaccttaggtcgtccgctcgtctcggcctcccaaagtgctgggattacaggcgtgagccactgtgcccagcgtaaattcagggacattctactaaataactagactctgcactttaaaaattacaaggtcatgaaagacaaagaaagaatctgaaactgttccagattgtaggatactaaagacacatgaaagctgaatgcagcatatgagctggggatttcttctgctgtagagtacacattgggacaattggtgaaatttgaataaggtctgtagataagatcgtagtattgtatcagtattgattacctgattttgttacttgtaggctacagaagagaatgtccttgcttttaggaaatatacaccagaatcttcaagagtaaatggggcatcataatttctgtaagttactctcaattttttttttttttttttttttttttttttttagacagagtctctgttgcccaggctggagtgcagtggtacgatcttggctcactgtagcctccacaccctgggttcaagggattctcctgtctcagccacccaagtagctgggattacaggcgtgcaccgccattcccagctaatttttgtatttttgatagaaacggggtttcaccatttgactaggctggctggaactcctagtcaggacttcaagtgatccacccacctcagcctcccaaagtgctgggattacaggcatgagccaccgcgcccagccccaaattttttttgaaaaaagaaatgtatatttgtgtgtgtgtgtttgtgcgtgtatgtgcatatctgtatgtaagcatatttgatataatagcatttagtacatctggttaaagggcatatgagaattctttgtagtgttcttgcaacttttgttagcctgaaattacatcaaaatacaaaggtaaaaaataaaaccataaataaaaaatacaatcccagctctcaggatgcctccttctttaatagttttccctgatgtcccctgccttaccctttgccttaggtgggttaggagccctggccctgtgtgccctcagtctgtagcttctctctctgtcacagcactgtattacactgtattgtgaccacctgattatgtcattaaactatgagctgggacaaagaaggcaggggtgctatctcattcaactttgtatcacctgagcttaactaacacctggcacagagaagaaacatattaaggatttgctgagagaataagatagtataacttggtcttatatctaaggtttgattttctaggaacctatagtgaattttaggcttgcttttcagtttttgtagcagggatgtagcacaggtttgggactcagcacacctag

SEQ ID NO: 29139 - DNA, 2300 bp, Homo sapien
cctgctgatgtatttgtgaccatatagatatatttgtttctagaacatgcagtgacattgttttattgggggtgacttttacctgagccattataaatagcacatttatttgaagaaggaaacctgttggagaactgtaatataaattcaacaaacaaatagtaagacaactgtttcttactcatcacatcattaagaaagttgcttaacatctctgagcctcaggttcttcatttgtgacatctgtaatatccacctttctatatctcaatttgttagtaataaagatgacatgtgaaagtgccttttaactgtaaaatgtcatgcaaatgcaagcgtgttattaatgattaaggtagtcctttaatgtttcaaatctcctatttgaaactcaactctcaatgcttgcatcttccaactacaggaactcaaatggacccaaagcactaacattaaactacagtgccccctagcacatgtaggaggtcaaggcagcttacaggcttcatgaataagctctaccacagatggttcttttgcctgagggaagaactactaattgtacttttggacaatttccatttgtccaaaaggaaaaaacatttacgcattttcttcaatactttcccgtaacattgtttttattttaatttttaaaagggagtaaaaaagttaatatcctttactatgtaaattttcctctggtggctttaaattaagagtatttctaaaagaacagccctagatttatcttaagattcactgtgatgtttctgatttatatttgcttacctactttcactcaccaaattctttataatctagcgtgagagaggatattgttcattgcactcttcacagaggtagaatacagttaagcttttatgcaagattgcacagaaagccgttattatgagcttcagccccctagtttctatgcacattaaatccaccaagagatatagaatcgcgtaaggaaatgctatagaatattttaatatcaaaatgtagaaatctttgctatcacacttttataaaagcccagattaaaaatatatcaattgcattcttccatagactacagttctttgtttatatttggttcttaatttcataaatgtctatagaaatttataagttcaaatgttccagtacgtaaattggttcccaaagtgatgagtccttaggaaacggaacttgctgtatgagtttattttttccatgctgtgcatttaagtattaatcagcacagctttcagggatttctttctaatatccttttctatgtaagataaggactgcaattcattataccattggaggagccagaggctttgctaagctttgcctttcttgaccgttcatctcaaatttaatgagagcgttgtgtgtgtgtgtggtgggggggggaggggggtgggtgtgtgtgtgtgtggctatattatattggtgactggactctaactatggcacaatgttggttgcctttcaggctaatcgtctctccgtttcaggaggtcaaagatcatttcagcctcagtgtgctttctacctgcctactaagggaggcagcaaatttggtcctgggcaactgagaggtgacttttatcaccagttatttttcttcacatctttctatcaacataatagctcagggaacactcaagaaataaaaaattacacttcaccaagtactagctttctgggatgtgatcacttctaagtgtgaacctctattaccctagcagtggtccctggcgttccttttattcctcttatatataaacatcacaaaaaataacaacaaaccctcaagcccacagcaaagagaatgcaagcacggcaccatccctcttcgtactgccgttttaacttggtagaggaggttaaattttggagagaatggtggcattcacaggaggggcggggtaaaagtgttgtctaattacacgttaatggcagaactcgccttaaccacgtccctcctgcacagtggtgaatttctcctgtgtgttcctgtgtggatcccgacactcttctcgctttaagagagcctcccgcgcccctcactccgccccttcccaagtctctgggctcgtcaaagcttcccgagagccatggttggtccaggcaggcagtcggagcacctcgtggagcggctgctaacccagggtggggtggggtggggtggaggggtctgcttgtagtactctcagtcctgatgtcacaggcgcggcaaggacatcgcaaggaggagtcggattacagtaaggatgggcagtgcagcaggcagcccgagc

SEQ ID NO: 29140 - DNA, 2300 bp, Homo sapien
ctcaaggtgcttttacgtgggagggctgggagagggaggaaaaagaaagcagaagggggaaactaataaataagtaaaaaaatgtattatgtcaggtggtgatcatggagaaaaagcagaggatgtggataggaagttctgggggaggagtgggaggaaagaatgttctagagataggaaatagtaagtacacaggtcttgaggctgaggaatgcttggtgtgtccataactgcaaggccggtgtggctggaaggagacgaggatggagtgaaatcgtacagcttgaggtcaggggaatcctggctgggaatggtgggcacatcatgcaggccatgtatccatattttgcactttggctgttgctctatgatgggaagccactggaatttttgagaagaagagagacataatctaatctttgttttaaaggacagtcggctgtgtgtaggtgttggggagggaggaggcggagagtgggaggtagaaagatcaggtaggagataattattgagagatgatgccttagaccaggacattagcagtggggaggggagtgagacggagtggacattttcaccatatatttgtgaaaacagagtcaacagaatttgctgacgaatgtgatgctgagtgtacaacagagaaggttcagacatagggaagttctgaggacaaggatttttttcttttattcaatgtcatatatctaccacctagacagtgcctggtatcaataaatattccttgaataaatgaaaagggtaactgatttgtattaaacccattttgaacttagtaaatagcagttaaaacatctacagtcaaatgaagtactgtagcaaccataatttcagcaattaagcagtgaaagatcttccaatcctttcctccacaaagatagaagttaattttgctgcatccctggacaccccgttgccaacgacccagcattccgttggtaagtgaggctggaggttggagtgggagaaatttcgtggaagctaagttcgcaaagcaggtacgttttttttttttttttaaacggttatttgggatgaggagtacaacggaacctaatgttccctcatgccacctacagcactgctactgttcccatatccttcaactgggcatgaaggcagcttcccactcactctgacagtggtgcaccctgtacccccacccctctcttcaataccccagggctaaacggcccgaagctcctctctaccggctggtgcgcattctgggccagggcgagccaaaaggcagaagggccttcgtgctgcagtgtctggtgaagactcaggcttagcctggaagaagtttccaggccaacgtgaagttttcctgtcttgggtacatgcgagccccacgcgtctgcgagtttgggttagtgtgtcaacagggtcagtccccgtatctactttgcgaaagcttcgaggcgagcgtgaagtcaagggctgcggtggatgggggtaaaaggcctcctcgtcccactgcctgcaccgtcttggggtaacccctaacccccagccggcgtttccctttaatgcgcgtgcccggcaaggtcctcgcgtcccctcccctcaagccaccccgtcagcctcggtttcccccacttctccccgtccttgtcgttccttccccgtgggacgcccctcgctcacccccgtcagagcccagtctgcgcgcgggacccagctgtcactttacttttcctcgccgcctccccaccccctctcccgaccggcggggcagcccgcccgggcgcgctcccgcccccgccccctcgcggccgcgcgccggaggaggaggggcggggggaggagggaggcgcgcggcgccgcatggccgacgtggggctcgcgctctcgcggtctctcccgggcgggcgcgcaggcacgcgcactcgcgggtgcgcgcgcggacggccgggcggcggcggctcccggaggtggtggcttcactttccaggactcaggggcagccacagcgacagccgcgggcagcagcctcaggagccggagctggaacggccgggggcggcggcagcggcggcgctgagggtgagtccgggcgggcgcgagcgcggcggggacaggcgtggtcgggtgcgtggtgcgtgggtccggctttcggtgactagacggtccgcaggggacatcccgtccctggggcctccccagtctccctccccctcgcgcctgggcagctctctcccagggcttcggctcgagcctgcgacctgcacggacacccccccctcaggtattcgctcgggccgcgccggtgcctc

SEQ ID NO: 29141 - DNA, 2300 bp, Homo sapien
ttttccttataggaggagctgttagatttcatgatttctttcacaaggaatcagtccaacccaagcatcagtaacacaacacaaaatatcatgttctgttacaaaagaattcttattatagctggtaggcaatttatgcaaaccaatattaaagaaaaaattcacctactgtcctgatcacttcagcaaatcaaaccttttattttcctgtgatctctgctagttcttgtctttataacacatgatttttttactggttgtattcataatgtagacatatatttttaagtatcagaaatccaaattttcataggaggaaatttcaattttaataactatttttagattattttcctcatcctgagtttatttcatcttcttattgttttcttctgaatttacatcttttcatcagaacaaaaagaatacaatcagtttttcagaagtttaaaaaattttttcaaatatatagcaaagaatgtcatcatttttatatactctaccaggactcctgaaaccaaacacttaagaaaggttatgtctggaaattttttcaaaatctatatgcatttcagtggtggagaaatagttctgtctggaagcaggaggctgaaattatgaccctgaagatttcttccagcttttgaacttcttattctatgacaactcctggtagatacaggtttcctggtagggattgagcaagaagcatgcacaattactttatgagtcttgataaagctggaatttcaggttgatggttagaaggagttcggctgggtcgtgagaatgcttgttttcctggttactggatatgccatgggctgtatatcttgtgttgtcctgtggtaactgaagccactgttgctgtggaaaatgatggcagtttgaatgagataatttagagtgacctatggaaatctgaggctgtctccttaatgtacaagaccttgtatgtgtggcactgttgtatttgaatggcacacatctctttagttcccttcaactgaaatgacaaaaggtgagaaactgaatcgtaatttgatggcttaatattaaaaaaaaattggcaaaaatgctaaataaggaacaattcagaagaattgctgatcatttcaaaaatattatttgcatagcatttataggtagctaaagaaagagaaaaatggcttaatattttaaaaataatttggtcaatttagcgatctggggattctgcgatccccagaactttgcatccaatttccaaaaaccaaaccttacatctaatgtaaaatgacacaaaaaattctaaatccagtctaattcagtagtatatagcttattcccagtgatgtctcacattcgcaagcccgttacacgttggttttacctgtcaccaaaacctttgtatcactcttataaaaaaccacatcactttctataaaaagtgagtggaagaatctaatattgtaaaactgcacgtgcctcgcgtgacctgagcagaaaattcctagtttgggattttctcacaggcatacctaaactgacctctgctcctagcaggtaaattgctagaaggagaagcaagtgtcagtccaaagaaaacccttgttgtgtgattttttttttctctttaatcgctttttaggtggagtacccgctgcattctctaaagtctttgccaccaccagattaccaacgttttcaccaatttgccacctccctactcctctcctttccaaaagccctcattggaaagaactttctctcgtgacccccctattccatctagttccaatcactcccagcgccccccatctccatcggcttcccctctcccgcccagaatccaggttcccaaaccacttaagagaaaattcacaaccctcgcccccttcccgggcgtccggaggaggcgctggggtgggggtgtctgtgggggacagggtttcctggggtctcctgggtcttcctcgcgcacccccaggaggtgttgcagggggaggggagcgcgggtgggtgggaccgggccgggtgggggaggggtgagggcgaggaggaggaggaggaggaggcggcggcggaggagtggtgtgtgtgcgagcgtgtgtggctgggggaagccattgcctgtttaatagttgctgttgctgcacttccgcttctctcccagcgagagagagacacgagtggccaggcccagccgcagccgcagcagcagccgccgcggcggcacggaggagccagacacaaagagaggtacggggatccccccagcggcccgccgccccccggccgcgccgccgggcctcggggac

SEQ ID NO: 29142 - DNA, 2300 bp, Homo sapien
tcaaagatatcgtaatcccccaaacctgtgaatatgtttactttacatactcatacaagaattttgcgggggtgattaaattaagaacttccatacgaagatattatcctgaattatctaggtgggcccagtgtaatcacaagtgtctttataagagacacacaggagtgctggagaggacagaaggtgtaattggaagatgctcctttgctggctgtgaagatgaaggaagcagtcaggagccaaggaattcaggcaggcttcataaggtggaaaagccaaggaaataaatgtactctcccctagtacctccagaaggaacacagccctactgactttggttttagcttggtgatatttacagatttacagacctagtctgatgtacaaactaaaagacggtaaatttgtattattaaccaacaaagttgctgaaatttgttacaggagcaatggaagactaacacaatttcctaagcagtctctctgcttccattttttctctccttttagcctcaaaaggagcaatccgagttatctttttaaaatgtacgccatatgaagtcatccttctgttcaaaatctgccaatgaaatccaaagtccatgtgagaaccttcacctctccgacgtcatttcccactttcccctactgtgaatttcagccacactgcttccctgctgttcctctattaatcttgcatgctccagtcatggctcttctccctctgcctgaatcagacccctactcttactcccagactcctatccttgaagtcctttcttaaatgttaccttctctcaaagacttaacctggacactccattccaaattgcaaccctcagccgctaacactccctcatcacttccctccccttatcttttttccttagcatttaccaccaaacccaaaacacagcttacttctgcttactgcccatttccaagaaggccaaaaattctgcgttgtttcctgctgcatccccagcaactatgcctggcacatattagacacttaataaatatttgttgaatcaatcaatgaaccagatagagactcttaaaaacgtaaagctgtgatttaaaaagaaagaaagaaaaatatgatgtgggaaaaaagataatcaaaaccgctacgattaagagataatgattctcttaagcctttgccacatctgaacgcataatctggaaggaaattaaagccacatgacttaaattaaagccaagtgaaaatattctggagaaacaaagtaagccagtaacctatttctcaatttaaaaaaaaacccgcaacgcaaaatgccagcattttctcggcatttcttctctaaaacattcacacctgccaaacaggtcttggcaaataaacattctgctcttctgaaaaactgtggttctcatgttagcaaatttgggacgaaatccgtatgcagaaaaagcgccgggccgcccgcaatccacccactccatgacccttttttaggacaaaatccctgggcgctggggcctgctggaggagcttcacgcagtctggagctgaagggacacagcgagcgccccgacccgcgacgccccgactccgcgaaggcctccctgggaggctggggaagcgtcgggggatctctcagcgcagctctggggcccagatttctgcgcccgtcgtgcggtggccagagagggacagcgcagcgcggagacgcggagacgcagagactccgcagggggagagcccgcggtgcgtgaaacaaacctgttctctcctcagacctcaaagacagcggctccaccgcggtacgcggccaccggctttggagcctggaccccaacttgcctcctctcgcggagagacagtcgccgacgctcgcttagccgccgagacctcgccgccaactctctcacctctcgagacgcccaggccgctcaggctcgaatcttgcggagcagggggcgggacaatagcggccgcggcgccccactcggcagaactccgccaccaggcgcgatgccggaactacatgtcccatgacgctctgggaggccgcagctttccaccggaaagagggtggctgaggtgggggaggagcccaaaaggcattgtgggagtacagctctttcctttccgtctggcggcagccatcaggtaggctgcgttgaggatctttgctcttccatccgcctttgatcgtcttcctcttcagccatccaggtccggggaccctgcgtcctcggagataggtctccctcctgtgcggccagagtttggtcaggatgcgggacagcaaaggggtggagaggcg

SEQ ID NO: 29143 - DNA, 2300 bp, Homo sapien
agcaagtcagaaagaattttaattctcaactctagttcaccaccagacaagagtcttttactactcaagttatttactaagcatttctccctagactatcacaagtgtaatgagataatgtagacttgctaaaacaacacacatagactgaaacacatcattccctcttaatactccattcctgactagggcaggaatatgttaatatctgggtaacaaaatttagggtttggggaccttatctttttccatacaactgagagctcagcaacgtttagctttaaaaatatttagtatatattttaggctgtgcaggccacatttggtctcttctgcatattcttgccgctttaaagcttaggttccacaagtacttccagtatatacacacgcatttgtaacaaagacaagtctttcaagcaattactcttcaccaagattagtaaaaatcacaaaccctgttttatatacgagacagctcacctaagtacaatcagaaaagttgcttaatctctctctcccaccatccccaggcagtattcaatataactgctactcaaaaccatttacctctgcaacggactgaaggcttcgagcaaactttagctggttaacaccatgatggacaggcttgccgtaagttgcacccttaggaactgggcgttttcggccaccacggcgaacacgaatcctatatataacgtaacctacacacaaacacacacgaaattagtgattttataggaagccgtaaggcttaagactcaatggcttgtcactaatactccaccaaaaatacttcaacagtaagttaatgctatctaatagaaaaaaataaaacacatcccagtctttttcaatgcaccttaggctactcacacagggaggcacactgtttattttgctttagtctgaactcattcagatttgtaacctttgacacacttgccactttagacaacagtgcatacagtaactgaccagtgttgctagcttttttctgccaaagccctatgcgaagaaagacactgaggcagcagtgtcttcctaacagctggtttccaacttttctcgaatataattttatccaagcatccacgcagtcgatcacgtaccttgcttggccttgtagcccagtcggcgcgctttatcaggccgggtggggcggggagccctgtggagagcagagagctggcggtactgccagcagcggaccctcagaagaaagcgcatgacatcagactgcttctttctccatagctcctggatgtacttgtatgcacccatcttggcttacctgtgaaatcaaactgtgtattaaatatcatccgctttaagtacaataagacgactgtatccgtccatcttagttccccaacaaaaacaaggaaaccgccgggaatgaaaatggctctgcaccaactgccggggacagctagcccaacccccaccactgcgcccacggagccgcgttcagtcacttccgcaaccccagcacagagcggtgctcggcacgttttggtggggcgaattaacagaaccagaactgagcaccaagggggcgggtggctgcggcaggcggcgtccccaaggaggacctgaaaggagatgccgctgacatcacaggacaaggtactgctgcggccaccgaggattaactctcgaggaaaatgcatctaccccacccaaccagcagcctcactttaggctgccttgtcccgggcgccccattcgtcagccccacgcctcctccaggatccgggcccagctcgaattcgcgccgccatcacatcttcgctcaacccgccccgggggccgcctctccacccctttgctgtcccgcatcctgaccaaactctggccgcacaggagggagacctatctccgaggacgcagggtccccggacctggatggctgaagaggaagacgatcaaaggcggatggaagagcaaagatcctcaacgcagcctacctgatggctgccgccagacggaaaggaaagagctgtactcccacaatgccttttgggctcctcccccacctcagccaccctctttccggtggaaagctgcggcctcccagagcgtcatgggacatgtagttccggcatcgcgcctggtggcggagttctgccgagtggggcgccgcggccgctattgtcccgccccctgctccgcaagattcgagcctgagcggcctgggcgtctcgagaggtgagagagttggcggcgaggtctcggcggctaagcgagcgtcggcgactgtctctccgcgagaggaggcaagttggggtccaggc

SEQ ID NO: 29144 - DNA, 2300 bp, Homo sapien
tccctccttcccctctagcctttagtaaccactgatctttctactgtctccagttttgccttttcttcctttttttgagacagagttttgctctttttgcccaggctggagtgcaatggcgcgatctcggctcaccgcaacttccgccttccgggttcaagcgattctcctgcctcagcctcccgagtagctgggattacaggcatgcgccaccaccccggctaattttgtatttttagtagagatggggtttctccatgttggtcaggctggtcttgaactcctgacctcaggtgatccacccgccttggcctcccaaagtgctgggattacaggcgtcagcccccgcgcccagcccagttttgccttttctagaatgtcgtatagttggaatcatacagtacacagcctttttagagtggtatcctcttttatgatttcttttctgccttctagactgttcatattaacctcattttacctgtgtagaagtagatggtagttgatacatgaaaaagcaagcaagctacaaagcgtggcctggggaactcttccatcagcatcacatgagggtgataaattccagaagtagggaagaatagagggctaccgtgattagggaactgtgtttagaagggtttgggtatcaagacagccttggaaagagaagcaggacccacatctgtgcagggcgaagcaggtcaggttaagtcgttgaattttttcaaagtgtaacacgaagccattggagggttttcagcagagtaatcagatcttatttacattttaaaaataatactttgactgctggggagaagtgactgtaggaggacccaagaagcactctcctagttagggaaccagagcagtagctgaggcaagagataatggtttgctctagcaataccaacggtgagaaacagggattgaacatattttgaaggtagaatagctcagacttgctaatggattgaatggagaataaaaggctgtgagagtgttaggagagaaacataattttgctggcttcaggaacttgcagatttaccaaaacagtaaatattgatatggtgaagaaacctggggggtggggaaatagggtgttgcacatgtaaatatgtcttccacgtgacattttccccaccttctatagtgaagaatttcagagcaaactggaaagagttttacaagcaacacccatatccccatcgcctaagtttaacatcttaccatatcatctattcatgcctctatcagcccatcttacttcagtaatgcgtttaaattgcgggcatcaatgcactttcctcagaattcacctcagcacgcatacaatttatgtctagcttttttcttttgatctaaaatttacattcaaggtgaaacgcccagatcttgactgcacattagctgagttcggacacacgcgtacacccgtctaaaatctgagatgcaaaaaagcggcataatcaaacgggctgctggatgtaggaatctggagattagaagagaggtcttggcttgaaatataaatctgggaatcacaagaacataggtctacttaagctatgagattggataaaatcacctagagggtgcagagggaaagggaagggtctgtgccctcagagaccagcgtttggaggtcggtcgggtgggagcggggggtgggggtggggggcgcaagggttgagcaagcccgaaccagccggcccagccggggtcctgagaatcacccttgctcggcgccaagccaccgctttgacctaagagccaccaggttggggggcagggcgtggagaggactcccggccagaggcgggaaaggcagccgggaggagaggaaagaggaggaggaggggaggaatatgcggcggagggaaacggagaagaggtttacggcacggaggggaaaaacgaaggaagaggaggggctcggcaaggagaaggaaggggagaagggggaagcgcaggagaaaagggtagccggggagccgggaagcgggcgggagggaggggagcggcggggcggaggtcgccgcagcggccggccgagggcgggcggagggagggggtgtgtgcgcgggtcacatggtcgcggctgccctccccgtcagccgccctcgccgccgcggtgcgctggctgcaggaagccgccgcgccgccgcttttgttgtcagggacccagcgaggagcgccgctcgccggccgccgccaccctctctcgctgcagcctgctgtgcgctgcacggcctggggcccgggagccccgcccgctctgcccatgagggggccccgcg

SEQ ID NO: 29145 - DNA, 2300 bp, Homo sapien
cggcaccttccttcatggaattaacatgaggaacacatgtaaaaggcctggcacagagtaagaagctgatgattatttttttgtcatcattatactagaagagttccaacagaatggttcaaaccaaagtaactaatcctccctacccattattcacctcattttttaatgtgtgttaaggatccagtggtttctttgtaggttatttccacactaccttttgaatctcttaaccctactgaccagtagagcaacttttcttcaattcttgcttttccttgctccaaggaaagatttctttgctccacctctccaatttttttccaagtcttttactccactgttttcacttgttactcatggggcgaggagacatagagatgtcacgaaggacagtaagattacaggatcactggttgaatgtttgtcaactgataaccaaactagagggaagggtagaggtgtgccacacagcgctgaatctggccccaccttggtcaatgtttacaaaaattcgaaagttaaaaggcttttttttttttttgagatgggagtctcgctcttgtcgcccaggctggagtgcagtagcgcgatgtcggctcactgcaatcttcacctcccaggttcaagctattctgctgctcagcctcataagtagctgggattacaggagcccaccaccacgcccggctaatttttgtccttttagtagagacggggtttcaccatgttggccaggctggtctcgaactccttacctcaggggatccgcccggctcagcctcccaaagtgctgggattacaggcgtgagccactgtgcccggccagtttaaggcaattcttattagacctcctgcttactgatagatagcagaaactgtaaacatggtgggtaacagcttgtaacagctttgaacttaaggccaaatgaacgagagaaattttaagaatggtcattgtaaattcctacacttcaagtcatgcaattatctgcacaatgaatgaaatctaacttcataatagttcacgtgaaaggtcctagttgactgcaaggttactgtgagtcagcaaagcaacatgccaaaaatactaagcctgccagggaattcatttgcaacaggattcaagacaaagagggcaacttggaacttgataatcatccaaccacttccacaagagcctgttcacttctgggtgctccatcccaaacggcaacaaggatgatgagtgatcagaaaaaacaatgctgggcaaggacaaagagatgagaactgtaaatggaagaactgaagggggaaggggatggtcaacattcatccggaggaatttttataatgtgccttgctccacgaggcaagatttagatcagcgaagtattggaagagggctcaaaccagagaaaaacttcctaattgagccagcccttatgaggttactaaagctattagaattcatgctaaagggtgggttagaagaggttcaccctgatcacctctgaattctaacatgtagaagtttaattctatgataaactcataaaattttaaaaataccctcaaaggctaagtaggccgattaggtaatcaaaacacaattagatccagatttttgtgagacaacaggttaaaaaaaataagtaaattctaaaaatacgtaaataaaattagaaagtgactttatttttacttttggtgaaaagttcacaatacatttgttatcgaggcaagattcttagaggcgcattgcaactcaaaaaataaaacaaaagctggctgtttccataacctcactcacttcagatctacctcatcatttggggcagacaaaaggagggaagggcaccctgttgttccgttgcaatgtaacaaaatgtgacaagaaaaatatttataaagccaaattctcttgatcagattcaggaaaagtcagcgacccacaggttaatttttttttaatttaaatgaagaatgtccagtcttacatatggtgttggagtcacctatgatcacctgagtcatcctgaccatacgtgagctgcacgctcagctgcgggtgtgacccgtttactggaaaactccagcccgaagggatctggaagcagtttttaagactgtgtgtgtatgagacaggtcgcgtcctagagcaaacggttttttttgtaaacagacggcatcctaacaggggcggtgctacccagtctgcggggagtcgctcgggatcgaagcacctcagagctccttcgagcgtatcccttcgggaaagccccacgccttccccgaggcgcctcctccggcctgca

SEQ ID NO: 29146 - DNA, 2300 bp, Homo sapien
gcagtgagcaacttgagggacaaagtaatgtctcccaccctggaacaaagaacacaactacttactacttgctataaaagtagtagattcttcaagctcaatgttccttggctatgacacaaacccactgtgcgtatagtatacctctggatctgtgtcagcttgccctttgaatcttagtagcaaagggagctgatgctgatgctctttgctgtgatggtgagtaataaagttctttgtctctgacctaggagtctcaggtctttggctagcatcagaaataagagactaatactcgctggaaaatacattttaaacattaataggttaatttattagcttgtaagtagtgtaaaagaaaacccctcacctgacattttacagaactgttgaaaggctagatgcagtagcctaaataaaacacctggcactgaataggcactaaataaacacacacacacaattttccttcagcatctcatttaactttccttgactatcttagataaatagttcttgacaaaatcatgatggtggccaggcatggtggttcacgcctgtaatcccagtactttgggagtccgaggtgggtggatcacctgaggtcaggagtttgagaccagcctgaccaatatggtgaaaacccgtctctactaaaaatacaaaagttagcctggcatggcagcgtgcacctgtagtcccggctactcggcaggctgaagcaggagaatcgattgaacccggaaggcggaggttgcagtgagccaagattgcgccactgcactccagcctgggtgacagagcaagactctgtctcaaaaaaaaaaaaaaattcatgatggcaggaaggttgctccttcctttgcctttcccatataatatctcatatccatcccacagggagtggtaaagtaaccaaattctcctacaagggcttatagcagttacctctctggaggtataagtgcctgtaatagaggaaaactgaagaagatgcaagccatgggtctctaataatgaaatttcaaacattgggtgagagtagatatttgggggcacatctatactcttcaaactcaaacacaacttgccacattcattacccttccatcccgacaccggatcctctgaagtttacttcacatcaagggaggggaaggatggaaattttagaaacagagtttatgccaaaatacaaaatcattttctgataactgagacgatctatgtgatgcaaaagaatgtaacaaaacagacttgtcactggatgcttgtaacctggtctttacctccaaacatacctagaaacaaaaaggtgccttgctctctgcattagttttctatttctgctataacaaatcaccacaaacttggtggctcaaacaacacaaatttgttgtctgacagttctgtagatcaaaagtccaacgcaggtgtcattaggctaaaatcaaagtgtcagcagggctggtgcctctgtggaagccctaggacagaatctgtctccttgccttttctagcttctagagactatgctcatttcttagctcctggtcccttttccccattcctggcaggtcaagctcttctgacactgccatctctctggtttgccatagccagaaaagattctcagcttttaagaactcctttgatgacattgggcccactgggataatctaggataagctcccaatctcaaggtccttaaccttaatcacatctgcaaagacccttttgccagataaggtaatattcacatgttgggaagcgggggatgattaagatgtagaataattaggactaattgggacttggaggggcattcttctgctgaccacacttggcttctagaagcctcctgagattgactcattcccaaagatgttcaacttgaccatttctcaagagcattaaaatggctctaaaggtaaaacatttctaccgtggtgaggcaaatgaacagtgcccagtgatagggcatctttaatttttgttttaatttctatacattaccagaaaaaaataattacaggaatgtttctgagattctaagggaagccactcagtgccagtaaccatggtgatggaaattctgagaagaatgttaacttccattatgtgagagcagatgaaaccaaagccttgggcccacacagcaaacctttgggtagcaacgagttctagaaaaatggagcctaaggagtccagattgtttttccttgaaataccaagcaagtctaaaatgattactacccatgagatatatttttaatgatgttaggtttgggggtgtgtta

SEQ ID NO: 29147 - DNA, 2300 bp, Homo sapien
gcgagattagtgcagctacattctgagttgaaggaaatgcagtgttctgagggcccctttgtgtcctgatggctggaggacgcttcctcctggttagatcctcaagctccttgcctcattgacaaatgtctcctagtcccctttttccctctgactctgaggaactaaatagcttgactatctctaaacagagactggccctgccactgaccctcctgtccctctcatagcataccctgacagatactcaatagaaaacacctgcagaccatgtgcacacttaactttcctgcccaacctgcctccccaacggcccatgctagaatagcttgtgcccagaaaacaaacagtgacacttcatctcttcagcgtcagaaaatgggcatagaatgtacccatgcaattgaatgtatctcattctccactggcatagtagatataaactattcctttgcctaccttttactgccttatcctggaaatattggggaaaataagccatatcagtgagatttacctaaaaacaaaggaaggaaagtcactatggaaaccaagtagatgctttttgtaagtttggtggagcataactggcccagaagtctgggtgcctgagttctagttcgtgctctgtcaactggtagatttgtaattctaggtcttggttttcttacctggtgaataagtcatgatctctaaaacccttcctgcccttaatattgtctgaatttcaaggggaaaaaaaaaatctggttcctttaattatttttttttaacacttaaattcctaactttattagacaagaagtatggcccacttaacagttaaggaacgtaaatttgttattggctcgaaataataatttgacacaatactagtcaaccatttagaggccttggaaaaagaagaggaacagcactgaaaattccaagtatgattggaaattatctgggagcggggaattaaatattcaatgcatgaaagcaattgtactggcttctgggaaaaaggaaacaagaacattgctatggaacttgttacccagagaaaggaagtgaaaagatttacaattataagcacgaaattcattggcagattacctgctttatctacagacagattgttttggggtttggttttgtctaggcagcctctggccaggctccttaattgcttgctctgctaatatttcagcttcctctcttgactccttgaggaaccaaccgctctttggaagacaaacacttagccacctctgtgctccagggtaaccctgagaagctctgctgtctggggcaagctttctttccaaagggaatgagaggaaggcaagcaggcagggtcctgcagcgtcaggccttctggggaaagtttcctcattttgtttgacagggtcctcagtacatcagacacccagatttgaatataagttcagagcctgatctcaagctaaatcagaatgctttggggactaaccatgatcgagaattggccaaatagtatggcatataaacagccatccagccagccgcaagtaaaggaacgtttgatccttggcaccttaaatgattgattgccttcaataggcaaactgctggtctggaaatctcgttgaaggctgaatacttcatgcggagtaggacaagccttagcccaccttcaggttgaaaggaaaggccataggactcaaaagataatgactctgaaactaaactccttccttctgaagctgacagaggtacttagtgcatctcaagactccatctcataaaactcatttgtgagggatttgctctagatttttctaaacattttttcatctattgtccagacttgcaaatccagtgtggacctgatggagatacccttcacacctgcgctcccaccccctcggcagggagacgtctcagtagaggagaacacacccattatgctgggatttgtatttataaatcacttcccttttagggatgagcggtgtggggcgtgtgtgcgtgtgagtgtatgcgcgtgcgtgtgtgaccctcaagtgtactttgctcaatttagacgtgcagtatttccagaaacaatgaaaaaagtaagatgttttcttctttatgattctgctcaaaacaccacgtgccgcctcagagctttttctagagcctcggtcctcaatgacgcgcttgacctgttgatgcctcagcccagcgaagcccctcacctgtgccccgggcgacagctcttcagtgtgcagtgcaggcctggggtggactgccaggccttcgctctgtgccagcaacgccgttcttgttgctcc

SEQ ID NO: 29148 - DNA, 2300 bp, Homo sapien
aaagaacaaactgaagagaacttagcaggggcacgttgggcctcctggagctatttgaggaattcatccgggtttatagattatttttgtcagccaagtgtctgcagcccaactattccccagttgcccagcctccttgtgtcacccctttgtttgccacttttggaaactgacttgagcctctcccacatactatgggaagcccagtagtctgcacaggacttgggaagatttgctgggctttccagggtcccggtgtcttctcactccagctcccactatagctgttctcttctctgcatggggtgactctggcacagctcccctccccttttcatttcaattccaaaatcatgactaatacaaggctgctactggtagcaattttactaaaggcataagggaagggaaaggccagttcattgcagcctggaagacaacacaaaattaaacatggtgtttcttggtcctcaaggaaatgtcttactattccgcgttcctcctttggcctcaggcctgctgcaatgtccccagtcccttcatatatctcccccttctatgcatgtccacgctcatcctctcctctctgccaggcagccagtgaaaattcaaaattgttcccctcatcttgcagaatatttcagctatgtcaggcttctccttctgtaccctaggagggaggcatcacctttcacactcaagaaggtaattcacactcaagctaaactgtctaaacagagatatttatctgaacaaagtactgcctctcttcatataaatgatgccactcccctggtacctggtccctggagcaccagagttcacgctgcatccatgctcatggctaagagggaagaccctagatctgcccgccccccaataaaggcctggaattggacaaagcaagccttcccccttccatctctgaatcaatgtccatcttctctcttccccgcagatcgcccggggcttgcctgtgttgagagaatagaaaagtaccaagatagtttcctgctggcctttgaacactatatcaattaccgaaaacaccacgtgacacacttttggccaaaactcctgatgaaggtgacagatctgcggatgataggagcctgccatgccagccgcttcctgcacatgaaggtggaatgccccacagaactcttcccccctttgttcttggaagtgttcgaggattagactgactggattcattctcataattcctacagcactactgggtgtcatttcattccattgcctagctcttttttgtttgtttctttgtgttgggagggattatttgggagggaaaagggaagtagtccttggcatagacatggatgaaattgccccttgaatgcgggtacttgaaactattgcatttcgttctccggtcctgtgatgtgaatgctctgaaggttttatggttgtggaggtggggtgggggacaatcattaactcaccagcaccaagcatcaccagctcccacccgtccctggtccaagacttgagtcagcaaaatggcgccacaggacactaaagaagccttaaaaccaagataatacgaccacctccacccaatcctgatgttcgcagggctgaagttaacagagcacagaccacctttagttagatgtggctttcagccttttagggaaagactcgaacaaattttcatctattcaagagcatgctgtttgcagcactctttatggtctcctaggagcataacttggaatgtacaggaatatttgtgtcctaaaaaaatcagctgcccttccaatatcatttttataacgttatggtttaattcaagttatacaaaggtgtgactcaaggatgtgcaggtattgactgatggaggccaacaaggaaaatattttttttcagtgagcccagagaaattagaaatcttcaccaatgtcagtgactgcatggtttccaaaaattcacatagtattacctcacagtaggaaggcttctttcccatttaggctcagagaacacttttacagaaatcaaacctatttacagggtggcaccccttttctgtggcatctgatctgtcatctcccaagctcctgaagttctttatccaggttgtatctttgctgagctgacaacagatttctctatggatcaaatattctaatcaaggaaagatacggtgaaacttcagtcttcttctggagaaatgctgaggcgagattagtgcagctacattctgagttgaaggaaatgcagtgttctgagggcccctttgtgtcctgatggctggaggacgcttcctcctggtt

SEQ ID NO: 29149 - DNA, 2300 bp, Homo sapien
atgacatcagacaaaaaaacataaggcctggatcctttttcctggggttttcagaaaatagttattgcttccaatgaaatgttttgacatttccagtagggagaaaatgttaattgtaatattgtgtatgtgttcttagtaacactgaataaatctttcatttgttttaatggtaatcagaaagtaaaaacacgattaaaatgttagctgtgttctttattccttatggtaacttttcatgctttctaggatattgtgattcattttccaggttcaaatatataccaactgacgaacatgcttttgcttgttttatatcagttgcagtttttaaaggagtcttattactatcctccacataggtctgcctgggtctcttttctaattttgtcacatctttagctcattctacaattccccaccttttcccttgagtctatggctcctttactacatttataaaaagtcagcaattaaagacagcacaatggtggtccacttgactgtatatttaatatacatgctattaagctacttattgacagagacggtgattttttttttctgaacagccatctctgtagccaccaactccttgctttgtacttaacagacaccccataatttgttgaatgactgtaataccctccttacttctgccatatgtccctgtcccagaattccacgttgcaattgatgactggagctacatgtccaaagcaaaggtctcactgttgaaaattacagtattacattgttgatggtcctttagagacaaataccaacaaggtcacatgctcatggaccagcaggaagccaaatgtaaacgtaaccacctgaggccgagccctgaaaacaagctgcctaagaaacggaaggaatccctagtgtagaagagcagcatccgcccttcctgatgtcatgatctacaactatgcatatatgtgacatgcacacactggccaccatccacagggagaaaataccattagtaatcatcctagcaagcattcacaatctaatttggtatttgttaactccttagttaaaagatatgatgattcttacagaaaatgctgttccctttttgatcactatctttaagtaagtacatgaataccacttaaatcacattaaatcttgaaaataatctcaaaagcagatttgaatgggaataaagtggtaagtgtttacagttttccacgcactactgatcagagtactgttaagcaccaacagaaaaggaaagctgctatataataggggtattcctcatataggggcattggcatacagtctctcatgcctttataaagaaaacataaattacagaattgaacagttaatgtaagctttaggtctcatgtagattagtgcttatgaagtagaaaataatcatgcgcaaggaacagaataaaactcacttgcagacatcagcagcattttcaaccgtgtacttccttggcatgttttaaaaaccagcgggacctatgtgtcatgggaagatggttggatcctagtatgaaaacccagtcagtaacattcaacaacagattcaaccaccaatatttgcacagctagattaatgttttggagtcagtcagtcatcaggctcattactactggattttctctggttcatgctaataaactagattattgattttaggattttctttgtatccaaggatattctctaagatgtctttataatgtttcatgcttaagctgtcaaccaaaatgacataacaatgagtaatcgttttataatcatgttgaaaggggttaaaaacagcatataaaatgcatcttagcagcttcagagtaacattctcgctgtcacttccctatctgggtggaggtcattcctacctgcctgccatcttccccaggaattaactagctgcatgcacagcttaagacctttgatagtcataaatctgctttccaatatgtttggatggcagaagagctcaaaagacacctcggtctaaataggattttagcacatcaggtgctattacaaagtaaagcaggctgggttgctgtgttggtggtggtgtttattcatcttcccttcgcgtttcatgtgtatgtatgtatgcttctctgcgtatatgcccagctctcagggtgtatggggctggagaatgcatgcgtagactgtgtgtatatgtaaactagaaactgaaccagggaaacaaaatgaactactgtatgcaagaaatatatgaagtgcacccagctgccggcagcaattgctacatgcagtccactgattattacgcgtattttgaaga

SEQ ID NO: 29150 - DNA, 2300 bp, Homo sapien
ccagctgcaagaagagttagaataatctgccttaacttggcagataagtcctctgccttcacaatgttttttataatgctaataaagcaagtaatactaacagtactaagagtagcagctactgtttattgagagtatacagtataccagctatgtaccaacatcttgataaacattacgcttaattctcacaacatcccactgaagtaggtgctacttttatctccactttataaagggaggaaacctacctcagagaagttaagtaacttgcttgcggtggcacagtgagtaaatggcaaactacagacttgaccccaggcctgcctcacttcaaaacccaagactgtagccaacctctccaaagtgatgctgatgaattcttttttcttagtgactcatattccattattagcagtggttcttgaccttttagggattgcagaaccatttaagagtctgtactgttgcctagaaaatggtgtgcataaaacatgtatacagttttgaattaaattttagagatacatagcctctagcctgcaaacccctacaattgaccagtgaggctcttatacttctggggggctttacaactttccaggcttttggaatcttctgctaaaatgcaaatcttctgctaaaatacaaataaccctgtaagagttagatgaagttacataaccttatgagagaacacatgaagtgcttatcaactaaaattgtgacgttttgtctggagcagaatcttagtaaatagaaactaagattcctggaagcacttcttacaaattttaccttttccccatcttttctatgaccaggcagttctggatgaatcctctaaaagttttagtacctgacactcagtcataactacagcataactctggagctacaatctcatagacaaataattctcaagatagccaatcattacttagtgaattataaagttaagctttatgttctcttccctttaattacagtagattaaaggaatgaaagaaaattgtttaaatattagtctgtacaaacatgttaaggaaatacaaagaaatctggttcaaaaataataatcatgaatattacaaacccaacacagtggtttgaatgtatcctgtcacttttcccattgctgataaagataattgagggtaaactttttcagtgcaatttgtctgatcatctctgaactctgtgatgttcctgatgatgtttgctttataatttaaacccatagattcatttacccagtatggtatgaaacaagaaaaaaaataataaccttctcgtatttttagaaagatacatctcggatagataagcctgtcactttaacctttccattttggtgtttaaagacagagttcaccagataatacattctcaaaagccatttagaaaatgtgctaaataaaatgtccttaatgagcatagaataataatcttttagaggaagtggaagcaaagaaaagaggacagcaggtaaaacattaggcactgcctaacccatatggtttcaagtgatttcttaaaattgaatggctaaaatttaactgctctgtttaccaaaatgtcttgtgaatatattaataagagcgtgatattatgcccccaaaatacaaacaaatacattttcaaataaaaatatttataagtacctatataaaaactaaacctttgtagattctggatattagaacttaaagaaatttacaataaaaaaaccatcaaaaagtaggcaaaggatctgaacagacacttctcaaaagaagacatttatgcagccaacaaacatgaaaaaaagctcatcatcactggtcatccaagaaatgcaaatcaaaaccccaatgagataccatctcacgccagctagaatgacgatcattaaaaagtcaggaaacaacagatgctagagaggatgtggagaaagaggaacgctttcacactgttggtgggggtgtaaattagttcaaccattgtggaagacggtgtggtgattcctcagggatctagagctagaaataccatttgacccagcaatcccattactgggtatatacccaaaggattataaatcattctactgtaaagacacatgcacaggtatgttcattgcagcactactcgcaatagcaaagacttggaaccaaccgaaatgtccatcaatgatagagtggataaagaaaatgtggcacatatacaccatggaatactatgcagtcataaaaaggatgagttcatgtcctttgcagggacatggatgaagctggaaaccatcattctcagcaagctat

SEQ ID NO: 29151 - DNA, 2300 bp, Homo sapien
cgaaaagaaagagagagagagaaaaataaagagtgaaccatataagcatggaatgtgtgcaacacacacatacacatgcacacacagaatagatcttggcatgcccaactggcacccacttaggatgtgtagtcaggtatttttgagaacataatatttggacacaatcattaatttattcaccaaagagttatccagcacctactgtgtgccaagtattgttctagatgctggaaaataagagtgagtgaggcagtcaagagtcctgtgctcatggattcgatattctaggcaaggatacaggcgatcaacaagcatcaattgaaatgaacaattcagattgcaaatacaataaaggaaagaaaaagaagaacaaaacaaacaaacaaagagaaaaaccagtgtgatgggtctgaaaaggaatgagggaccgcctttgctcaagtggtcagggaagggctttctaagaaggtgacacgtaatcttacactagaatgagaagaccagggcgaagaaaccaatcacctttactctgatttccatcaaaaagatgggcttactaaaaaaagaaacatgcaataccatttgtggctccacacaactcatgctttaaacaactgcaaaaaccccaggagaggaaaggaatccacagctttctctgcttttaaggcgattttaagaaatcacctttcccaaagataatggattaaaaagttgtcttaattcatctctaattatggcagaatttactacaaagaaactgaaaggagatacatggaatattcattcctctacataatgtcagttgctttatgtaacaatattccaatgtcaataaaagtatacctttgcattgtaatgccaacaggaattatttcactttaaaaaaccagttctgtagctatactcagtattatttatttttcactggctataaaataaagccaaactgtatttactagcagatggtctcacttccaatatataataaacctctgagatcaggtaaaaatagattctgttagtatttctttaacatgctcaaattataaatgatcgttcaccaatgtctttgtataaaacactccaaacaaatcacttggtactggatttctgtttgactcaattaaaacacttagccacctggcatgaaaacatcctaaaaacatcaactgcttaaaatactttgcactgaaacacgtttttcattgtttcctagcctctgactgatttcggaattagaaagaattaagcagaagtgaattggggagcaggtcagtcactgaatattcagaatgaatcatgaacacgttaaaatgcaatttttatttctttgcagtgcattgcatgctatacattcttacaatttaaataagcatactaaactaaagccaaataatgtgaagattgcccaacaggtctacattacctaatacatttatcattatataaactgctgtgcttgatattaatacactgtgcaaggaatgcttaatttcttgaacttccacacaggtctttaaaactgaatctcactagtacccaagaccaataatgtgctgaggaagaaggtatttcaaatatatttactgattacacagtgtttgaatcttcaaaaattctaaatttatgtggacaaaggagaatggagaatctgaacttggctgttcatgcaaactctttcctttctttgactcactttatgaattgttatgtttctagatccttcttttaaaattttccatttggggaaacttgtacatttaaaaaaaattcatctcattttctccctccccctccttaaaataaataagaaggcttaagaattaacactaataataatcccacaatggtcattgggaaatcctcccccaaagtgacaactgccgctaagaagggcaaaatccactaagaatgaaaattcccccaaatgagtccttctccgagggggtggaggtcacacagttggcacaattggtatcacaaccaactcgaggagacccagaggaagatgctgcgccaagagaagcaaagcgaaggagcgcgacccaggaggctagcgaaatccccgccaagcccccaggaggcggagagaagcccagtcgccaggcaccggccacggcgcacgccaacatccaggataattctcctttccaagcccgggagttccggggcaggcgaaaaaggggggatgggagacccacagtccctttaaccctcccccctggcctgccaaccttttccgaacccccatgtcacacaacttcctcatcatggaaacttccactgggttcggcgct

SEQ ID NO: 29152 - DNA, 2300 bp, Homo sapien
tgttacatttcattttgtcctctgtatgtctccttcttaaataatttagctccaagttatactcaggaagagaaaaaaattaaaagttccagtaggccgagaagcccatgatccaccgtgttgaaggaagatttgcttcacctcaccaccccccaaccccctcccgcccccccgcggtaatactaagctgttcacacgctgtgaagaagacccgaagactaggttgtcaactgttggggcctacctgcgccagacttcttcctcagtggccagctttctcaccccccgttagccaccagggggccgcctgcttggaacaagtggtgtagacgccacagcttttctccaaaccaaccaaaacattccggggcagctttggagcaaagcccaggaacttccctgcaaaggagaacagctctccaactacagaagcctgcaagtcctatggtgcagacttattaagagtagagaagaaagcacggacttctcaccgaggaccaaagggaaatggggtctctggggcctgcaactttcttaaaagtgcatcagtgaaaccctgcttatccagcggggtggttgttaatgctgtcagcaggggtggggggcctctcacccctttccctgggacgctcagaagaagcgagaataaaacatacatgtcactggctggaaatctagagaaccttccaataaataacctatacattgtcaggcagctgaggatccatatcgtcataactctattatactgcgtgttacacgaatagatgtgaatattaaattatgatgtcggaattattttaatactgtctataagaaattaattgtactctgttgtcaaagtagttttgttgcaactatagttccttattgactaccttttagctgagtgaggactcggtatttcccaagtatccttctagctcagaaagcaagtctcttcctggtctccaggacttaaggtcgggggcatttgagagacctatatttgcccgggaaagatctcttgaagagtatacattatttttgtcttcctggttttatctatacatttccagggcaaagacaaattaatagggcggccgttctgggacctgaggagtgtctcagccctgtacgcgcctctcccacgatatgcataatggcggtgggggcgggggtgtcctccttaagggcaacccaggcacgtcccaaacttccattcgtggggtggccgtggtggttaagagagctgccagatggtcggaccagcggaggccccaagaagagccagagcgccctgtattcccgacacgcgccacaagtggtttaggagcggagggaggagcgctgcggcacgggtcgggccggtcgggccgggcaaagaaggccgagacgtgctcctggaagactcgccctccggtcccggtgtcactcgttccccattctttcctcttctccaactagagtaatgacgcccaaacccgcacctatgcgcgcaggcaatcgggtgggtggacgcgcggccaccaaacccacagcaccgtcaccaaccctgggagggcacggccgggattaggaggagggggagcgcccacacctggggaggcaggtgcggaggcggccggcccggggacctcgagtgcgtaggactcggggtcggggtcggggtcggcaagccgggcgctgtgagcgcgtcggagcgctggcccggagcctggcagggggcgtctgtaccggctgggcagcccggggcggtggcgatggctggcggcggcggcggggtgtgcgccaggaggccatttcctcgctgcgcccctggcggagccgggtttgcctgctcttggccgccgccgccaccgccgcgcaagtcggacagccgtgagggctggaggggaaaccaggtcaccggttcgcagacgcggcgcggagcaggcgccccgggcccggagtaagacagcgcccgggaagcgggccggggcgggccgggcacgcgggggacccggagaggcggggactctggtgccccagccgcagtagcttcctacgcctataaaagtggagagaccggggaggtgcggcgcggccctggctgcggccgcctctcttcgcccaaggagttgacattttgcaggactcgcgcgacgcccagtcgccggcgctccccgggaccccgccgccgggaggagggggcggaggagggtggagactgcggggcttggccaaggaaggcgcacatcctcgggcgggcggccgtgacgcggcggggattaactttgcatgaataatgtgagtgcgcttggaaaagagacctcctgctc

SEQ ID NO: 29153 - DNA, 2300 bp, Homo sapien
ttgaacttctgtagcttctaccctcctaaatgttcggtgtttggggccattttcagtccttaaaaataaaccattcctcaacatgttactctctggttattttgctcaaccttatttgccttggggaaccaaaaagattaaatcttaccaggtcttgaagttacaacaatttgaactgctagatttttctgccttaatttcccctctgtgagttcaagaggtcagacatagtctgaggcaatacttaaggagtctgtatctcgaaaaagcaattggattaagttgcttgaatctgtctcctcttttcacattgaaatgatgggggcagggggatggaggagtgtcaagatgagctttcaattgatttatttggtagagaaaatgcaccaaagctgaagagaaaatgccttctcattattgagttgctaagctgcacctgatagttcacgttgtggtccatgactggagctggaagcaccaaaagtttttattcatttaattcactaataaattaattacactcatcagtaagattcatacacaagcaatctaaagaagttaaaaaaaatcaaggatgttgccatttatactgaactggactatcattctttttaaaatttctccttacagtcccttgcaacatttatacttcacacctctcattcctcagatgggagaactgagagtcctaacggttctggagtctgttccaaagtttttaagtatttctgtcttccaagattaggtgcaacacgctcactaaacttttcctccactgctcgttcacccagaaacattttgaattaaagatgtttctagggtcgtcagataaaattcagaatgcctagctaaatttgaatttttgatacacaacaaatatattttttagcataattatgtccccaatacaaatatgtctcaaatattacatggtagatacacgtatactaaagatgtatttgctctttacctgaaattcaaattcaactcagcatcccgtatttttacttgtaaattctgccaacactagttactcctctttaactaatgctgtttcgacttcagtgcagtagctcacaccagtaatcccaccactttgggagaccaaggcgggtggatcattgagcgtaggagttcaagaccaggctggggaacatagtgagacccctgtctctacaaaaaaaacaaaacaaaacaaaaaatagcttgaagtggtggcatgtgcctgtggttccagctacttgggaggctgagatggaaggatagcctgaacccaggagtttgaagtcacagtgagctgttattatgccactgcactccagcttgagcaacagagcagcaagttcctgtctccccgcccctcaaccaaaaaggaatattttgttgtaatggttaaactttaatcaaagaggatctctgaggcaagttatttagcttccctagcaggaggaaattaagaaaactaaattatattctttgaataaaagacaatttagaacctaagactttgctttcttaaaaaatgttaggattagaaactattgtcatatttccctaaaattgctgacgtagtaattggaggtgtctctcagtagaccctagaacttattttattatgtaaaaagtgatgaaaccaagaagattacaacatgttttttttttcttcttataaatcttcacaggcctgaattatagcagaacttttatccaatctacttttaatttgctattgggtcaaaggtccatgctagtgggatgggcactataattaacgattgccacctgtgtgaattcttttgcatttaaagcacgtaagcccacccctgagcccagttaatatgaagcactgaaccaagatggctgtaccctatcgtgtgattccctccttgtgaacgggtacagcttcagtgaagaagtttcagtttggcttaagatttagcaaaagaacttggtagtctcctcatttcaagacggttaactatgtcacgtcatggaaaggaggtattgtgaagaagcaggcaaagattttgaataatctaatttctttttctgcattgtgatgtttaagactgctaaatgaaaaccattgtttttgcagaatcctgaacatcatcataaaaagacagtcaccagtcctgctcatctggaggactgttctcacaatcttcagcaaggaggtacgttcaggtttagtccttttaagttctctaatactttttgggaggccgaggcaggtggatcatttgaggttaggagttcgagaccagcctggccaacatggtataaccccgtccctatta

SEQ ID NO: 29154 - DNA, 2300 bp, Homo sapien
ggaagagcaactgtagcacctctgttcactgttgctggcagacaacaaacttgagatgaagccacatttgcaggggaaaaattgcctacgcccacagaatgaaatttcaggctttgacagttgctaggtaagtaaatgagaatcattttattctgggtgaacacagcacctagcacatcttgaacaataagaagagttggcagcccaagggcggtgacacccaagatggtacatgttcagaagagtctcttgggaggaaatatgtggaactagtggccaaacaatcgcccccttatcaaagcatggttcctcataatcttaagtagaaggtacaactcctctcaaagggaacctcagaaaatgactttaattctcccattttaattcaacaaatattgcaccgactctgaagaagccctatatgaaggcccaaggcctccgcctgaatccaggatactttcatctcatgcctgaatgcttttaacaacctctcgagtagttttgtgacttcagtctttgccctgcagccagaaaagcaaaaacaaaaacaaacctttctaaaaagctacttttttccttcttataaaatcgttcaataactccacctaccatcaggaacaatcccacttcttgacatagacttacaaggccctcccatgctagctcctgttaacctttccaacttcatttctcagcgtgacccacccctctccaccccagcctctatgcctttgagaggttgttccctttccccacccttccctttccacttttctggccaacctttacgtttcagctttaacctctcctttccccaggaagccttctctgacttctcaagtgggttagatgccctctttctgtggttccacagctctgtttgtgtccctggtgtatctttatcagactatattgcctgttcgtgttctgtctctggatccttcaaggttacaagggacagaaactcagctcaaatcagcttaagctaaagaggaaatgtgctggatcctgggtaagctcacggactgacggaaatgccaaacaaacaagcttgaggaaagcagaaactggggcccctcccagatctctggattctgcattagggctttaagcactgatcacggtgtatctgtgagagttctgattgctccttcttaggtcacgtgcttgcctagactaagaaccgtggccctggtttaggaaagatacaagatagagaatcccactcagaacacttttcaagcccttgggtaacagaaagggaatgaaggagaacagaaggagcgtagggcaggctggtatgtagatcacctattgctgcaaaactaacaatcagaaaacctcagtggcaaacagcaatatatatatatatattttaaatgcaattgcaggaggtcaactaatacagacttgatggctttgctttaatctgaaggtctggctgagccaggatcctcgtggtaggggaaactgaggcttactccagggatgctcatttgggggcctccgactgaaggagaaatgtcaccttttcattgtctgtgtcttgtccagtagctgacatgtaggacaggtgcctcataaaagtgaatttaataaatgagtaatcacacccagtgtccaataaacttcctctttagctgagctgatgggtgagtttctgtcccttgaacccttgaaggatccagagaccaaacacgaacaggcaatatagtctgataaagacataccagggacacaaagggggctgtattgtcctttctgtggatctttggcaaatagacaagtcaggaaaaagtgcttgagacaaagggaatagtctgaatcttgtgtaacagagagagggcacatcttaaaatggctatgtgactagaatatatggagtgcattgcaaactacagggctaagatgataaagagaggacaagtgtggagggaggagtgtacgctttattctgcctttaagtatctactacggccatgggggtacaactcaatgtatgacctcatataagagtttatgatgcatttatgacaaaacagactgtaggtgccatccagagtggaataatttggaaccagtacacctatacaaatttttattattagctggctatgaaggaaagaaatgcacttaattgggtaaacagtttatttcttatcttcttttaagctttctgaacgaacagaatttggctagctggttttctacccttgaaagcataaagaaggttggactgtctgaaaatactcttttctgggagtatgttcgtagacaactgaaataaactgcaactcact

SEQ ID NO: 29155 - DNA, 2300 bp, Homo sapien
catacttgcctcgtgctgccaacatctctgccttggcttccctgctggaacacacaagtcactcagtactagccatttattcttctggcagaactgtggcaagaggggattaacagggaaaaaaaattaaaaaacaaacaaaaagccaaaacaacatgaaagagctgggcatgtctttaaaacaatcagtgtccacctcccccagccctgtgcctgtgtctgcctgcactttgcatgtctgcccctgtggtggggggggatatgtctgcgcctctgaaaatcttcttatttagacatcacaaggtattagcccaattttgaacacagccggctgcagtacggtgcacagacacgactgctctttcttcagaaaactctccagttcaaacatgtttgcagagcatgattcatggtgtttctttctggattgtccagtgggtaattgctgtacgaaaaccagagaaacagatgtagaccctgaaccctggctataaatttttgttttatgattatgggtttcaaatgtgctgtgtcacactgacaaatatacagttactctgaaacaaaatggattttactctcaaagttttgctttttgtttttcactttttgtttgcttgttggttggaaatacatttattagatcattgatcaaacacaaagaaaatagagatgacacatatcagaatgttattttatgccataacaagaagatatttgggaaagtttcttccaaccctgtggctaatgtttaaaatgggtgtcagtagtttacatttcattacggacaaatcggtctatttttcactttctaccctactcattaatctttatagtgcacggatctgtatttaaagaattatggcttatttatgtatctttccttcattttacttaaaatgaagaatttggagacagaatcaagttttcaagaagtgtaagcatttactgatgaagaaataattagcatgtggctaaatcatgggtctgttttataaattaatacttggattaagtaatagctctaattattgctatcagcataattaattcatgatgaggaatgattaattgactagcgaatattgtcatattataagaaacccatactattcctttcatggggatttaaatactgattattcatttcaaggcccaagttcatttctcagttgagaacttcaaggtaattatatattttacattttcttgcacaaagaaagaaaacatcgagtcgcccaacctttaccacacacagagagagacacactaatgttgttatttttgtgcaatgatacagtatagaggtaagaaattcggaagcagtggtctcgctcaatgaggctgattccatagcttaagaaatgagaatgaacagaattttgaggacacccatccccatcttcacttccctgggaccagtgcatctctactctttggagagatgttaagcaagaatgtgcagcagcctcccctggataacagatccctgtacacacatacctgtcagtgatgccatgtttctcatctctaacttaagtttctcctgctctacttccaatatagctgtttcctcttctcttgtctaacaacttttcatccacctccactgtccggtaaaaatgaactcagtttccaaggaactctaaggaccttaaataagcatttggagccataagcctcatggaccaagtagaaattggcacataatgtagtgctttgtgtatctttacaactaccttaatgacagtgtgttaaatgttttgtaaattcctctgtgttctcttgcttaaaatgtgtgttttctttgtagttaaagggtttcttacaataagtctctgttacaaaatgatggccatataaaagagagaagagaggcgcaaaaataacaaacacagattcagcaaaaatctcacccctttattgccctgaacttttcaatagcaagaactgagcttgctgggctgaaaattgttttaatgtaccttcataaaaggatctttgacttggtaagtgtgtgcgatgcatacttttcatgttacaccacaagtgccacttagcaactccactagacagggcagtgtttcagcatggggtggggtgccccctgacaggcttttaaaaggcccggatgccaatgcacattccaacactatccacaaaaaggagactggagcagtgctcttccctgcattgggcaaggagactctccctccctgcctaaccacttgcctgccctgttttgtgggagaattacaagtaaatgctacagaggcagtggagaaaaaagggtgttttaa

SEQ ID NO: 29156 - DNA, 2300 bp, Homo sapien
actaccttaatgacagtgtgttaaatgttttgtaaattcctctgtgttctcttgcttaaaatgtgtgttttctttgtagttaaagggtttcttacaataagtctctgttacaaaatgatggccatataaaagagagaagagaggcgcaaaaataacaaacacagattcagcaaaaatctcacccctttattgccctgaacttttcaatagcaagaactgagcttgctgggctgaaaattgttttaatgtaccttcataaaaggatctttgacttggtaagtgtgtgcgatgcatacttttcatgttacaccacaagtgccacttagcaactccactagacagggcagtgtttcagcatggggtggggtgccccctgacaggcttttaaaaggcccggatgccaatgcacattccaacactatccacaaaaaggagactggagcagtgctcttccctgcattgggcaaggagactctccctccctgcctaaccacttgcctgccctgttttgtgggagaattacaagtaaatgctacagaggcagtggagaaaaaagggtgttttaattcctctccagagtttcctttatttgatgtatgttgcatcctttaaacaagttgtgcaaaatggctgcagggtagattggctctcccttttaaagctctccatccggctgggtttatttgtaaatactgcatctatccttcttagtgttttaggactggctggaaagactcttcttcctgtaggttgggtcagtgtgagagatctaaaaaatcattttcccttaaaattactgtattttaataaaaggattgggcaggggctggaatgagagaaaactggtccttcaaaatgtaaaactgtcatacttaaaccagtttacaaaatatgcgtttaattatgtggtgggatgtgtgtaggtgtatgatgagagaggcaaccaacatggctatttggggtgcaaggatgtgggaacaggcaagtaattttcacattggactttcatcctagggagctgggttctagtcacagctctgagctgtgtgaccttgggtaggtctcatctccccggggttttgtttcaccagttgaacagtatgaggatgagtcacagctaacatttgttccatgatatttacccagcaccatacaagtgttatttctgtcctcccagttaacactgacgtgggtagtattatatgcccattttacagatgaggaaactgaagcctgaagaagttaaatacttatcccagaacacacagctggtaagtggcagacctggaattggaatctagttcagtttgattccccaacccatgctcttgaccactatactgttttttcaagtccagatctgaaatctcattttctgtgtggctgtgtgtttgggacaggggtaaccaattcctgactactctatatgctgcatagaacctggagaggatttttcaaagtaaatgaatctcgaaagctggattgcagagcaaacgagtgcagtcaattcagccaggggcttgcaagagggagaaagagaaaaagactgtggaatggaaagtttcccaacccaagcctttcccaaggggtagccattctctgttctacagtttagggcttgcatgtgctttttctggagtggaaaaatacataagttataaggaatttaacagacagaaaggcgcacagaggaatttaaagtgtgggctggggggcgaggcggtgggcgggaggcgagcgggcgcaggcggaacaccgttttccaagctaagccgccgcaaataaaaaggcgtaaagggagagaagttggtgctcaacgtgagccaggagcagcgtcccggctcctcccctgctcattttaaaagcacttcttgtattgtttttaaggtgagaaataggaaagaaaacgccggcttgtgcgctcgctgcctgcctctctggctgtctgcttttgcagggctgctgggagtttttaagctctgtgagaatcctgggagttggtgatgtcagactagttgggtcatttgaaggttagcagcccgggtagggttcaccgaaagttcactcgcatatattaggcaattcaatctttcattctgtgtgacagaagtagtaggaagtgagctgttcagaggcaggagggtctattctttgccaaaggggggaccagaattcccccatgcgagctgtttgaggactgggatgccgagaacgcgagcgatccgagcagggtttgtctgggcaccgtcggggtaggatccggaacgcattcggaaggctttttgcaagcatttacttgg

SEQ ID NO: 29157 - DNA, 2300 bp, Homo sapien
gtgaacagatcaatggctgagcactctgtatctgccttaaataccaaaaatgactggtaaaaggaaagccatgggctgtccccctgcttatttcccactgactttcttggggggtggaggaaggcaaaaaaagaaaaggacctctgataaactttgccaaagtatgtttttgctaccttaccaaaaaggcaagagattgcattaaagtacaaatcttttatattgatgccatatcctggtttcctggttgtaattctagaatttgtcttggcatgttcgcctgaggctagctttggtgatctgacagactataccactgatttttttttttttttttttttttttgccttgcattgttctcagtgttataggccacatagaggaaataaaagaccactgaccatcaattctgagggtgatatttgaatatatatatatatatatatatagagagagagagagagagagagagagagagagagagtcaaatacttaattttttactaccagtgggaaaatttttccaaagatgattttttttggggatcgtacataacgtttttccctttctgtttttgtggcatttgtagcattcaaattatgttcatttatggcatttgcaggattcaaattataaaaacagtagaaagaaccaatttatcatttaaaaacatagcccagtcacttcctcttggaaggctcccttgatttctcctgggataaataaggcctatagttcactctgacattatattagtggttcccaaactacttcagtttggattcgcctgggaatactttttattatttttattttttgttttgtttttctgttttaaatcttacagtcagccaaaagggaattttttttaaaatggcaattcctagctccattctcagacattctggcataatagatctgggatacaacttggtcattaggacgttaaaaagctccccagctggttctagtgtgcagccaagtttggaacccactgtattatcattgttggtttattctctattaggccaaatttgtcaaggataagggattatgtactatcattgcccatagcgtataacacaatgcctggcatgttatgtcactcagccaaacaaatgattgaacacatgaacagtctgagaatctattgtactcacatgagaaagttcctagaattattggtgaaatcaccaccacctaaataaaaggccagggctctcactattgattacttacaatagaacattttcgttcatggcaactgttcaggaaaagccttctggattcattcatttgttataaatgactcttatccataggaaaagatccaatctttgtaaaatgctttgggatctttaatgtccagtagacttcccgttttttgtgtgctttgccccaagtttcttgggtattaaattatgcacaattttgtttcctttctttgggaaggtgaaatgctggactcccttcagtgcatgtgtttgaagtggcatatttatggaaattactacccacttttgaaattcagggcatagctctgacagctgattccagccctaccagaattctatttacaactttcctagacaggccagattagctgttctacacgaacgagtaggaccttaaaacacaccgctccccaccttccttctgtgaagaactcaatgcgagattgatcatagtggtgatgacatgactctgtcagttgttgaagcacatggatggaagtagaagcacacaaatcaaaccactccaaaaggtttgagaggcatctggggaaggggtcacttacgttgatatcagggagtgtaaatctacacaacctttctagaagtcagtttatcaacatgcattaaaaacaaaatatttttaaaataacaacctttgaactgataattacacttcagtaatgtatttgaaggaaataaagatgtggtgagattagctacaaagttgttcatcacaatggaatgttttctgtgaaaaatatttatcgacaaggaaataaattgatgacatcataggttaaacaaagtcctcagcagtgtcagtataattccaccttagtagacaaacccaaaacatttatgtgcatagaaaaaaattctggaaggtcgtacacagtgaatttctctgagtgaaaagattgtgggtgagtgattctgtgtgtatttttccttagatttttaatagacagtgatacattgttttctaattttaacaagcagtgttttcttgttaattcgctttcagtgaagctgattagttccgtgtgaagaatgcttttgcatct

SEQ ID NO: 29158 - DNA, 2300 bp, Homo sapien
agttgaaccatgccagtaaaaatatgcttatttagacattaaaatcctagggtgcccacgtaagtatcctaagcaatgtgtgttacatgagcattctttgctaatgtgctttagctttgaacgttcttagctctggctcctgcagtgttaatgtactgcagggaaagttgaactcagatggtggggcttagtttctgttcaacacatttgatgatgtgtttcttacattcaagagagtagtttctcgtgtaggtataagtcacatcacaactggtaaagtagacttcctcactcttaatactcatagcaatgtggaagtttttcttgggcattcagaagagagaaaaggcagcaggtatacccttcatctgtgtattcggcaagcatcacttgatcatccattgtctgcaaagctgtatgtagaaacggggaagacaaagaggaagttggggaccctttcttctggagcctgaagtctgctttatttcatcggtgtttcccagaaaatcaggataaattgcttcttttgtcaaaatgtgattttcaaaaagttaaaaagcaaaaaactctttcaagtgtttgtttagtaaacacatgccaaaaatttatttaactcattgatgaagggaatagtaggatgacaaagctggtttaaaggaggatatgagaaagatattcaggtagatagaaaacgagagagaaaggagggaaggaaaagagaataccggaataagattgcaaagctagatacaaaatggttcatttcctacagggcaataaaacaataatatttggggttattgttcatctggtcagaaatgttttgcacctacactagacaaaaattatgtgtaatttaccaattttctacagtctgtatagaatctgggtccaatcaatagtaaaaagtaagtcaaacaaagttatatttcctgtgagtgttagatgacacttcgatgggcttgtcagtcagtgctgtagtacattactacccggtaacgctttctgcaatgatgaaaatattttgtatatgtggtgtttaatatggtagctatgggccagatgtggctcttcagcatttgaaatgtagctaatgtaactaaagaactgaattcttaattttatttacttttcattaattttgatttaagtagcctcatgtgactaatagctaccatgttggacgacatagctctaacatgccattaaatgggcagacactcatttttatttcttgtttccaattttggataatttttttaaattgtattttaaatgttgtgagaggagctatgtaaaagaactcagagaagactcctttgaaaaaactaactcttgcattaggcaaataatttctttttctttcttttcttgtttttttttttttttttttttttttttggttgttgttgttgttgagacagagtctcactctgtcacccagactggagtgcggtggcacaatctcagctcactgcaacctctgcctcccaggttcacgcaattctcctgcctcagcctcccaagggctgggattacaggcacgcacaactgtgcctgctaatttttgtattttttagtagagacagggtttcaccatgttagccaggctggtctcaaactccttacctcaaatgatcctcctgcctcagcctcccaaagtgctgggattacaggagtgagccactgcacccagccagtaatttcttttattgggtaaaaatcctcatatattggttttcttggtagtgcgctcatctgaaattgttctcgtcagcaagggagccagttatgaagctaagcctgtttggagggaacccaactctggtgttttccaagtaaatcagcttggaattaactttcctttagcaagataataatggtcatgtctagttttgattaaaaggggcttttgggtttgcaacaaaggaagaaactattgatatctcacgaggattttaaggtttatgtaagttaacttttctgctgccatcacttcgttactcaaaaagagcaattaatgcattgataaggttggctttgatttctgatgaagctcatttgctttactgagttttttcatcttcttgcttgcttgcagggctttttccgcagaagtattcagaagaatatgatttacacttgtcaccgagataagaactgtgttattaataaagtcaccaggaatcgatgccaatactgtcgactccagaagtgctttgaagtgggaatgtccaaagaatgtaagtggagtctcaaaaaactttttccctgttttccttatctctgtgatttgctca

SEQ ID NO: 29159 - DNA, 2300 bp, Homo sapien
taaaacatagttataattgtgtgacataacttgaacctttaaacttccctgtacttgagttctcaatcataatgtttttgtattttttatcaaactacattgaaatattgcttttgcttacatttttcagtttgaagtcaataaaagtcatatattaaagtgagtaaaattagactaagttatatagaatagcaattacatattaagataataggcttattcattatttgaagaaaattcggtaggacaagatgggcgcattcagagttaagatgattgaagccctttgttttcctcttaatgtgttttattgaaccccaaattatggtttctacaacacttgccttttgcctttctgtatcaccgttggtttaaactatatgtttttttttaaaaaaagtaactagtaagctgatgaatttttaatgcttagtcttaaaagataaagatttctacagtgtcagaatgtccttctggtggaagtagaatttatgggtaaagcctagcttgatttcagttattgcattaccaccatcagaattttttcagcatcttggccatgtgtacattttggggagttcaggtaacaaaaggaactgctcttacaagagtgtcctattatacagagttggagaaaagagaattataaagtagctaattagaagattaaagttttttgtaaagcataatggaattttgtcattagaacttgcaaagtttatttttttttttaatttctggaagtgttcttagtcatatttatgttaacggtgatagatacacatattcatagaacacttcttaacaatactttgggtgtagtcaaaacctagatctaatagactagacccactaaatgtgggtctaaacaggattttgttgtatcctagtgatatttttatagttgtctaacaacctgaatactccatagaaacaagctgtttcatgaagaatttttcaaaagtgtagaattatttattgtaagttatctaggtacttattaatcatctatcaactcaacaatagcattccgtatttggctaatgtggcttaatcaaatttatagtttttgtttatataatgaagcatcttgctttgcagttttaatttttatcttacttctgaagtacacgtaaactgtactttgtgtatatacattgttttgcttacaaattttaattataaagctttttttttttttttcctcttttggttaccaaaagtaaactttttgctttatggagtgtcatggttaactcagtcattttaaattaaacaacttagataaaattttatttaatggctattgttattttaaaaaatttaaaggtgatatcacctaaaataacttttattaaattcattgtattttgaaatttaatattagcacaaaataatttttttgttgcagctgtttctatagacaagggcctgatgaataaaatttcagcaaaaccctgacgaaattcttactctaactcaccaactcttaaattcttaagtggactttctctgagtcctgacatgaatattctggctttagagaagtttttattaagaattcaccctcagcgagtgaatgtaccttaacatatttattataactgtaaaataattttcataactggtatttattttgtatttcagattgttcattcactcaccagtataaaaatctgacaagatgcagtgataaaacattaattctactctcttaactttaaaatgtggtatcctctcattttgttactgagtacctgaggaaatcagttaatttttcatcagattcctggataaatagggatagtgtataccattccttctgaagatcttattgtgcgtctttagaaaattttaaactttttataaggaaatatatttttataggtaatccaaaataaccccaccatcctgaagatgtagcatttatagtgtagcacttgtagaattttaaactaattattcaataaaattcaacattaatttgatactatacaagactttaatatacagtttgttattttttacaggcagcagaagaggatgaaacacaaaaccagcatgatgatagttcctccgattcaggaactccttcaggcccagattttaattatattttaaatatgtctctgtggtctcttactaaagaaaaagttgaagaactgattaaacagagagatgcaaaagtatgaacttttgtgggttaaatagtttgaaactatttcagtgttatctgtatctttttctttttccaaaaataagtattttgatttatccttcatatgttttaaaactattga

SEQ ID NO: 29160 - DNA, 2300 bp, Homo sapien
tatatgctcaatttctttctttctttttttttttttctgagacagagtctcactctgtcacccaggctggagtacagtggtgtgatcttgggtcactgcaacctctgtctcccaggttcaagtgattctgctgtctcagcctcctgagtagatggggccacaggtgtgcgccaccatgcctgtctaatttttgtatttttagtagagacggggtttcactgtgttggccaggctggtctcgaactcctggcctcaagtgatccgcctgctttggcctcccaaagtgctgggattacaggcatgagccactgtgcccggcctatatactcgatttcttaatgataataacgaataagaattttagagtaggccaggtgcagtgactcatgtctataatcccagcactttgggaggctgagctgggcagatcactagctcaggagttgaagaccagcctgggcaacatggcaaaaccctgtctctacaaaaatacaaaaattagctggacatggtggcacgcatctgtaaccccagctacttgggaggctgaggtgggaggatcctttgagcccaggtggttgaggctgcagtgagctgatatcgtgccacggcactccagcctgggtgacaaagtggagaccctgtctcaaaacaaataaaaacttagaagagggagagaggacttgtaattcagttgggaaggatgagtaagatttatgtagatgaatgatgaatggaatggggttgggcctgaatatgtgtcaggacttgtggatagagtgaaagtgagaatattcaaaatagtcaaacaaaatatgggagaagagtagtggttttgtaagacaaatcattagagaaaaaattgaaagccagattgggtccagactatgaaatgctttcaatgtaaggcccaaggagtttgaatttaaaggatattgatctaggagagaagtaggtgtaggggaagtaggctgaaagaaagtactgttctaggaagactaggaaagatgatactaacattttgagattggaggatgttcaggttgtatgaacagaagctatgaattcaagcttaattgatcagttggaaagggacaattgaggatgagaaattctgtttcagttgtgttaatctgtcaatgttagaccatagactcatggtactggtactcaagagagaagtcaatgctatttacctttttctctacagcttccaaactacaaaaactttaaaggcacgattcaagaacttggtcaaaaccagtatgcagtcagtggtgaaatatttgtagtggacagaaacacagtagaaattacagagcttccagttagaacttggacacaggtcagtgtaaatatgtgatctgcctgagggaagggcagtgtattaagcaattttttctggtaaggatgattccaccgttgttggtcctaagcgtgcgtagtgttaaaaaattcctgtaccttcttttacccttcagttgaatttgtgctttgaatatttaaatagtatttatatctaagtagcgtagtatgacttatgttaggtaaggcttttatagactattatctttgtatttatttaaaataaaaggagtagaatatgacagtgtttttaattcttgtaaatatggtcagtaaattcatgtcagcatcagctttacaaatctaaaagtatgcatgtcacctcttgacagttccagttgatgtcatccttttcatactcagcctttatcttgccctttagagtatgagtgggtcagcaccattacttcttatgtcttttcccaccaccgagatccctgtgtattgccttctatactgattggataggagatgatagagattgaggtttcctttttaattccccatgagagttgagaattttcaagactgtatgacttgtagtatgagaacatgagagtgtgtcatgaaaagaatcactaatttttaaatctttataggtatataaagaacaggttttagaacctatgctaaatggaacagataaaacaccagcattaatttctgattataaagaatatcatactgacacaactgtgaaatttgtggtgaaaatgactgaagagaaactagcacaagcagaagctgctggactgcataaagtttttaaacttcaaactactcttacttgtaattccatggtaatttattagatttactgttaatttaatctttcttgcatggtataagtcggattattataattggtttcatgatgggagtggctatagtaagcctgaaggcatttttttttttttttttttcccatcctgcag

SEQ ID NO: 29161 - DNA, 2300 bp, Homo sapien
aggctcagggaagttaaataacaaggctatggatacttggtcaggttcagaaaagtttgcaccccaagttcaaggtaaagaaaggcttcactgttctgaagtccctagtatggcaaagttacatggccatcagagagctaattaaaaaaactatgtttaaattatttccatgtttcagagttctccacctctagactcagaatgcagtttaaagatgtgacctgagacatttttgttttcccttgagaggaaatgcacagttggaagttcacaaaaacacctcttcaaaaaacagtaatactgttttcatctttataaaaagctttcatcacaactctttggtggcacttcatgccttcaagtactcattttggtgatcgttggctcccttttagtctgtctcacaagccaggttataaatggtttgaaatcaggggccttgtttttactttgaacccatcgcagagcctggcacagcgtggcagagtgtgcgcccaataaatacttgagtggaattacactgaaaaacaggaagaagtaaagccatcttccatctgccaaagactgtgatgttgctgtattggtaattttcattcttagaaagctttaatgtgaatgaaattattccttactgtgcatttgaaaattccactgaaaacagttttaaaaattaagcatgccctcttagaggcagggggcacagttctggacagatgagaaaagtgacagtgacatctctgcattgttcagagaagaaaggtcaacaaagagtagaaatagaacactcaacccaccctgcattctttccctagaacattctctgtgtgtcccttatcatttaagcttttcatatgtagttttcttgaaactgaccatatgctcttttggggtgaggggaggagacggaagaaggagatggagaaggtctgagatgatttttttcgacagcagcgtccacttaggcccttggggaggccgggtcacggggcctccttgcaccagtggtctacaacgtcttgcctgcggtttacaaccgctcttttaaaataatttccctttgggacggcccccggcttcttcctgccacccccatccccaccccgcccccatcctcatccttagaggccccaggcaaacgcttcggattcccggttaggtctcagagtaaacagcacgcttggaggattacaatcgacccgaggccaattcgaccctttccctttgccgccctcaattgacccttgaagcagcccctgctctcccttcaaatggaaaacccacagacacacacacaaacaaaaaccccaagtcttcctttcggttgctacccgcaatgacgtttcccccctcgggtcccgcccctccagggggcttggaattttgggattggccgagaggctgtggcgacaaggcccggattggacagcatggcgctgactgacagcgggggcggccgccgcgccctccctctctccccggtgtgcaaatgtgtgtgtgcggtgttatgccggacaagagggaggtgaccgtggcggcggcggcggcggctctgtttattgtccctctcggtgtgtgtgtgtgaggaaatcggggctgcagcgaggctaaggctgcctttgaagcagcggcggcgaccgggacgactactctggcgactcgagtggctggccttcgcggagtgtgagaaggacaaggcacctctgcgtcctcgccacgtccgagcgcctcgggctccccggccgccctcgcggctcgcacgcccgggcttcagcccggcctgcagcggcgcccgcgggcgggcgagaaggcaacgccgccgctcggccgccgccggtcgctccctgctttctcctcagccgccgcgctaggcccgggcgacgcggacgccgcgcctcgagtttgagggcagccggcggcgcggcctcctcagcgggctcggctggacgtccgctccggatcttcgcgatggggcgcgggggtcggcgcggctaggagtgcggcgagtggagcggtgggtgcggagcggcggggcccagcggcccgcagggaggcgggagcggcggctgcggcctcagggcctgtgagctggaggcactcgccatggccaagtcgggtggctgcggcgcgggagccggcgtgggcggcggcaacggggcactgacctgggtggtaagtggctggtccccgggacgggcggctgcattgttccgggcccgcggcgggggcggaattccgaacgggcgggggaggggaaagggagggaaatcccgtcccccgaacgggcgctccataggggcctg

SEQ ID NO: 29162 - DNA, 2300 bp, Homo sapien
acctgtagtcctagctacttcagaggctgaggcagaggattgttgagcccaggagttctaagcagcaatgagctttgatggcgtcattgcactctagccggggtgacagagcaacactttgttttttaaaaaacaaaacaaaaactatatgagaactgatgtgtattttataagaatttttaaacaattgtgaaagcaggaagaaactagaaaattagcccagagaaagacccagcatgtagagatctgaaagctgtgaggaaaagaatagattaaaatagctcaagcagttttgaaccagtaggatatatcatcctggtggtactgacatgtttatcaccctgtgaaatacattgagtgtcaggaaaagatgccccatttatcgaaaactagctttgataaatgtaggattattttatagttcagttttcttaagtgataagaaagagaggctcacttgtgagacagtgtagcatggaagccaggaatgcgaatgttctgcagtgcacaaggaaactccactgagaaaaggccccacatgttaatggtgctgagactgagaaaccctaatctaatacacagaataaagagttgagaataaaattttctttgtatttcacaaccatctgtgattctcaaattacatatagtaaagaacaatgtttttgttttaatttccaatcccttatggacctataacttttgtaaaatacactgaaaatttcatggcaatatcaaattgctgtataccgaacattcaatttctctacttcttgcttcatttttatgcacttgtaaacaaacaaagaaaaaatttctgtactacttgtgtatgggtaacaaataatttgtagattagcaccaatctgtggacattttgaatagcaaaaaaaatagagcatttgtctctgaatattctgtaataaacatgatttttgaaattagggaaaagtttaaaaacattcatttagtatttatgacactttggccaataggcaattgactggtgaaaaacaaatgcaaaatttgttaaaacttataaaattaaaatatttggtttttggttttgtttttacgtcagaatacctagagaacatgtgtagataggacaaagttgataagtcatttgctagcatttgcctactcaccatatcataccccagggcaggtggcttcttatggaagtacatcttcctatggatcccagatactgcctcagaatcctccttaacatagtacttaaagaagtcactatcactttaaggcagttggtgtcaggtatgaaacttatcatcctaaactatgttctgagggtcttttgaatataatactatgattagcttaaccttacattcttttaattttttttaaacaattctgatttatcaaagtaattaaaaatctcaaaccaaaacttttcatgtgctggttacttgtcccaagtgtactattcaaaatcttaattatggtaaaagaaatttatgtcttccttttattgccatactgtctgtgtcaagaatatgtcttgggccaggtgcggtggctcacgcctgtaatccccagcactttgggaggctgaggcgggtggatcacctgaggtcgagagttcgagaccagcctggtcgacatggtgaaaccctgtctctacttaaaaaatgcaaaattagccaggagtggtggtgcacccctgtaatcctagctacttgggaggctgaggtgggagaattgcttgaacctgggaggtggaggctgtagtgagccgaggtcacgccactgcactccagcttgggaaacagagcaagacccctctctcaaaaaaaaaaaaaaaaaaaaaaaaaaagaatgtatcttaaactgaagcgagaccccccccatctcaaaaaaaaaaaatgtaccttaacagcacagaatgtaatttactgtttttacttatagtaaaaacaaccattggtttagggaagaaagaaaatcaggtgactataaaggtatacctaggtcatgtttgttgaaagtaaagtctttgaagaactatgacctggttttttttatatataatcaaacttttgttttttgtcagaaaccctaatgatgaaaaatatagatccatccggattggaaacacagccttttctactagactcttgcctgtcagaggagctgttgaatgtttatttgaaatgggctttgaagaggtaagtatgttcaaggatttcctctcccctcttcatgcacaaagcagccattatcatgttggtgaataattgtttgaataagataatgttttttaatttatcattttg

SEQ ID NO: 29163 - DNA, 2300 bp, Homo sapien
ctcggcctcccaaagtattgggattacaggcgtgagccaccatgtccagcccctaaaattttatttgaaaaaaaaaaaaaagttctgttgcatttttaaaagttacaagtactgtataatatatactattctcatataattagtaaaggataaataaatgtatcaatggaaaaagaaacccaaattaagaggaataaagtttgtgatagctatatctccagacccaagcccccaatccattgtgtagttggacgagactacatttcccagactctccccttttatctttttatgtgtttttaaattttttttttattttttgtaaatctggccttactgaaatacccccttttatcttgatgaggcctcattcttagtaatgatatggtagagaaaatgctgtgtgtcatttctgggctcatgtggttaaaagtaggtgtgacttttttttttttttttttttttttgtccaagcaggctgcctggatttgtaaataaaatttcactagaacataaccatgcccatttattttcaagtattgtctgtggagcaacagctgcagaggcagagttaaatagttgagacagaccttatggctcacaaagcctaaaacactatgtggccctttacagaaaatgtttcttgacccctgttctaaggtatggaaggagactgggtccactgacattatgacacctgcattattaaagtgttatatgagccagaaagaaattactcttgtgttaagcccctgaaaattttagttacagacggtagtaacatactactatctgttgaacacaccatacttggaaggtggtccaaagatttacatatttattaaaagcgtacgtatatttgggagacgaatagtcattgaactggatgtcatagcttagggtcttgttcggagattctggaagaaaatttcaattcttaaaagtaaacagatgaaacatcaagaaatttaaaagaggttattcaggcaaatcacttatcttaagaaataaagtcaagaaaaatacttcgtgaggttgaaaaggaatttctgcaaagaaggaagccactggtaaagtacactttcaagaacatggtggggaagagactggattaaagtagtaagggatgcatcttctaagaggaataaaagaccttgatcacatgatctacctaaaaaacaagtcacaaaatattacttacccttactgtgtgggatgcaaatttttattcccttcccgcccccgacattctataatattgcgtaattattatgcatgtgttttacgctggtcaccacgcggtaaaccgaatccacaacccattattatgtcgcaacctatggtttaaaaatacacttccttacagaggaatcatatactagttgagctggaacttagattttcagtcattagccaaattctgaaaagaatccatataacaaacccagcagagtttatagccatggttttgtttttgacgtttgttgctccttccttctgtagtctttcatccacatctatgtagaacgtcctgacaatctgcgaagagaaggctctaaggtggttttatttgtggggaaaggagggaggtacatgcggtttctccaccttaatagctggatcaattaggctggccccggagcgcaaagggatccgggtttctgagaggcacgtgccagcaccattcgcccgatacctctagaccaaagccggcctcccctccagccgagctcctccgtcctaaaggactcgacatccccctcctccaggcccacacccctcagccccggagcccaggccccgcctctccctgcggaaccccttcccaacctgtacgaccaggccccaactctgggtcgaagcacctcgcccctgccggccgaggccccccaccttcttccgaacagccccttgccccccgcgaaggggcagccgtagctcccagccgagctcccccgctcctggccccggtccccgaccccgccccaggcccccgaccccgcccctgccggccgaagaccccgcccctgccggccgaggaccccgcccctgccggccgaggaccccgcccctgccggccgaggaccccgcccctgccggccgaggaccccgcccctgccggtggctgcggtagctgctgcgcgctgaggcgcctgctcagtgtgggacgcggagagcgaggggcggcggcggcgcccgctggcgctcaagcatggcggcggcggcattgggcagctcctcaggctcggcgtccccggccgtggctgagctctgccagaacaccccggagacctttttgg

SEQ ID NO: 29164 - DNA, 2300 bp, Homo sapien
gccttttctgactttacgaggtagcacagacctcattgtcccttttgtgttataataattccactatagcacctgtttcaacagtttgcacttacttgtttctatgggtgtctccctttactagaccataaacttcttgaaagcaagagccatacctctactcatttttgcattcaaacttcaagcattgataggaagaaaatgagtggttgttgaaaatagcaaaagcacagagatgagaaaagttagggtcaatcaagacatgtatagtgagaaaatcagtttgctgggtggcaagctcatttaatagagaatgggagccataattggaaagatagttttgaatcagattacaaagaatttaaggcaaacctaggaagtcttaataggagggtaggataagcagagcccatttgaagattttggtgcaagaagacacgatggaattgtagcaggaaatatggtaccaaatatgtaaagccattaaatatcataaaatttcccacccttttccagatcaaagaaaaggtgataagaggtagatacaaaaatgatggtctttttatttttctgaaagattttgtcacctcttagccaagacgattttgtgatattacaaaagaaatagcacattaaaactgtatgtttcttatgagttcagcttcagagaaaatattgtaggtattttcacactattattttaaagacagcaatgaaaagagatcaagtttaggtacttactcatcaagtgttactttataaccacatgtgtttgttttaattcttcaagaaactctactttgtcactgaatgaggatcaactagaggtgactggttaggcctgggacgaaggtcaaactgagctttgctgaattattttaaacaaaatagatttccaaactcatttaaatccaggaccaacctggaaagctaagcttgactcacattcttctgtaggggtaggaaagaatgcagagcactctacttggaaacaatggcttcaagaggcattgcccagaaaaaaccataaatatgactagaaggtccagatgaagattctatgctcaaccatttttctaaagaagagcaaggacaaaactcacgcctgggatagcatgtgaaaaacagatgttcgatgaataccatcttgtcgacttcttgcttttttacattttcatgttatattttccctttatcggtttgcagtcagctctaagcaaacagttaatgaatttttcacacttagaaacaaatgtctccattgtgacaatggagacaatttttgagcactgtctcaaatctggtgataatttttttttaagtgaaaggaagtttattaggaaagtaaaggaacaaagaatgactactccataggcagaacagcctggtgacaacttttaaaaagtaaaaactttattacaaaaacatttgtttattgtagaaaagctttattaaataaagctaagcaaaaataaggagggaaagatcacaatcagtatacatcttgcagacctttaaagaattatttttgaaaaaacggatatatactgttttgtaactatgtctcctaacaaatagtcgcaacatctcattaataaatattcacctgcagaattattttaaacggctgcatggcatttggatgtaccacaagatacacaacaaatttcctgatgttggccattttggttaattccactttactcacaattactaataacgttgcgagctatagcaataactttgaaactgcagagaatttccttaattctttcttacaattccagtagaatacgatggtgtcccttctccgacaaaagggaatatttgggcattatcactgccaaagaaaaatgcctttttgatgggtgaaaatgctacctcatcgcgttattggcaggtcctcgattatcggcgagtcactgaggttccgagaggggcgtctctgctcacgcaaacagctacccagccgcctcccacggtctgacctcagccaaggtgacgcggcttaaagtcaaccggcggaaagagagtcgaacgggacgcgtgcgtgggaaagcgcatgagcgtacgtgcgagcgcgcatgagcgtacgtgcgtgtgcgcgtgcgctcgagagcgtcatcgcccccgactgtggagaagtgtccggggtagccccgttacaggtatcgctggctaccctcctccttcgcccctcctttcctcctttacattcaaatcaagtcggggttgaatttcgagaggggagtccgaggacctggggcctgatttctttttctctcgccatgcttcttcgg

SEQ ID NO: 29165 - DNA, 2300 bp, Homo sapien
caagagcacataacaaaaaatacacttctcaataacaaacatcacacagggattgtatgctggctatttgggtgagtgtgttatctcttctattgagctgaaaatcattgagggcaaggattgtcaatctattaacgatgtcccttacccacatagtcacacacacctacagtggcctaagacatgataaatgattaataaaaaactttcagattgaatttaggagttgaaataacgtcaagaaaactgttacccacaacttgaaatgtttccaattttccaaaattggaaaagatatattctacacgattttcagttcctaggaaaaataatctagtctcctattaccaattaccaatgcattttaactatcatcgcttgccaaaattagagacccatgagtgatcgatacaggttagggattcttatcatttaatccaattatgttccatttgtatcagttattttcagtccattaaaacacttattcaaactcttgggttttcccctatcttcctttttaaaagtatttccttcaatatgttaaatgaatagaagaggcttttgctgaatccctgcaaaaacatactaaatgactgagactagagcaaatatacctcctgaattaaagtacagaaatagccttcagagagaataatagcctaataatataggagatgttgaagactgaaaacactaagtcttagggctcttatacgaaaggcatgtggcagggaatctttgtttttcaccgtgaaggggaaaaattcagattttaggcataaatatacctccatcctgatgggaaggagacaccaatgggagcaagttaataaaattaaaacctaaaaaggactgggtagaagtggggtcaagataggaaagccaaacattcaggtttcctctgcattcgcatcaattatctgtacgtcaagtggtaaaggcagcagctacggaagctaagctaacagttattgccgggcgcggtggctcatgcctgtaatcccagcactttgggaggccgaggcgggcacatcatgaggtcaggagatcgagaccatcctgtgaatggtgaaactccgtctctactaaaaatacaaaaaattagccaggcgtggtggcgggcacccgtagtcccagctactcaggaggctgaggtgggagaatgacgtgaacccgggagcagagtttgcagtgagccaagattgcaccactgcactccagcctgggagacagagcgagactcctctcaaaaaaaaaaaaaaaaaaaaaaacagttattagaggtagttcaaaggcctggaggccaaactttgaaagcagaggtgatgaaagtcttgggtaccagggatcaagagcaagtcaagcatctgaaacacaaaaaggtcaacgcagaggtaaagaggacaacaggatttcagtggccaaagtacacatgaatacagaattgtgaatgtcatatggagcaaaacactggcaacaagaataagaatgcaagaatgtctgatttgtgaaagaatcatgatatgttatgaaaattgatactttctgatttcttctatacatcttactaattataaattattctgagttgaccagtaaatgcagaaagtatttaaaccagccagagcccaggagtgttctggatacaggtgagctctgttggcatctggaacagaagaactggatgtggcagattgcaccttccaaagatgatcaccatagtatctcctatctaatacgctgttccgcaatatgactttgacatttcctcatcaagaagtggagtcttattaccttactctgggcttggctttactggcttgttgaaccagcagaatatgacagaagtgacactccaacctctgaaaagactgtaaaaacaccttgcaatttctacctgagcctcttaaaaggatcactcttgggatgctgtctctgaggactgtggccatatgaaaggtctcagccacatgaaaaggttattggttggtgttcaggcatgtagctccagcagaactcctaggaaacagtcatcatcaactgccagccatgccacattccaactcaactgaacctttagacgaatgtagccctagcctctatttgacttcaactacaagagagatgccaagctgagaccagttaagccacagaactgtgagatataaaaataaattgttattttaagccatgtgtttcaaggcggcttgctatgtagcaatagataatcagtacctagggttacagggatgattttttaaattatctctatctatggctagtaatactggggccat

SEQ ID NO: 29166 - DNA, 2300 bp, Homo sapien
ctctcttggtagacatttgagtttagttttgtttcttttcaatttttcactaatataaacaacactacaatgaatatccaggtagataaatcttgttgctcaaccttagttatttcctgaggatgaatttgaagaattagagtcactggaaaaatgaaatgcaaaaatgttatgctttcaatagcatgccaaatttcccttcagaaaaacgacaccaaattacatacctgctatccacatgtatctatgtttgtgttctaaaatctcctttaaaaaacaaaaacaaaaattaaaaaaaaaaaaaactttaaaccgcaatcttttaaatcacagtatcataacgtctaagagacagaagatatcttaagagtcatttagtctaatctcctgcattatggacatactttttcatgcagcattcctgatctgaggtatctatcgtgcaatttgtagaaggtgggacagaaaacaaacaaacaaacaaacaaatcttaaatatccttaaactacaaagcaattttcttcacctctgagcaatgtaacactgttcaaactgttctaaaatgcatccagaataagagtgcttcaatagaaatgaggaaactttggcaggctttcaacatacttgacacaggtcaagaaataatcaagattttttggtcattctccacttggaatgggtttgctctaggtgttggcagctgaacatacatgtcttgctctaggcagttgcttagcagtttggttttcttttgcttttgggaattcaggaaacagaggtgggtggtcagtgggagaaggttgattgtctagagaccaaaatgaattaaatactttattacctttccagtaaaggggctgtgagtctaactgtatgtgtggttccctccaccacaccctaaatcaaaagttccatccctggagtctctttaattctagagacactgagatttagctcatacagaaggagaaaatgaccttcaactggataagctttccttgagtacccattagatacaaaacactgctggatgttgcagtgagaacaaacaaacaaaaagcacagggaatactcatatgtgagtgaagagataaatctataaatatataagttccgcaagtgattggcaaataaaattctgagagggcaaagagaggggaaagatttctgcctcgagtcagaggactggggtagcggaaaaaagctttagaaaaaaaggtggtatttgtagagtctggagaggcgggttcctctgccccaaactggtgtctactgcagatatggtaaataattaaaatcatgaaataagaacatcactaaaaccattaatttgacttactcttaaaacacacgcgcgcacgcgagcgcgctcgcacacacacacactggcgtgcgcgcgcttttttaaggggcctatagactccatttcggctgcaggttaaagtcatcccaggaaggagaaaggaaaattgaattccaccttcttctgatttagaaagctagattggttgaggatcgggatcagggaccacaactcaaccccgaaactttgggcttccagaactgcaggggaaactgattctgagatcagacaacggaccctggggcgggaggggggtaccttattcataaccctccctcacaatagcggagcacagtactcagcacccagtaaacactcatttgtcgaattgattttaagcctccgcttttcccccaaggagggcaatcaatcccttgcacgttttgctcctttcaccagcttaattcagctctgatctcagtagttagaaaaataggagaaagaatggggccatagcctgctgcaagtagagctgtgtaagggggtgcgaggaaggcaggcgagagcagcagagggagttaatactcctacctcagctggtctccggcagccaacgctcagcccccgcctcctctctccattccggaccccgcaaccgcgaggcgagagagcagcgccggcgaggcactggctgggctctgactgtcacgttaattccctgctgctttttctagtccccagccgcctcgcccctcctccctcattcccagcctgggtttggaggcgatttccctctattgactgagccgactgcatctctgggcaagcggcgctttgcctctctcctgtctttgtctgctcttcctgcaaggctacggcgcctggagcagggtctgcagcggccgccgcagcaacgcgagccaagtcgtgccccgcacggccgcccggggccgcaccctcgctcggtggcggcgcccgaagacgccagccgcgcca

SEQ ID NO: 29167 - DNA, 2300 bp, Homo sapien
aggcgagagcagcagagggagttaatactcctacctcagctggtctccggcagccaacgctcagcccccgcctcctctctccattccggaccccgcaaccgcgaggcgagagagcagcgccggcgaggcactggctgggctctgactgtcacgttaattccctgctgctttttctagtccccagccgcctcgcccctcctccctcattcccagcctgggtttggaggcgatttccctctattgactgagccgactgcatctctgggcaagcggcgctttgcctctctcctgtctttgtctgctcttcctgcaaggctacggcgcctggagcagggtctgcagcggccgccgcagcaacgcgagccaagtcgtgccccgcacggccgcccggggccgcaccctcgctcggtggcggcgcccgaagacgccagccgcgccacgcactgcctgcgtcccgcgccccagccgccgcgcaccaacgccgccgccttcgccgggagccaagcccgccgggccggcccggtcccaggtgggcagctcggcttgcagctggttggaggtggcggccgctgcagccctggcagcgggcacacccctaagcatacgcacccaacgcctcctccctgagccacgaggatggagcagccaccccggcccgggactggcgcaaggtaaggtgcagccgcctgttgcttttcgcagagcgcgggatcatccctctgcccgggtacctaggccgtccctccaaggaacaagtagaggagaactattacaccagttctaagccgtgcctgtctaagcctccctgatcccttttgcgcagaccctgggagagacctcctcctggagagagagagtcgaccctcttcgctcctgttcagccggctgctatacaatagtctgcaaacttttgtgaccccttccctgcgcggtgctcaccccgtgctgtgcaacttgcaggtttagttcttgcccttcccccagcccctcttgccatatgcatctgcccatttctctctgtgtgttcttgccagtcgacttttcactccccgcagctctggctcctgaggcgagggtttgggacccagcagtgctcgtcctgcctctaggagctgggtagggacagagaaggtgaaataagagaggtgggacatggaggatggctgcggccacccctgaagcttcgtccagcgcgatgggagtcagtccatccttgcacacgccacccccaactcggcaatgaaacctttggagtggcttgcggctgtgcgccgtgggaactgcaagtgcagatatgggtgggtgaagtaagtggctcagggagggaaaggctgctcgtgcggtggaggaggaagctgagggtcgggtagatctgcccacggttgagggaaatgaaaaggtactgctaatgtgggcgagcggccagccctgagaggccatctgacgaagaggaaaagggatttgagtccggagggcgctggcctgggtatgtaaatacagatgggggaggggctgggtacctgggggcgcgtggagacaaggaatggagccccggaatgccgggcccttgggtacttgggaaggcaggctgctgagtgcctgggatggggcgatcttcctccccagaagcaaacaaacctccccgcgagaatctgaatgcgttggcatcttgggtggtgactgaatggtcagatcgtggactagggatgcttctccaagctctaagaggaccatagtctgctctcttctctggcacccgcttgcttctacgctccttcacctctgcagccaggtcggtagacccacgcccaccttccctgccaggcactcaggagtcaaggatgtttccacagccgcagtgtaggaaggggactcctgcctcccagggggagacgtgtgtgcggggtagaggggagtccccagcgcgcggcgagtaaacaggggtccaaagtggttggaggagagcgcaggagcggaggctgcggtgggagccactttcccccgcccctccacaaatcgcacctgggcggagcgagggagtggggggagccctgtgctgcgcccgggaggctggggagcgcagagctggagggcgtgcagggaaacgcagagctaggaggtgtgggcctcgggtgaggggagacccagctcttagacctgggagcccagacagaggtggatctgcccaccttgcagctcccaggtagattcttcttgtggctccagatgctctggcgaatgcaggagggggaggctcttttctcctttgcaccccagcaatctggagtgcaagaccgttt

SEQ ID NO: 29168 - DNA, 2300 bp, Homo sapien
ttctcagctgcttgaaagttaccataacaacttagaacattattgactgtcatggtcagcaaatagaattaaataatttggtatctaatgacaatggaactgcattgtccttcagcattgagcaattacaaaattttaaaatgaggtttctattatacttttattaaaaagcatactgttctgttagttgttagtgtatatgtgtgaaacaaatattaatcagggtttgtgataaaaacataaatataaatatattaacttatttaattggtaaaatagccatgtgtatcagttagctttcgctacataacaagtatttacaaattcagtggcatttattattgctcacaaatccgtgagtagcttggtggttcttctagtcttggctccttagcctatggtcagctgcagatcaagtagttggctctaatgatcaggctggttttcccatatgtttggagtgtggctggctctaggctgggatacctcagctagaacaacaggcttctcctttatatggtttcttaacatccagcaggctagccagggcttgttcacatgatggctgggcagggttctaagatcaagagcaggccgggcgcggtggctcacgcctgtaatcccagcactttgggaggccgagacgggcggatcacgaggtcaggagatcgagaccatcctggctaacacggtgaaaccccgtctctactaaaaatacaaaaattagccgggcatggtggcgcgtgcctgtagtcccagctacacaggaggctgaggcaggagaatggcgtgaacccgggaggcggagcttgcagtgagtcgagatcgcgccactgcactccagcctgggcgacagagcgaaactccgtctcaaaaaaaaaaaaaaaaaaaaaaaagatcaagagcaggaacatgcaagaccttttggagaagcctaggatcagaactggcatagtgtcacatctgcctcatgaatgtctcatctgcctcaacagtcccaatctagactaaagaatgggaaaataggctcaacctgttaatttaaggagctttaaagttgcattgcaaaagaccatggataatacaagatgaggaatcatggaagtcagttttggaagcaatctatcaaaccatgcgaaatagatattatcatgcccattttatagatgaaaacgttgaggtccagtgttaagcaacatgccctaaaaatcacaaaactaataagttcaaattactagcagtaactagtaactactaagaggctgaatgacaaagttagacaaacttaggtatgcctaattccaaagtcctttaaaaaattactgctttataaggttttcaaagcctttaagggtaatagtattaaataatcttttcaaaaagaaaagtggtatctgaagatgaggaaatagcagagtataaaattgaaacacaatagtccattcatcttcatttacttataagtatgtctagtttaagtccagggacatttctttaataaaacaaaaaataacccttagtgataactattgattattaattttttcttctctgcctgcaatagacattagttggtggtgggtgtttctctatggtaatattatgcaacttgacagtgatcaagtgcaactagaatcctcatttgcaaaacctgtcacctcatactctttgagaatatttaggtaaagtgtgaatgtattggtagtagtaattgtagtagtagaggtagtattaaatgttgtgcatttcaatctgaatgtattaatttatcaatagcaatgttttattctatgggcgatttcactataaaaataagaagacctggggacgccttcagcagggagccaaatatatttgggacaatctgggttaataaatactttactgcaactgtcagaacctttaacaggctgatatccattgtgagtctcagaaagagtgtttttcagacttatgacttcataatattcatttgtagaacgctcagacacctaactttccatagaacccctggaaaatgtaaatgtgattctgatccctttgaaggtgtattcagagctaataatatttgccaagcatctaccatgagacagtcattatcagaaccacatcggaaatcaatgaaataagcattattcttagttctagttgaggaaactgacatgcggaacaattagttggcctgtccaagacctcctagctggtatcagaaatgaaagttgaacttgattttatctagcttcaggttctggatgatttctgtacattttgttgagaccaagaaagtttaaacggtccag

SEQ ID NO: 29169 - DNA, 2300 bp, Homo sapien
tggagtgcagtggcgtgatctcggctcactgcaacctccgcttcccaggttcaagggattctcctgcctcagcctcctgagcagctgggattaaaggcatgcgccaccaagcccggctaatttttgtatttttagtagaggcagggtttcactgtgttagtgaggctagtctcaaactcctgaccttgtgatccgcccgccttggtctcccaaagtgctgggattacaggcgtgagccactgcgcccagcccacagtagtcccttcttatccatgatttcactttccacagtttcagtcaactgcagtttgaaaatagtaaatggaagatttcagaaataaacaatttgtaagttttaaattgcgtaccattctgcgcagtgtggtgaaatcttgcactgtcctgctccttctcacctgggatgtgaatctgctctttttccagtgtatccacactgcatgctctatctacacagtagtcacttagctatctcagtgatcaggtcaactgtcatggtatctcagtgcttctcttcaagtaacccttattttacttagtaatagccccaaagcatcaaagtagtgatgctagaatattgttataattcttctattttgttattagttattgttaatctcttactgtatctaatttattaattaaactttatcatagatatgtatatctagggaaaaaagtttgtatagggtttggtactatctttggtttcaggcatccactgggggtcttagaacatattttccctggataagggggtactactgtaattctttttatatgttgctgggttcagtttactagtattttattgaatatttttgtgtctatatttataagggatattggtctgttttctttcttgtgattttacttgcctgggttttgtagcaggttaatactgacctcacagaatgagttgggaagtgacatgatttggatttgtgtccccacccaaatctcatgttggattgtaattcccagtgtttgaggtggggcctggtaggaggtgattgggtcatgggggcggatgtcccactttggtggtgctgtttttgtgatagagttctcacaagatctcattgtttaaaagtgtgtgacacctccctactctctctcttcctcctgctctggccatgcgaagatgcctgctcccactttaccttctgccatgagtcaaagttccctaaggcctccacagtcatgcctcttctatagcctgtgcgccacttaaaacttttttctttataaattacccagtctcagggatttctttatagcaatgcgagagtggacgaatacaggattttcttctttgttttgtaatgttatgctagagttgggttggaaagtaaatcatgatatgtagggttaaataaaacccatctgaggccatgactcaccagatgccttagataggaatttgggcaagataaaaaaatcagaggttagtcatcattttcattgtccttattttctaagaagcctgtcagtaaaatttttttatctttatcactcataagtaatttataaaatgttttttatttcaaagtttttggttttttctctttattcaaagcttatattttatttggctttactatgtcagaatacagcttgtacaattatagtttagaataaattgataaattgttcatactctgatgattcagataatcattgcatagcatttatccccaacttattggtttaatacaataataataatttatttgctcaaattctgcagtttgaacagggcttattaataacagcttatctctgctccgtgaggcattaactagggcaacttaactggaatgggaggaatctcttttaaggaggatattggtactggcttttggctgggagcttacctggggatattggctgggttcttggtttacttccatgtgttctctttaaatggctagactgggctttggttttttcagtatcgtggttggaatctgagagggaatgttccaagaggtagagttctgaaaatatagcctgcatgtacaggcatgcatcacaattgctaatgttccattggctaaagccagtcacatggccaaaaccagaaataatgtatggagggactatacaagggcatatatactagtaaaagtgttttctcaatagatcaccaaagaatttgccacacctgatatatagaaaagtttatgtaagttttatgaattccttgaagataatgtgttttgtttttagactgcagtactcaatatatatttatccaactatatttactgtattgaatt

SEQ ID NO: 29170 - DNA, 2300 bp, Homo sapien
gtcatgttgccaaaaaaaaacttaataggaataattattaaagatgtaattatttgcatttcagttcctgactagctcttacaatttggacatgtgtaaatttcagcttttaaattttggtttgtgtttgaaaaataaaagcatttctcagctgaactattaaaatatttgtagagtttttttttacatgaaaatgagattttaatactggttcaatttttaagccatatattacagtttaaccaaaatatatttttatagctctctgcttaagtaaagttatgggtagtaatacctctttgtgaaacacatgtattatttattatcattataaaagaaattcatgttggttggaagagtttgaaaaaatgtatatacatatcaagaaaaaactaaaatcacaatcacatataatttcaccacctggggctaagaattatttcgatgtttttcattcttttgtattatgaaatatttcatatgtgtaacaaatacccatttatgcatactaggttttactacattatggctttattatatattcttaagaaaaggtttttgttttgttttgttttgtttttttgagacggagtctcgctgtcgcccaggctggagtgcagtggcatgatctcggctcactgccacctctgcctctcaggttcaagtaattctcccgtctcagcctccagagtagctgggactacaggcaccggccaccatgcctggctaatttttgtatttttagtagagacggggtttcaccatattggtcaggctggtcttgaactcttgacctcaggtgatccacctgccccagcctcccaaattgctgggattacaggcatttgccgctgcgcctggccaggaaaagttttttgaagaaataatgttacggagtcaattgaaggctcctcttcatcctacttccccttcctacccagaggtaaccactatctggaagttttccactatctggaaaaagtatgtttttatacttttacgatgtatgtaactattcattcaacatggagaagtatcactagtagctgaaagcactgcctcagccaagccctccctaaggaggtctcaactgggactcctgaaaagggcctgaactgaagcctctgaatggaagtgcctgagctaggaaagcagagaagcctatgagcagggctagtgggggtggagggaccaggcagtgagttcttggctgcaaatccctccagaagctgtaacatactagctgtgtaccaagtctgatgtggagatggcagtttcccccaatgaggtctgccgggcaaagccttgtaactgtctagggtcctgcctgaaagataatacataggattttggcctgcagccatactcctcaatatggtaattctatgtttaactttttgagaaactgccaaattgtcttccaaagtgactgcaccattttccatttctaccaggaatatgtgaaggttccaatctcctacatgtttgccaatagttattatttaatctgtcttttggatcatagccacactagtgggtatgacatggtatctcactatggtttttcattgcatttttctgtaactcatgaagtttaacaactttgtttttgcccatttttaaactgggttacttgtgtttttattattgagttataaaagtttttacttattttggaaagcagatatgtatcagatatatgatttgtaagtgtgttcttctatgtgttctcttctcattgtcttgataatgtcctttgaggcacaaaagttttcaattttgatgaaatccaacttattgatttggttgcttgtgcttaagagtcattctaggaaaccattgtgtaatccaaaatcacaaagacttacacctatattttcttccataagttttatagttctaattcttatatataggtctatgactcatttagcattaatttttgcatatggtatgaggtaaggttccaacttcatccttttgcatgtgtgtatccagttgtcccagtaccatttgttgaaataacttcttttcctattgaattttcttgtcattattgtcaaaaatcagttgaccatatatataaggtttatttctcaagggcttctcagttttattttatcaatctatatgcatatccttatgccagtctcacacagtgttaattactgtagctttgtagtcagttttgaaatcaagaagtatgagtccttcgttcttatttttcaaaattatcttggctgttctgtgtcccgtgtgtttctagataaattttaggatcatcttgtcaatttctgcaa

SEQ ID NO: 29171 - DNA, 2300 bp, Homo sapien
taaaaggtatgaggttagagaaatataagtgatcattaggtttaggagatcattagattgaactgttttcacatacttggcttagatgcaacagaaggaaaataatgcgtcagtatgcaaaccatgtgtcttcagatttcttatttcacagatagaagtgagctactgtagtgattcagtatccagccacactgaatattaacagaatgatgatgaaagagcataaattgctatatcaatacaactccccttaattacatgtgactgctgtgattttagctttctttttgataattaaagatattaacatttttaaaagatggcattaaaatatgagcttctttttttccagctagaaatttgaaagtcaatcgggtaatttcactttaatcaaagggaatttaatcaaagggaaaacaaactgtttttttgtgtgtctttgatggtgtaggagctcatttgaaggggaggctggatgttctggggtcaagatactgtgttggtgagcctgaccaaaaggtcaccatttcgggaagcaaacactggttccctcagtggtgttctgcacaccatttagttaggtgggttagccaaaatcataggcccaagtttttattaaaattttgttaataaggcagaatagacataaagtattgagttaatatagtattttttgttcagaaagcatggagcgtcacttttcggccttttggctgagatcaagtgcagaaagcatggagcattttatgttgttactttatttctatactgtttggatttagaggaaaatgaagtaaaattagttctcttttttttttttttttttgacaaaggctcatcctgttgcttctcctgcctcagcctcctgagtagctgggactacaggcatgcaccaccacacctggctaatttttgtattttcagtagagatgggttttcaccacgttggccaggctggtcttgaactcctgacctcaggttatccacccgccttggcctcccaaagtgttgggattacaggcgtgagccaccacacccagctacttattctttataatctttcatttcagagctctaaatcatcccttttagtgaactcaaagattttaaaaccccttgaaaccagtgtcttgggaatgatgaatgaatctctttatttgttttatttttcatgtaccagtatttttattttcatgaaacttttatttaaaagttgggttagtatttacttcttactaaaatctgagttaaatgacatttgtgaaagtgctccacacccaaaaaaacacccaataaatgtttccttctaatgtattcaatgcctatacccccaaatatcttacaagtaagatttttgtataatctgtatcatatctaattttaaattatggtaaaaatattaacatgccatctaccttcttaaaattttaagtgtacagtgttattaactgtaagcacaaggttgtacagcagatctctagaactttcttctccatttgtttttttcttacctctcaaaaactgtaaatagtgtattttttcgagataagttggggaatattatttccccaactttgttgataaccaaaagaagttaaatttgtttcatgtaattaatcagtgagtgagctgcattcaaaagggaagtaatgggccgggtgcggtggctcacacctgtaatcccagcactttgggaggccaagacgggcggatcacgaggtcaggagatcgagaccatcctggctaacatggtgaaaccccgtctctactaaaaatacaaaaaattagccgggcatggtggcaggcacctgtagtcccagctacttgggaggctgaggcaggagaatggcgtgaacgtgggaggcagagcttgcagtgagctgagatcgtgccactgcactccagcctgggtgacacagtgagactctgtctcaaaaaaataaaaaagggaagtaatgatcaactgtgtccaagttctactttaagtgtgtgtaatattctctgtagacttttccccacagacttgtttgagatcttcattgacatagggcattatgtacgtgatatcagtgcttatgaagaattggtatccaagctgaatttattagtggtaagtcctgagttttcaatattttggcaggctgctatgtagtcaggatgtaatttatcacagaaacccatttcctttttatattttgattaggaggatgaactgaagcaaattgctgaaaatattgaaagcattaatcagaacaaagctcctttgaaatatataggcaactatgcaattttggatcatc

SEQ ID NO: 29172 - DNA, 2300 bp, Homo sapien
tagaaaaatatgttttcatagttttgagccttgctatataagctataagcttggtgcaagatctcttgtgggattttattttgtgtcattttacagagggacccttaacatttgagatgatagtgtatgtgtcttttagaggcagtgtcattcttgcctcttaatcgctgcagctttcagggaagttcaggaatattctgggatggccaaaacattagtttaagactttaattttactgagtagtggaaagatgggaagcacaattggtattctggtgaagatgagaagttcagtgcagtcatgtctcactgcttaatgtttattttttgagatagagtcttgctgtgtctctcaggctggagtgcagtggcatgatcttggctcactgcacctctgcttcctgggttcaagtaattcttgtgcctcagcctcctgagtagtagggactagcatgtgccaccatgcccggctgatttttctgtttttagtagaaacagggtttggccatgatggccaggctggtctcgaactcctaacctcaagtggtcctcctgcctcggcctcccaaagtgctaggattacaggtgtgagccaccaagccaggccgactgcttaacatttagaatgtatgtacagaatactttttctactcagcatcggtcttcctgccccgtcaccttgttttgttttattggtaacattaatcctgattgttttagatctctgaagtttaattagttctgctatactcaccagagtttggctttcatctcgcctttctgcatttccaaaataggaccgtcttcattttaaaaaatgctttcaattacccaagcttaagtattgttaatccaatgggcctacttactatccacaccagaaaaacgttagggttcactgtattcatttaaaatccagtttgggaagatgtaaccaccagacacacacacgagcgtttagtgataccaagatgaggttgaacagggcccagtactcgaagaaatcgtcgaaggagcatcatcgtggttaagaccagactcgaagtaggttttaccctgactccatcactagctctgccatactggactacttaggaaacttcttgtgcctccattttataactaagtgaaataaggaaagaatttgaaatcgtgcccggcacaaaattaagcacttaatagattggcatttttcatttatttaaagttacagaatgtcaggtatatttttaaagcgttatctaatgcagttcagaaattttaaagaagctccagactttcacaaaaggtgaagtgacttgcccaaagccacaaaacgaactggcgatagttatactatacaggtttcttgaatcccaggtcactctttttgtgaaaaatacggtgctgtggcaccttattctcattgcctgtggcttgagtaactgaagacgttttcatgccatatgaaaggtatttagcatgctgcattgattccttatcagattaaatctttgcttttaaagagaattgatttttagcccatagcaattcttgaaagtaaacactccaagatgaagctgccctttcccatcaaaggttagacaccctaaatccagaaaaatcttcaacgtgtaggagacctgttcacaggtagctctaggttccggtgaagtggctgcagcacagccttcagcatcacttgctgcctcttctgcttgcaagcttggtggtggatctagcgcgtctctggttgctacggcgattccccggcaggcgtcatccgtcgctatggcgttctgcactgcgcagcatggctgctcccgattggctgaggcgccccaggtggcggaggaagaattgtcggcattggcctggccagcgctggttggtggcctggaggaggatttgattggaaaaccaacggtgcagctggccgcggtgtccctgaggttgaggggaccgggaataggctggggggaggacgggacgggctgagactggacgggacccccggtctgcagcagcaggtgacagcagcagggacaatgataaggagattggcctgaaggagggaccgtccctcccgcgcggtgagtaggcgggagccggtgctcggctgtgccggcgagcagcttgagtcagggtctccggggagacgtcctcaggtccctgtggagcggccccgaagcctcgggagccagcttcactagacaagaggcagaggtagagaatgcggctgtggtgggtaagtgagtcactgcgtgaggcagtcttttcaaagcaggtgggtttgtgttggacggatggatggtgggaaa

SEQ ID NO: 29173 - DNA, 2300 bp, Homo sapien
tgtgtgtgtgtgtgtgtgtgtgtgtgtgaatagccttttcttgttctagaccattgggctaaagtatttataaattttgggaagtggttttatcttcttgttgaggtgatcctgaatatctacttacatgcagatttgttacctttatgctgtagttaggacattatgctgttttacttttgaactgtataatttacgttatgcatttcatttaaaaaaaggccttagaaaaatatgttttcatagttttgagccttgctatataagctataagcttggtgcaagatctcttgtgggattttattttgtgtcattttacagagggacccttaacatttgagatgatagtgtatgtgtcttttagaggcagtgtcattcttgcctcttaatcgctgcagctttcagggaagttcaggaatattctgggatggccaaaacattagtttaagactttaattttactgagtagtggaaagatgggaagcacaattggtattctggtgaagatgagaagttcagtgcagtcatgtctcactgcttaatgtttattttttgagatagagtcttgctgtgtctctcaggctggagtgcagtggcatgatcttggctcactgcacctctgcttcctgggttcaagtaattcttgtgcctcagcctcctgagtagtagggactagcatgtgccaccatgcccggctgatttttctgtttttagtagaaacagggtttggccatgatggccaggctggtctcgaactcctaacctcaagtggtcctcctgcctcggcctcccaaagtgctaggattacaggtgtgagccaccaagccaggccgactgcttaacatttagaatgtatgtacagaatactttttctactcagcatcggtcttcctgccccgtcaccttgttttgttttattggtaacattaatcctgattgttttagatctctgaagtttaattagttctgctatactcaccagagtttggctttcatctcgcctttctgcatttccaaaataggaccgtcttcattttaaaaaatgctttcaattacccaagcttaagtattgttaatccaatgggcctacttactatccacaccagaaaaacgttagggttcactgtattcatttaaaatccagtttgggaagatgtaaccaccagacacacacacgagcgtttagtgataccaagatgaggttgaacagggcccagtactcgaagaaatcgtcgaaggagcatcatcgtggttaagaccagactcgaagtaggttttaccctgactccatcactagctctgccatactggactacttaggaaacttcttgtgcctccattttataactaagtgaaataaggaaagaatttgaaatcgtgcccggcacaaaattaagcacttaatagattggcatttttcatttatttaaagttacagaatgtcaggtatatttttaaagcgttatctaatgcagttcagaaattttaaagaagctccagactttcacaaaaggtgaagtgacttgcccaaagccacaaaacgaactggcgatagttatactatacaggtttcttgaatcccaggtcactctttttgtgaaaaatacggtgctgtggcaccttattctcattgcctgtggcttgagtaactgaagacgttttcatgccatatgaaaggtatttagcatgctgcattgattccttatcagattaaatctttgcttttaaagagaattgatttttagcccatagcaattcttgaaagtaaacactccaagatgaagctgccctttcccatcaaaggttagacaccctaaatccagaaaaatcttcaacgtgtaggagacctgttcacaggtagctctaggttccggtgaagtggctgcagcacagccttcagcatcacttgctgcctcttctgcttgcaagcttggtggtggatctagcgcgtctctggttgctacggcgattccccggcaggcgtcatccgtcgctatggcgttctgcactgcgcagcatggctgctcccgattggctgaggcgccccaggtggcggaggaagaattgtcggcattggcctggccagcgctggttggtggcctggaggaggatttgattggaaaaccaacggtgcagctggccgcggtgtccctgaggttgaggggaccgggaataggctggggggaggacgggacgggctgagactggacgggacccccggtctgcagcagcaggtgacagcagcagggacaatgataaggagattggcctgaaggagggaccgtccctcccgcgcggtg

SEQ ID NO: 29174 - DNA, 2300 bp, Homo sapien
ctgtgcctggctaatttttgtgtatttagtagaggcgggggtttcaccacgttggccaggctggtcttgaacctgacctcaggtaatctgcccacctcggcctcccagggtcctaggattactggcatgagccaccttgcccagccagaaattggtttttaacctgattgtttgcagatgttctttggggcttaatgtattgagaatttaaaaaaatcattgactgacatatgtcttattcttgtatttgattctttagatttatgtttatttgccaagtatatatcatacataacaagggtgaagatttcaaatatgtaattaattatatatgttatttagctgttggtgttattgggatttctgttcttggagaagtttagaagccttagttgtatttgaagtgtatgacatgtctatcacctgttacgtacagtcagtctccctatgtaaagttgtgaaagatttatttcttattttgctacttatttagtgcacgtcatcagtgaattctccaggatgagctgggtagtaagactttagctgtgggatataaatatttttatagaaaatattaaatatcatctattttgctagcttatagaattgagggtaccaagaaacaaatctgtatacacaaagagcactttgatgaagcagtaaaaactagttatcttattaaatttttgcctttgtgtattgctttaatattctgaatgacaaaataagcatttgtaaaaacatttctgctgcatatccaaatagaatgattgtttggagaaaaatcactggttaattgcctgaattgtgaactcaactagctgttattttcatggaacaccatttttacctgaaagaaaaaatgacagacttggttaatcatacttgggcatttgacagatattttgtcaaaaatgaatgaagtgaacttgtcacttcaagaaaaacaactgatagtgtttgttacccatgataataattcagactttcaggcaaaacttagaattttggaaaacttgcatctgctaacctgactttgacagtttctcaatacttggacttatgagattgttggtgatattattaacaagtgtgatttaaaaaaatttttgatattgtttaatgaaatgtgacatttggaaaagctctaataccctgtgaacacatacattccaaaaatgtgagagatccattcaaagtgcatagtagacaaatggattttgatgtaacaatgtgtaaaatgttcatttggaatggtttcagattctacgttgcaactattaagaaacaatatacttgttgagtttgatgaactatcagaggaatgtccataactacctgaagagaatattgaaatatgcctcccctttccagcagaatatctgtgtgaatatggatttttaaatatactttaaccaagggcagatcacatcagattgactgcagaagtagatatgagaatccagttgtcttctattaagttagataattgaagagatttgtaaaaatgtaaaacagaggtattcctctaagttttgtcttgtttttgaaaagttattttcattaaaatgttatgtatattaacatgtaatggctttattattgtgtaaataattctgaataagtactttgaagttttctgttttaatcctgatgtggtaacttatataaaccaaggtccttttcggtcttcaggaatttttaagaatgtagagaatcccaagtccagtagttagaggggtgctactcttttttttttctagctattgtccatattaatactttgttttttggttacaatgataattataaaccatactctcacacatccatccacatatattcttagagtatgcactctttgtactaacattgcagaaaggtttcagttgaaaacggattgctgcattcctcttggtatttttacttataactaaatgtgtatattactttccaaatctgttatgctgtgaccctgtgtaagttgtagttattagcttggaagattaggtaacttagaacacagtgattggctgtaccataaaagtaacttagaagaattcatctctgcaaagcacagtgacctaaatcagatatgtgctcactgtccctggaatcttcaagggagttactgcattacatcatcagaaacaaggcatttctatattactatggaaagatttcgtctggagaagaagttacctgtatgtacctaattatgatcttgtcttttatttacaaacgaatttgaatcagagtttaatagtgaagcttgaagaaatgtcaggcttattagcact

SEQ ID NO: 29175 - DNA, 2300 bp, Homo sapien
cccggcgcgggaggaaggggaagttaccttcccctcggaagagggcgctggctcccccatcctgcctttataataaggccaccggaggagaggaagcagccagctgccgtctgcgctttgcaaagcatgcagttaggggagcagctcttggtgagctcagtgaacctgcctggcgcgcacttctacccgctggagagtgcgcgaggcggcagcggcgggagcgctggccacctccccagcgcggccccctctcctcagaagttggacttagacaaagcgtccaagaagttttccggcagtctctcctgcgaggcggtgagcggggagcccgcagccgccagcgcaggggcccccgcggccatgcttagtgacaccgacgccggggacgcatttgccagcgctgcggcagtggccaagccggggcccccggacggccgcaagggctccccctgcggggaggaggagctgccctccgccgctgcagccgccgccgccgccgccgccgcggctgcggccactgcgcgctactccatggacagcctgagctccgagcggtactacctccagtcccccggtcctcaggggtcggagctggctgcgccctgctcactcttcccgtaccaggcggcggctggggcgccccacggacctgtgtacccggctcctaacggggcgcgctacccctacggctccatgctgccccccggcggcttccccgcggctgtgtgcccacccgggagggcgcagttcggcccaggagccggtgcgggcagtggcgcgggcggtagcagcggcgggggcggcggcccgggcacctatcagtacagccagggggctccgctctacgggccgtaccctggagccgcagcggcgggatcttgcggaggactggggggcctgggggttccaggttctggcttccgtgcccacgtctacctgtgcaaccggcctctgtggctcaaattccaccgccaccaaactgagatgatcattacgaaacagggcaggtgagcgcagcgtggaggggcccctgggttcggggataaagggtgacgtgtggtcctggggaaggtccgggatgagggagctgaacccagttgttccgcgcggtgcttagagtgtttcaccgcgcgcaataaatctccgtagacaccgcatctccaatgcggtgtccctctgtgtcagtgccccggcggctcttgcagggtgccaatgttacggctgtacaccgcttttccctcccatcatcctcacctgaacagacctggaggaggcggaaatggaaattagggcatgtccacaagctggattcgttagatcctcctgctcggcggtatgcttgtgcatgcctgcatgccggcaaggagccacggatagggaaggctcaagagctggccacctgagcgcagtagatgggctcccgcagttttaggcgccagggtctccacggggcgtctccgggaggtgggcatgaaggctagagcgccggcctcggaagctcggtcggagtaggtggttagatctgccctggagccagacctggctcgggttcggtgcgcgagaaagttctgatatacatccaactgctaacactggctacttctggggaaagggaggggtgggtgctgagagaggggcactcaaaggggacttttagcctaaagttttaatatatatttttaacaagaataacctaatattgttctctggtacttttcaaaatggtgcatttaaaaattagtagtttttaacattctaggagaaaaattttaagagcgtctgaaagggccgagaatatgagccttcggaagcacgcgcgaatttggaatataccgatgttggggcaagcttttttttttttttttttttttttttttttttttttttttgaaaagacggaaaggttccaagagttgccaactcaaaaatattttacatagtttcagaccacttgatctaccagcattctgttcactgcaaacttttaaatgtgttccgaccctatcccaggtgtctggggaacccgctggggcctgggcctgttctaggacatcccaattaaaatcgatttttctgattctattcccttgcacaggcgcatgtttcctttcttgagcttcaacataaacggactcaatcccactgcccactacaatgtgttcgtagaggtggtgctggcggaccccaaccactggcgcttccaggggggcaaatgggtgacctgtggcaaagccgacaataacatgcagggtgagcagagaagaggctcgggccggggaggaacgggcgggaagaaatcg

SEQ ID NO: 29176 - DNA, 2300 bp, Homo sapien
agcaggggaggaaggcatggacaatgtagtgatcaaaacagccgtgccaaacactaactatactgatgacacaaaacgcaggaagcgcagggcagaacgcgctcagtaccagctttctggcgatctgctcctggccactctgtcccaggacctacaaggccaccgccccagcccactagtctcaacttgccccctcccctgtggctgtgccttgaccctgaaaatcttcgcgcactcctgggtttcaccaccacacacacgcgagcgcgcgagcgcgcgaacacacacatcaaaaaagaaaaaaaaaaccgtgataaatgccctggagagtctaagtgcattaaggacctcgttctcggagaccccagacatgccgatgttggtgctgctgtggttggaaaactgggttggaaagcttcgcactgttctacacttgcgtgtgcgcactcagcaatcctttggccatctcatctgttgtgggcgaagagtttcccgtgtgatcgcgttcggttggggaagcagagtcccgacatctcagccggaaaatgcgctcccggagcgattactggcggcgtctgtaattgcttattaacagcgaatattcaggcttctccttatccgcaacgaaacgtgccccccgcttccgtaataatgaaacgataaaatatgacggccccgctcttgaatctatctgaggaaacgcagcgaagaaacaagcagctggagtttaattcaatatcaaactgattatttcactaattattctaccttctgtatttgccgcagagcagaggcgcagggaatcctaactgtggggctgttagggaagctttgtttcttggtgtcaggcctaactgaagatggtggtgaagggacggaatccgggatcaggaaaactgagcagaaaggattttaaattgtggggaataaaagtgactgtctccccgaaagcagttgtgttggcgtgagtatgaagttggtgttagctcgcttagtttcactcttgtcctgtccccagtaccctgtccaagcttctgatttagaagctgagagcttaggtcctccaggatggcaatgtgctctggccgtccccggaatcccaaaagcttagcgcgagtttcctctctacaaacctttcccactgggtaaaaggatgggaacaaacaaaaagtggttctgtgcgttgaaggccagggagtttgccttcgacaagaggaaggtgtgctttgaagttacagcttccgacgaggaaagagacttccttgggcctgtctccaacttgccccagtttccccagcctccgggacgggcgcttccctgcaagctatcagcttgaagagtctttctctctctggcctctaaaatctgctccagccatctcattcctccagcggagggctgagatgactaatgcgccaagggtggacaccgctatggagaccccaaactttgtccccctaaattccggcgaaattacagacaccaggattgattatcacagcgggacgcagtctcaaaaaaaaaaaaaaaaaaaaaaaaaaaaaaaggaaaagaaagtcacaggcgacttgatccaattagtaaatgcctaattgaattagtgtcacctccaccagccaataggagggtctccgggctgtgaggccgggaagcccctccctggccgcaaatatataaagcagctagtgacagcccataagtttccaagtggtcaacttgaccgatgctttggcaattgaaaaagggcagaaaggcgcgggctagtgggtggatggggacaaagatctaagtcaccttcttccagcgtgtgagcctgggaggagggtgggggtcctgaggagcaagaggtacgaggaaggaaaaggagagggcttctgggttagtttccacctcctgctttccaactcacggcgctttccttccggaaaggacgctggattcagggcgcgccagtacgcgcagtagcggcccgcgagtcggcaggtgggtagccccggcgcgggaggaaggggaagttaccttcccctcggaagagggcgctggctcccccatcctgcctttataataaggccaccggaggagaggaagcagccagctgccgtctgcgctttgcaaagcatgcagttaggggagcagctcttggtgagctcagtgaacctgcctggcgcgcacttctacccgctggagagtgcgcgaggcggcagcggcgggagcgctggccacctccccagcgcggccccctctcctcagaagttggacttagacaaagcgtccaagaagttttccggcagtctctcctg

SEQ ID NO: 29177 - DNA, 2300 bp, Homo sapien
ttgttttatacaaagataaagtagatttactaagtttgaatcagagacacttttggtgaatgatacaataaaagaaagattctctatttctgttgtattttgggtttgagtaaactattgaaactttgtcacaagacagtaaaaatttaccacaaacacattatgacctggtaactgaggaatgtttcaaattggtacttccccaggacatttactaatgtgaatggctacaaaattagcacatgaataccttagcttttctgtacaagcaataatcagttaggaaatgcaattaaagaaaatgttctcatgacaatagcaccaaatgaaacatcataactctaaataccctatttaaaatgtgccctctaagcatcacactacctgacttcaaactatactacagggctacagtaaccaaaacagcatggtactggtacaaaacagacacatagaccaacggaacagaatagagaacccagaaataaaactgcacacctacaactatctgatcttcgacaaacctgacaaatacaagcaatggggaaaggatttcctatttaataaatggtgctgggagaaccggctagctatatgcagaaaattgaaactgcacccattccttaaactatatacaaaaataaactcaagatggattaaagacttaaatgtaaaacccaaaactataaaaaccctagaagaaaatctagccaataccattctggacacaggtacgggcaaagatttcatgatgaagacactaaaagcaattgcaacagaagcaaaaattgacaaatgggatctacttaaactaaagagcttctgcatagctaaagaaactatttaaacagagtaaacagacaacctacagtataggagaaaatttttgcaaactatgcatctgacaaaggtctaatatccaatatccaaaaggaacttaaacaaatttacaagaaaaaaaccaaacccatttaaaagtgggcaaaggacatgaacagacacatctcaaatgaaaacatctgtgcagccaacaatcatatgtaaaaaagttcaacatcactgattattagagaaatacaaatcaaaatcaaaatgagatatcatcttacacccatcagaatggctataattatatattaaaatgtcaaaaaactactgatgccggcaaggttgtggagaaaaaggaacacttttacactgatggtgggagtgtaaattagttaaaccattgtggaagactgtggcaattcctcaaagacctagagacagaaataccattcaacccagcaatctcattactgggtatatacacagaggaatataaattgttctattatatagacacatgcacacatatttttttgcaacactattcacaatagcaaagacatggaatcaacctaaatgcccaataataacagatcagataacgaaaatgtggtacacctacacaatggaatactatgcagccataaaaaggaatgagatcatgtcctttacagggacatggatggagctggaggccattatccttagcaaactaatgcagcaacagaaaaccagataccgtatgttctcactcataagtgggagctaaatgatgagaacacatggacacatagaggggaacaatgcacactggggcgtaccaaagggcagaaggtgtggggagggagagaatcaggaaaaataactaatggatactaggcctaatacttgagtgattaatctgtacaacaaacctccatgacacgtttacctatgtaacaaacctgcacatcctgcacatgtacccctgaacttaaaagttttttaaaaatttaaaaattaaaaaagaaaataagatttgcccaatctctgtgaacaaaatctaaaaatctatagagagacacaacagaagacttgaataaataaaaagagcaccctgtttctggatagtgtggtaaactatattttccagaatggccataacagtatttcctatctcccatgatcttctttcaatgatgccttaaaactcctttcattgtgaagtaaggtctttgttcctttgccttaaatctgggtgtacctgtaactatgggagaattgacattatgtgttttcagaggcaaggtcacaaaagggaatgcagcttctatctggttctcttgggatggttgttcttgaaacccagccaccatgctgtgaggaagtccagacaacctatggagaggcccctttcaattttactgaaaggcaagtttcaggatgatatttatttttcaatgttcttgctccatttctctctctctctctcc

SEQ ID NO: 29178 - DNA, 2300 bp, Homo sapien
cgagcataacttctaacttatctctgaagtctttcctaaccattgcggcattcaatcctttgagaaaggcttttgtggggtcaccagttaccagacgttgcctgagctctagggatcacagctgggtaagacactgttcctaatttccaggatgatgtcctctcctctttccttgagctccttttgcagttactacccaaagaattgcctattaataatgcgatgcctcaggaaatttcttctgtttttaattgccaattacattcgcttaacttaaaaaatgacttatcttccctaggtatagattgtaaagactcagtttccccccaaagtatctggtttaacatgggagtagagagagatatactattatgtatcaggtattgggctaccgtttttgctagtgcttctcctggtgtgatacgtctagcagttcattctatggggcacacaaaacccatgatattacagatactgttgcttaggataaggctaaagtaaatagtgcctatttaagtgtttttaaaaatgtgttgatttaaaaacaaatgttaaatagtaatgtttcaagtaatagctatggcagaaatggtagaagtggtcctttaaagtctttcaaatgcattgtatgatatcacatttattcctcagaacaaccttgtaaattggaaaccaaagtccagaaaaataatagaacttactcaactcactaagataacagatcaaactttcctcctttaccataatacccttttgcatatagaaagatttagtttaattcttgaatatgggtgtctgacctgtgttttcatactccatctcctcaaaaagattgctttagctttctaaatcaaatccttcaccttcagaacaataaaagaggcataccagagtcattttggtgtatttctaagcatatttacaaaatatacaaggaaaaggacctgattccctggctgggtgagtgaaacgttaattcttcaccttggcacctcaacctacagctgtaataagggccgttatgcccaaataggcccttaaacggaagacctgctgagcagagacccactttcccagccctgctcaactgcctcagcttttctgccaactgaccaggcggaagcagcagcaggggaggagggactgcaggtaggtggggaggggatcattttgaaagccctgaatcccttgcagggaagaagcagctgctccttgtttttctaaacatctgtcccatctgtcccaggcctcagctcaccctttcgtggctcgagccagttaaacgtgaatttgacaaggaagcacttctgaaggctggtttgtgagtggaaatgaacctaagtgccacctagaaagtttcttctattgagaagaggtgagtagtgggtcttcagcgggacggctattaccttccttcattttactctcacaaaacatacagcttttactgatagaggcaggatttgtaacatcacccaaatcatactgtacgtcctgaggatattatttcacaacatagaggtacttctagagcccatattttaacgtctaggagagccacagtctttgatttgaaggagaaataacgatattgcacacaccatatcacctttatggtagaacaagctgtgaacaactagtgcgtgtggcgtttatcacatttaacagcgtgttgcttttatttgtctcctctgccacactgctccttgagaacagggacgttatttttattgttattttcccctcgtattcagaaccgtggctggaacttggcaggcatgaaatagacatttatgaatgaatgaacgttaacgaagaaaaaaaaaggaactggatgattcatttggttctccgaaggcgggtatgggggacggggctcggactttggcccagtcaccgagtgaggcacagtcccaaagtcctgcaggtccgcctccagtcacggccgacccgggtctgcaactggtgcacaagcctcctgaagcgaggctgcgcgcgtcctgcacggtcccgccccaaaggcacgcagacacgccccctttcctggtcattccccctgcgaagtcagttccactctagttacaggattggggcggggccagaaaggcgcaggcgcaacgggcggcggaagtaggagcctgggaaggaagagggaacgggtcctggcggtgctttgcaaagggcccgtgtttctgttgcgggaagctcccgggggtcgcacgtgcgtccgagcccaagcccctcccctccactccccttcctgcgtgccccggagccgccaagcggctacgttcttctcg

SEQ ID NO: 29179 - DNA, 2300 bp, Homo sapien
atacctctaatgcaactaagcatctactatacattcaatgttactggtgttattgaaaattattttctaacagtgataaggcaactatacttgcactctgaatataagtgccataaaaaagaaaaagattggttctattacttcatggattataaaaaaaacttcagcattttacttaataataatgacaaggttctgcattggtaattaatagtagccaagcgtttatggtataccaagcagtgtgcttcaccttttggagaaactatctcatttgttcttcataagcattcagtaaatctatgtaatacctctgaggttgtaaagaatctcctcagattacaggtggagaaattgagacatgaaaacattagaaagtaggggagccagaaatgaaaatcaggcagctgactccagagccagcataactcttagaaactatgctttggtgccttagagtatgtattacacccatttcagagataaggaaaatgaagaaaaagtttagcctcttacccattgtcaagtaaatggaaaaatcagcattcagatactggtgttctgacctaatccagtgtcatttcccattatgttatgctgtctctttaatattaaaaccttctacttgcgtaagatgtctggcttacaaacaatatcacattaaaatttggaaatatcctgtaaaggatgcactgttctcaatttacagatgatgaaatgatcacaagattgggcaatgagatatggcgtttttagagaaatgaaattctgccttgagatcttgctcaatccaatttgaaattccaatctaaaaaccaaaatgtcttctacacataaggcgcaagggtcaattttaattctggtacgtctgtctttgatcaccttagcaaatttccatcacctcttggagcaactgatggtttgatttgtactagagttttcgtgggtattttatctcgctttcgagtattggggtttcttttgtgtagagggtgtcagcctaccttgcacgtagtagtagttactcaacaaacagccgaaggctggaatgaataccgtatacaggttagacattggagaaacgacgaatacctgttagccctcgatcaagtgcagggggtcgatattcaccactcagatgccccagggagtaccgtcctagccaatgtccctcttttctttccgataatttgtatcggaaagaagcatttagcagtctcaatgaatgaaaaaaaactgaaggcgccccagtaagagtacgaaaagaaaaggagtaattagagaagtgaatgaccaagaagggcctggacagctgggggtgagggtgacaggggaaagggtgtggacagctgggtgtgggggtgactggggaaagggatgcccaggagtgggccgctccctagtcaaaggagggggcgcgggagggagtgagaaaaaaatgacgtgtctttttggaccggcaacagctacggaggttggccgcggcattgcccgcatccctatcctccacccgtccctggcgagtcactcacccagaagccaggctacgtagggccgcccccaaggccgccgagtttcgattccttagtgtttggaaacggaccgaaaacaaaccgggtcgccaggggtcaccacgggcttccggtttcttcgaagacaccgccgcttccacagcgaagggagctgctccgggcacgtcgcggagggagtcccatttcttctgactcggcaggagcccgggacgttctggaaggagggacgagccgaggcaggaggggccgggccgacgcgagagaaggcccgttacccagcaatacgcgcgcgagacccaggcccgccgtcgggaccagcacgggccggagggaggggaagcactccggaaagtgattggaagtgtggatgagctctcagccggaaaaggggctgccgctgtccgcgggctcggcgccagggacgcgcgaggaaaccggaagtcaggcccgagggagctgggagggcgttagcgaagccaggttcggtcgtgggggtggggaagtgcaggagtggcgcgcggcgtactacatgtcccgtgagcctccgcggcgggacggggcggggccgcgggacgccaggaggcggaggcggagtggagttaggtaagagcgttaccagccgtcttgtctgttgggccgaggtcccccttcaggggcgccctctggtgcgtctttttcactcagtgtccttttggggggtccccgggccgtgtggtgcgtgctggctcggctcagtagcgctgttacaggcttacgagctgacgtggc

SEQ ID NO: 29180 - DNA, 2300 bp, Homo sapien
aattcagtccaaaacagccattctaaaaaatatatatatatttttaaagcagtgacttgttttgaaaatttcagattaaatttgtagctacaaaaaatgtaatggtttaaaagaaaagaaactgtcccaaacttggccttggacacagctttttagatgatgtaattcacaactccctcttgggaaaatatgaaaattcctgaaaaaaatccctaagcaaagttccaataaatttcaatggaatcaagatgctctggaaaaccaaccactcactgaactagttggctatcagttaagattatcattcaggacccctaaattcttttctttcttagagcttaacaattatctaaccattctcttttcctataaaatgtccttatcaagactgtatcttttaattaacttatcagaggtctttccctgataataaacctttaatacatgattatatatgaactgtgtaacaagttttctctaacaatttattttatttgagaaagttaattgaagcagatacagggtggaaagtgaccatttgcagctaaatccaatgactatacggattatattttgtcataatctagcaggggttctacaacccaaaaagaaaaactaagatgttttacttgactaaaataataaaatttgtacatcctggttaagcaaatacatttcttaataaacccattatatgttaataaacccactgtgtagtgtgcactgtgaaacaaaaattgactctctcaccagataaacttcaaaatactgatttatgacattttatctttacttactcagaaagaaaagataaaaatgatgtcccctgccttttcaacaattcttaaattattttaaattgtgaacgaagattcaaaaatatttctacaccttcaaattaaaaaccaggttaccactttatttctaataacttgtgatgcctcaaccaattttgctagcattcttcaaaactctacttgtaaaaacatacacctaatggttgttttaaattgaaaattctcaaaatgcatcatggaagcaataaaaaaatttaaggactgatacttgctcaaaatattaaaaacactgctctcttccattctccagcccagtaaattgaagcaaatcgtttcctttctcaacgataacattaacacagatttctaagtatttttagaaatgtcataaaacttcaacttgtggtctttgttcctaacagctataaattttcacttaaatctaaaccaaaaaagacaataaaaaaaccaacaacaataaaaacgaattttcatataaacccttgagtgaaatccatcctattgggctgacagttgggctgatagttaagcggacagatgacaaaatactactttaagggggtggtgagtaatgtccgtattgctaatcggcggttagtgacgttaaattttctataattattgttccttgtttatttgtttatttaaccaataataccttagagttacaggggttccacctggctgcgaccttcaatgactaattaattcaactacttgtgactccacagctagggacggtctatcatctagaaataaccaaggtggtggcaactccagggaagccgggcgcaactccagtactctggcatcttctccctgtctctcattccataaattgagcagtgtgctagaagtcgtggtgtcgtttgtgaataattacagacccctacgcaattcgtcgagcttgtgcctcaagtgatcgcctgagggcttgcaagtagtttagaaaacagaggctacagaggaacggcttctaacagacttcccagttcccagccacgtcagctcgtaagcctgtaacagcgctactgagccgagccagcacgcaccacacggcccggggaccccccaaaaggacactgagtgaaaaagacgcaccagagggcgcccctgaagggggacctcggcccaacagacaagacggctggtaacgctcttacctaactccactccgcctccgcctcctggcgtcccgcggccccgccccgtcccgccgcggaggctcacgggacatgtagtacgccgcgcgccactcctgcacttccccacccccacgaccgaacctggcttcgctaacgccctcccagctccctcgggcctgacttccggtttcctcgcgcgtccctggcgccgagcccgcggacagcggcagccccttttccggctgagagctcatccacacttccaatcactttccggagtgcttcccctccctccggcccgtgctggtcccgacggcgggcctgggtctcgcgcgcg

SEQ ID NO: 29181 - DNA, 2300 bp, Homo sapien
catactccctacactatacaccacacatactttggtactctttatcaaatggttgtgtaggctcttaaccagcaaggaaatgtaatttatgaggctgaatattccatctttgggctaattattcttaagtccttttctttttttcctttcttgagttgaatatagcctccctgtggtttccctccctttggtactgatcccgcttctgagccatgactgtgatctaatctagtggaaaacatttgggttttggcattagaaagtcctttttcaaaccatgttttcaccttttattaacagtcttcttaagaaagttacagaatagctccaagactcagttttcatttaaataaagaaaacaggctgggtgcagtggctcatgcctgtaatcccagcactctgggaggccaaggcgggcggatcacttgaggtcaggagttcgagaccagcctgaccaacatggtgaaaccccatctctactaattagccaggcatggtggcaggcgcctgtaatcccagttactcgggagactgaggctggagaattgcttgaacccaggagacggaggctgcggtgagccgagatcacaccattggactccagcctgggtgacagagcaagactccctcttaaaaaaaaaaaaaacaaaaaacaaaaaacaaaaaaaacttacttcatcacttcatcaggttggtgggaggatcaaattgataatcaaagcctcaaaggagtgctgggaacactgacatcattaacttgcctcagtaagttgcctcttccaattccaccccagttttttttttttttgaccacttttaaatatctgtgatattcctcctcagtttctcttataatacccttgaatcaattttcattttactgtttaaaattacagaaattatttttaaaatattgagcaaatatattacttaaaaattctaattttcttagtgctaaatttgtttttatttacattcacaatcaggaatttttacagtgattatgttcccataaattttcagtttatttcaaacttccttttaaacagaacatgataaaccaaataaaatgaataacttcttaggtgtgggttttctcacttcagaggtttttcaggactattctctaatttcctgttcagactccatatagaattattatttcagtttttgcttatcaggggtgttaatgacaggagctctctgctgcatattatgaaatagaaaaaccaaatacaacaaaaaaaagtagaatagaatgggtaaaagtgggaaatgaagaccaaagagaaaaatgaaacatatcaataaatttgtagaggtttatgtcatgaaataacatatctctaaatgtttgtttttaataaagaataaattttattttcaatgttgaagattttttaacaatgtggtcacctggcaatgcagcagatggaggaaggagacaggatggaactgcagagctctatttctgcttttcccacagtagtttgactccacagcattgtcaaagcctgagctatcaggattcctttggcagacctggctcaggaaataccagctctctcccacgccatcagaagccatgcttagtgggttaacattttgctaattaatcatttgatttagagttaattcagctctacatgaatttgaggaatctttttttttctcttatcttttctatcatcagtgcctaaatatctcttattgtccctggagatcattcttttgctttataattctttcctcatgtcttatctatatcttaaacttgtgaccatttcaaagctttctataactataaaatacaatttattacttgtatcaaacaaatatcctacctttgaaagatataagtaggaatatatgttttgtgaaaaggcattaaaattcaaaggaggaagttaatatgcgattgatagacgtgttgatgtctacctttttaaaagcatcaaaataattacaaatattttcttttgaaagttggccaggaatactttgccctgaccgttttaaagggaaatatgtaacttatgacccggatggaaatgttgaagagtatcacatagaattcctgggcgatccccattcaagatcatggataaaggcaacattcgttggacattatagtatcacattaaaggtaggtatcataacatcaaaactttattcttcttgcacttatttttagttatggtaatttttatctttgatcataaaatatgtataagttgcttttagattgatataatgtatgctgtttatttaattcaaatatttgtatttttagtgttttt

SEQ ID NO: 29182 - DNA, 2300 bp, Homo sapien
caaccatcctcagactccaaagaaacagtaggacagtattagaggcaagcaaagggttaacacagctgatttctaggttaagagaaagatgcaacataattttttaagacaaacacctggagggaaaaaaaaaagtagtattttgtttccacctcaagaaattacagacaaacatgaagcaaatcacatcatcagaatactcaattatctgaacatgctaattaactaaatgtaatcaacccgctttcagttctcttttcacctgctgtcatatttctagtgcactgccttccttattcctcacaaccggtagaacattagacagtctgcatggtgcatcaaagggaaacaaataagcacagatttttgctgatggcaggaatttctcatgctcagggcatatgaatcaacaatatggaaatggcagtactggctgtatattttaattattctccacacctattttgcaaaagacacttaaagttcaattaggtaatatgatgctcagttatggttatttcataaaactgagcgcagacagtcatttaaagtagtaaatatgcagtcatgacaaaattaaatattcatgaaatcaagagcgactggaaagctgaggatatcagaatattaaaattcatcatagttttcacaatgtaaatcttgtatgcatttgtaaggcaccccggtcgcatctagaatgtgttcaaattctagttccttggtaaactgccatttaaataacaatattgattttggaagataaacaacaattttgattcttagctcagtttcaaaatgcaaaacaatcctgaacatttgcaaatctgaacttgttaagtgagcctgtctccaaacacagaacagcaattcaatgtgatcccgacatgtttccagtatttatttaatccactagtatcttaggaaagctctaacagaaaccaaggcaatctccgttaaggggcacttcatgacacacaattcctttctaactagcagaagcgcccattttcctgcacacttccttaagtgagcaaaagtgagaaaatagattgactgactcatttggttccaatagtctgatttgttgaaccaacttttccccaatattgccagccagtttcaaaatatattaacaaatacacagtgtacactttatacagataaaacaaagcaacattagcttccacaaaactaaactccgagtgtgtgaaggaagactgctcagagacaaagctgtaataaacacaccctactaatactaccaaggcagtattttctatgccatttcctctactttacaattttctcagcggaagagacatcagcaccagaaaataacattcaagccatttcttactagaatccaattacctgaagaactcctctttccacagcaagtagcagctatcccccggtctacaatgacacagcagggctgcaaaagatttgtagggctcatctgctgccaggcacttgatccctgccctcctagaaggaggatgccaggtcaggaggaggacctccagcttagagcggggttaagcagggcactccattctgcaaatgagccaaactttgctcccattgttatctttaggttgatgtcaccaccctccaaggagtctcagaagccacttggcagctcctaaagaaatgtttctcttagacccatatcatccaaataagcctcagttagactgcgagggcaagcaaaggtctcatcactgctctactgaggtgctgtgcttgcccagagcatcacaccgcatgtaccagacgacttttctctgcacacaccgctgaacactgaaaccaggacagacttctgcacataccctccagttcggaaagtcactatcgcccatggattcccttaaatcttaagccttcttcacatctgccacccccacccccacacaaaccagggaagggggttggggagcggaggggttaaagtgacagccacgacagcaactccttggttttgttcaaaaggtatcacagcgccaacactgtggacctaccttgctctctcctttctcgccgttgggtctcgtctcgggatcgtcgctgtcctcagcgcctgcactctcgccgggcagttcatcctgagccagctgctgaggcggcggctggggctggggcggctgtggcggcgcctggcaggctccgccagccccctgggagcgggggatgggctccgggcgcggagaaactccctcaacatccatctccatcttcccattcactggagggcaagacaaaagcggagtggagacttggcagcggcgcccggcagc

SEQ ID NO: 29183 - DNA, 2300 bp, Homo sapien
ggtaaaagaggtggagatggacttgggagagcactccaggaagagggaatgacagaagcctctgagagcatgttcctgtcctgaaagtagctcagagtgactccggtataggatgtgaggggcagagttgaaagtccgagactagagtagaaagccagggccagacagctcgtcaagtgtcctgaaacctattccaaagagtcaggactttattgtttgagaaacgtgacaccactggaggatttttaaatcagtgtcatttttagtgtctgattcagtgtactgccttcagccaggagagttggcagtatttctattttatagatgggacaactgaggccccaaataatacatttaagagataggtggggttgatttaatattctcaatcaccatgttgtcagggcctcctaactcttaccctctcaccctccatccttccttccttctgattgttattcttgtcaaaagtaaaacataaaactatttacctgccatccttatttttatccaaggaacacgtatgcactcacacagcttccagaaaccagttcccctcggtggaagccagttgctttaggggtggtgcggcttgtatgtggatggacaccatgtgtgcactgagcccaaattctctgttcttcttgactaggaagctggatttgtaccagggaccttttatctaaataggagactctgggctcaggagaacagagccgacttgacaaagtagaaaagagctcagtattggtctgcccacgctttgggcatgcgtgagcactcgcagcaaaacacagctggcacatctaattttagcctcgcccgccttgaaaagggaccctttaaggaaatatattttatctgaaacaatttgtattataatgtagcagctgatagacatgacagaatattatcattggtgggaaaaaactctgccaagcaattatgatttttgttcttttttttttagatgatatcagtaaagtgattaaagcatcaatgcaacaaaataatcataaagagagagacaatgggagaaacagattttatctgtaaaatatctgacgaacctaaggggtcacttcctttgattttttttttttttttttttacaaaatggatgtattttaaaaaagttattatttttgatatgttcagttgatcagtccaatctgatgacatgtggcattaatagtagtcctggagtagaccctaaaatttcttcaatacttaacatccaccaagttttccaggtagtaaaaggttagtttctcaatcagctcttggatgcgtctggctctagcgtgttaacagattttgaaagcatccgggacttacttttttcccctttaaccagcaaggttagttcccctgcctttatttcttttcctttctcctccttccttctttcgtcctctcttccctctcttctgtgttttgtttagcagtgtggcttaccttggaacttggcaaaaagaggaacaaaaagcagctcttgtgtggggtagatggaggagggataagaaataatccaccgcccgcatttgagttcttcaggttcagttccagcggcagcagcgttgctgcaaaaatcgcttgctattcgagatagccagcagagggaatcggaactttgcttgcagcaggggttgaagcagcctttttttttttttttcttggaggaaatactgcagccttctggactgcgtacgctgctccctggagaggctctctcggttccacccaccggctggaaggaggggaagtgaatgaaaggacaggacaagccccgaacaccatgtcactctgggagggagacagcagcaactaagctgtacaaggttttttttttttttttttcttcctttttttctttttttttttctttttcccctttctttttctttctttctttctttttctttctttctttctctttctctctctcttttttctttttctttaaggtggggaaagagacaaccaagagacaggaagctgatctgcaaggattcggagttgtgctaaaaggactttgatttttttccccctttacgaacgctggcaattgacatcactacagacagcctggttagagaacaaactgcctcatcccaagtggaccccggcagctgggggaagccaggcaagatctgggaaggctgtgtgtgggtgttttttctacagatctcactcctcgccctttttttttttcctttggtgtgtgttttttgttttgttttgttttttaaaaaaattcttgctgtgttggaactagcgagtggtggagtctctgaagc

SEQ ID NO: 29184 - DNA, 2300 bp, Homo sapien
actggtctcaccaataaatatggaagaagaaaaggagtaagagaaggaggtaaaaaaggaaggaagagagggaaggaggaaagacggggctgtggaacagcctaggaaaatcacttaaagaaaggcatctgtaagaaattggacagcggttaggccgggcgcagtggctcatgcctgtaatcccagcactttgggaggccaagatgggcggatcacaaggtcaggagatcgagaccatcctggctaaaaccgtgaaaccctgtctctactaaaactataaaaaattagccgggcgtggtggcgggtgcctgtagtcccagctacttgggaggctgaggcaggagaatggcgtgaacccaggaggcggagcttgcagtgagctgagatcgtgccactgcactccagcctgggtgacagagcaaggctcagtctcgaaaaaaaaaaaagaaattggacaccatttagaccgtttgccctgagggtaatacgaagaaggcaaagtgatcgtgtgtccattatatgcttataaaagcctcccattgccttgcttatcctcagcatgtagagtctctgcttagcagtggtgagtgaatcacaaccttcatcaagcacatcatgggggaggtgccctgtaagtcagcaaatcatgatcaaaaatatactactatccctttcatgtttttagaaaaatactattttaatgatatgccgatgtatattagagtattttcctttcaaaaaatagaccttgacatagatatgagaagatatgattagaaagacagcaattatagaaaattgtgtataattgttcatgatgaccaagggaataataggagaaagatatgaggtcatggaaaggttcaaggaactgataagaacgagtattgaaacaatcgtctaaatgtttattggaattgccaagaaatgaaacaggagttgtattagaaaaagtgactaatccagaaagtatctgcggagaaataatgggatgggaaatgatactagggatctgtagaccatgatgaaaatgaagactagttggttataaaatttgatgatgtgagattctaaatgggagattttaggtaggggagaaaccatactgagaaaggaggaaagtggactaccacttacaggtccagtgggaggaaggatatgggagaaaaaaaaagaaacaaaactcaaacttgagagggctacaaaggaagtagtgtcctcagggtaagttaggtagtgatgggaaacatgcaaattaaagcaatatgcagtgatagtttataacccctgaagtagcaaacattataacatgtaggccattcatgctgttcactctgaaactggttcatccattcttcattggtaccatgctaaatcggtacagcttttttaaagtcagtatggaaacagcaataaagagcatacagttgaaactagttagtctgttgagaatatttattcaaatatgttatctaaacatatgttttaaattatgtatctacgtacaactttgagcactctcgttttccttactaggaaaaaatataggaagcatccaaattctagcttatggagcatatacaactgttatgtagctgttaaaatggtagtcataaagactagattatgccaagcctagaaaaatgtttattatatgaagttaaatcaatataaagggatataaaataatgtgtacactgaacatggagctatgtaaatatttgagagtcaggatcagtgtggttatgactgtggtagatccaggctgcctgggttgaacgctgcctcttcgcttagtagctgtgtgacctgtggtaaattagtcaactgcactgtgccttctgcaaggtaagaacatcagcaaagtaataacagagcctcactcacagtgtgttgtgatgattaacaaagttaatacatggaaaatgtttgacgatatctcctgttacttttgtataaaatactggcaatatcaagcaagacaaaaatgtttgttttaacatggtgggcttatgggtgatatattattattattattatcttaacatttctccaaatctgttctgtttttttgggcaagaaaaaaatacagctcttggaaaaattaagctggttttaattatgtttatattttgattgttctttctatggaacctgagtaactcatgactgtatggttcttcgtttttgtaaaataattccagatgaaaatagtgaagaattaggagagaataacatgttttgctttttaaaataataggcagagattgagtacttcttgaccattgctttatttagga

SEQ ID NO: 29185 - DNA, 2300 bp, Homo sapien
gattctgacaaacacatacaatcatgtaaccaccaccacaatcaagatgtagaacaggtatctcccctcctcaaattccctcgtgctcatttggaatcaaccccttcctccaccccgctatagttttgccttttccctagtgtgatataaatgaaattatatagtacatacccttttgagtctgacgtcttccatttagcaaaatttacttgagattcatcatgttgaatgtttcagtagttattttctttttattgctaagttgtgttccattgtattgatgtgccacagtttattaattcagaggaaggacatttgggttgtttccagtttggggcaagcatgaataaagtctgtataaacatttggattaaagtttttccataaacaaaagtttttatttaattttggttagtatggagcattgctgggccatagggaaagtgtatgtttaactttaaaagaaactgcaaagctgttttccaaaatgggtgtaatgttttgctttcccactaacattgaatgagaattccactttctctgcatccttgtcagctgttagtattgtctttaaaaaaaaaaacaactttgtattttctctttttgtcattatatcaggtgtatagtcagtggcttcttttaaacgtcacaactataaatttaagggtctggtgagtatggatagtaagaatgtaatgtatgatgggataatttttttcatccacactatttttttttacccaaaagagtatgatcttatcaaatcattgttaagagttaaagtacatttaagactataatttaagtacatttaagactatatttttgcttgaagacttttacagaaaataagcttaaagaatttattccttgaatcctgacaaccttgaattctagtcctcccatatttaatgggagtctcatgggatgctttcttagaaagacaactcatgaaaatctctatttaaaatatcactgacccctgaggttggatgaagtctttgtcccataaattccaagctcagtcatactattaaaaaaaaaacaaaacatagtaattgagttttgctaaaaatccaataaagcaaaagaattataccattatttctcacatgcatttttccaacctatcctcacatcgctgacatactccatctcaggcaacctggttttgtctgttctgtggctcgccactctaaccttttgcttaccagtaagacataggggaaacacaatttaaattctgctgaaggatttgagcattcagtaactcatcgactctacagtatagtctgagcagaaatggacatttcactgattttcacatccagaagctaccctttaatagatctccaggagaatcatccctcctctgatttgtgaattcctgatcttgtagcattctacagttgttcaatgagaggctctggaggactagaaaattcagtgctttttacagagtctataggagcctatcacataggttcagtgtctctgccagtgccttgacttaatccagaaaacattcccattccaacctcgatacaaattgtcctgttgcttctcttttcatggagaaagtattttctgcatgagggcatggacctatgcctaacacaaaatatccataactttctaggaactggtctttatttcctgacagaagacatagatgcaattcctgtatttgtaacatcagtcacttttgtaaagcttggtgctttcattttgtctttctttcaaagccttttaaacaacactcatggcttttctcctcctgctagtgggaggcagtattaaacttatctggcataagaaagattttgtgcagctaattttatcagatgactccaagtcatttcattcggagctacttatttctcttagtggaatcaaataatgtaaatctcctagacgttcttgttaatggttggtggaaaaacgtgcgggtggaaatatgtctttcccataggtacttgatagcatttgattagaggccaggcatgtagcagcttcgtgaatcttcctttttgttttctgtttgcagattttattcttcaccgtacagtattgcaaccaaccgcatgattccacagacatctatcacgccattcattgctgcttcccctgtctccacataccaggtatgtccaatttacctgcaccttaggagatatctttcttgcagtaatacagtatttagaggcaaaaaggacacagtagaatgaaaagaaaaaaattctcatacactttaatcacatcttaatgtaataatactcaagttatgagttagcctatac

SEQ ID NO: 29186 - DNA, 2300 bp, Homo sapien
tcttctaaatctttattgcctgattcattcattcatccaacaaatatttattaaacatcgattatgtgtttgatgcttagggacacaatagtaagtggagggaaagatacataatacctgccctcaagaaatttggagttgagtggaggatagaaatataaattaaagaatgacacaaataattataaagttacagctgttaaaagaaaagcatatggtgccaagagaacgtgtaatacaagatctactcatggaggtgagggaaagcttgcccatcaaagaagttatgattcaatccacgaagaccaggagttggctgggtgaagaaaaaaaggtcagaggaaggaagtccacactggggaaggctctaagcataaagggtaggaggattacagaggcatattcacgaaatttggagaaggctttcagtaagcaaggagaagccaaatgaaagtttacgggagagttggaggcttgaagacacgttcaaggatctggtttttatcttctctttatctcaagagcagtgggaagccattaaatgattttaatcagagggttggtataactagttttgtattttgaaaagctgaattcagctctcgtttgagaaactgagtgaaagagcccagaacggccgtggctgagggtgactcgtgggagactcctacacaagccatggcagtggcatgggctggtggcagaagagggaatagggagaagatttggaactcaatcttcctccattgacaaagtcactccagctttggcaaggcaattaattggtgggaaagaagatgcctagccctcctgatttcactgcactttctgcatcttcaacatgagtactgggaagtggcaaaacatccagaggcagcttgggtgctaggtggagcatgagttaaaattccaggatgaagcaaatgaacacttagaatgacaggaaagatttgggagttgggtttgggggagggctatttacctttattccctggagaccctggcacaaacccttgcctctgcaatcttcctctcaggtaaaggaattcattaaatgaattgctagaagatctactgaccagagggctgtacagaatcatatctttgagagtgggaagtaggttgatcacatagtttattatccaatcaggacatatctgaaagagaaagggggttctattaatatttaaactacaaaacatgtacaccaggaatgtcttgggcaaatctggttgccctagcaagaaaggaaatttgaaagtttatactgttctgctcccatgttaccccgtttgcacatgagagggtaagtattctctttcttcacctgcattaagggaataaaagcacaagcattcaggtgactcccaacccacttttaattttacagtttctgctatactctatacattctgaaaattacatttcccaccactatcacttcgtgataggtgatcatttacaattactcactgactcagtcccgggaagaggcggtgcaaaatgggacgctctatccaggtgctcattagaaatgcagaatctctgcctgcctcctagacctactgaattagaatctgcatttttaaataagatttccaggtgatcaatatgtacattaaaacttgagaaaaacctctagacttcgacctaaagaaaaacattttacaacttgacagtgtatgcacatacatacatgcatatagacacaactgaagcacaaatttaatgaagtagaatttaccgttactattttatttgggaaagaaatgtgctcgcgactcaatagattggagtattcactcctggatctcaacttgcaatttgaaaacgcatctctaaagcacctaggagcaatctgaagaaagctgaggggaggcggcagatgttctgatctactagggaaaacgtggacgttttctgttgttactttgtgaactgtgtgcacttagtcattcttgagtaaatacttggagcgaggaactcctgagtggtgtgggagggcggtgaggggcagctgaaagtcggccaaagctctcggaggggctggtctaggaaacatgattggcagctacgagagagctaggggctggacgtcgaggagagggagaaggctctcgggcggagagaggtcctgcccagctgttggcgaggagtttcctgtttcccccgcagcgctgagttgaagttgagtgagtcactcgcgcgcacggagcgacgacacccccgcgcgtgcacccgctcgggacaggagccggactcctgtgcagcttccctcggccgccgggggcctccccgcg

SEQ ID NO: 29187 - DNA, 2300 bp, Homo sapien
agatggcataacatctgtagagttgacacatatgtaggtgataaatagtaggtgatacatagtaggtgaccagcttttatgcctcaatccaaagttttcctttccagatgttaaaataattgcattaaattctgtgactataaatctaaatgtgtctgcttaacttacatatttagagtacacatttattcagatacaatttaatgtaatccctcaattgaaaaggagatcatagatatgtagtcaccctcaagttgtctggagagagaaaataaatatcaaacaaggcatggtgactgttacaatgtgggttcccaagaatgctgctctagatggtgtttagtgagtgggacgtttattaaggagtacccttgggatcaacatgagtgacgacctggggaaggaggaggaggatgcaagaaagggcaagtataggagtcaaattgccacgcaggctccatgacaatcttggctgacgctcggagatctctggaactacagtggcccttcaagaggggtctggagttaggcccagacggctaggcctttacatctccagcagttatcaggtgtagaccaccacaagaatgggtgtgaccctggaggaggtagctccctgcagccaaggcaatctctaaaggggctaaaacatcaatgctctgacaacagcgttccagcccggagcaacacatccttcattgacaagggatttgggtagtgctttgcagtaaaattatcacataagagatgtctcacaaaacactcctcatttatacagacacagagagtgtagtagaggaagccctggttcaggtggagtagtctccacttagaatatctagaggggactgttagcatactcatggcagtaatctgataaaacttggttaccatgacaatggattttctttgaccatcaacagcatccaagtcagtgttccaagcatccacagagtgaaatggccactgctcatggctaatacatagcacgcaaatgcattgcctttattgctcctcacggaattgaggtttttctcgaaagactgctgcagcaacttgcagatccctgaggccacaagctattggcatttatctaaccatgactagtgctgtcactgatggagtaattctctattttcaatggataaatttccaaagactgcctacacttcagcagccacttggtttaatagaactctgtgcatttcttgggacaccaaaggaatgttttgactctagtcatagaagtgaagtgttttttatatctatctagttatacgtatgaggtgtccccagtgtttctgttagtggaagaagcggttctgaagaaaatgattgaatttattggctggaaagaaggggatggaatatttaacccaggtgagtacaattagttattgatatcaaccttccaatacaaccacgtaaaaatttatccatgaggaacaactccttgcagatttatacacgacaaaaagttggatattaataattctacttgctgagaatctagcttatgcctttctccagagtgataatattttgtattaatgctaaatagatgacatacatacttaatgaatgaggtgcctacagtttaggatttatatctaacacaaatgaatcgatttgatgctggaagtttggaagggctgtaagtcctctaaattttaaaatcaaattttacttgagaagatttctgaattacatttgtttatcctgtagtccttttttgtagccagagaccaacaaatattatttcaattttattgattaggtgacaaagaatattaactatggagacctaggtaaaggccctaagtccagagctcacagattgagacttttggtttgaaaaaaagcctgtcatgggaataaaccaaaatttatcttctaagaataaaagttctagaattagagattagggtatgtaataaaatattcagaataatgggagcagggaggtcggtgttcatgtgcttttcacggtgatttttcattagactagagcagtcatggccattcatgctttccactgtattcagcattttgcgagctataacttcatgctataaatatgccattttaattttgtttttgcaggtggctcagtgtccaatatgtatgcaatgaatttagctagatacaaatattgtcctgatattaaggaaaaggggctgtctggttcgccaagattaatccttttcacatctgcagaggtaaaaattatttttggtattgaatatagattttctgagaaagcatatttaagagggctttgtttgaagattcctgatgtg

SEQ ID NO: 29188 - DNA, 2300 bp, Homo sapien
gacagcagataccaggttacaatcagttacagtgagggtaagtcaggagagacagtaaaattacacacctttttcaatcttttcttgtatatcccaggttttctaactcttcatctaagttcaaaaatctctaaatatttcagattaaaggagtgttaaattgctgctaagctaaaccatccactcaaaatatgccaacccatgagtgtgttctatcttatcttttcctccaccctccaggctgattcctaggtttataattgagccagttttcaaagacaggctaaatactttttttttttattatgaaagtaactattttatatatatttgtaggttcacataaatatatgcttttttcatactttttgtgtatgtacactggcttcataacgtggttaagaaacagaatctatctttttaaattttgttttggagatgaaatcttgctctgttgcccagactggagtgcagtggcatgatctcagcttactgcaacctccgcctcccaggttcaagtaattctctgcctcagtctcctgagtagctgggattacaggcccctaccaccatgcgtggctaatttttgtatttttaatagagatggggtttcaccatcttggccaggctggtcttgaactcctgacctatgatccacccgccttgaactcccaaagtgctgagattacaggcatgagccactgcacccagctgaatctatcttatttttaagatggcataacatctgtagagttgacacatatgtaggtgataaatagtaggtgatacatagtaggtgaccagcttttatgcctcaatccaaagttttcctttccagatgttaaaataattgcattaaattctgtgactataaatctaaatgtgtctgcttaacttacatatttagagtacacatttattcagatacaatttaatgtaatccctcaattgaaaaggagatcatagatatgtagtcaccctcaagttgtctggagagagaaaataaatatcaaacaaggcatggtgactgttacaatgtgggttcccaagaatgctgctctagatggtgtttagtgagtgggacgtttattaaggagtacccttgggatcaacatgagtgacgacctggggaaggaggaggaggatgcaagaaagggcaagtataggagtcaaattgccacgcaggctccatgacaatcttggctgacgctcggagatctctggaactacagtggcccttcaagaggggtctggagttaggcccagacggctaggcctttacatctccagcagttatcaggtgtagaccaccacaagaatgggtgtgaccctggaggaggtagctccctgcagccaaggcaatctctaaaggggctaaaacatcaatgctctgacaacagcgttccagcccggagcaacacatccttcattgacaagggatttgggtagtgctttgcagtaaaattatcacataagagatgtctcacaaaacactcctcatttatacagacacagagagtgtagtagaggaagccctggttcaggtggagtagtctccacttagaatatctagaggggactgttagcatactcatggcagtaatctgataaaacttggttaccatgacaatggattttctttgaccatcaacagcatccaagtcagtgttccaagcatccacagagtgaaatggccactgctcatggctaatacatagcacgcaaatgcattgcctttattgctcctcacggaattgaggtttttctcgaaagactgctgcagcaacttgcagatccctgaggccacaagctattggcatttatctaaccatgactagtgctgtcactgatggagtaattctctattttcaatggataaatttccaaagactgcctacacttcagcagccacttggtttaatagaactctgtgcatttcttgggacaccaaaggaatgttttgactctagtcatagaagtgaagtgttttttatatctatctagttatacgtatgaggtgtccccagtgtttctgttagtggaagaagcggttctgaagaaaatgattgaatttattggctggaaagaaggggatggaatatttaacccaggtgagtacaattagttattgatatcaaccttccaatacaaccacgtaaaaatttatccatgaggaacaactccttgcagatttatacacgacaaaaagttggatattaataattctacttgctgagaatctagcttatgcctttctccagagtgataatattttgtattaatgctaaatagatgacata

SEQ ID NO: 29189 - DNA, 2300 bp, Homo sapien
ggctcactgcaacctccgcctcctgggttcacaccattcttctgcctcagcctcccgaatagctgggactacaggcgcccgccaccatgtctggctaattttgttttgtatttttagtagagatggggttttaccgtattagccaggatggtctggatctcctgacctcgtgatccgcctgcctcgaccttccaaagtgctgggattacaggcgtgagccatcgcgcctggcctatagaaacgttttataagtttttaaatttgttacaataagctaggattaatttattattaaataaaggaaaatattttaatacatttagtatggcctaaaggtacagtgtttatgaagtctacagtagtgtacagtaatttcctagggctttcattctcacttaatactgcctgccttactcagagcaacctccaatcctacaagctccaatcacggtaagtgccctatgcagatgtaacatgttattttatcttttataccataattttgctgtatcttttctatgtttagatacacagttatttaccattgtcttacaattgcctacactaatcagtgcagtgacatgctgtacaggtttgcagtctgggagcaatagactataccatgtagcctaagtgtgttgtggaatttaccatctaggtttgtgtaaatacactctaggatgttcgcatgatggatcgcctcgatatgcattctcagaatgtatccccatcattaatcaacacacgactgcacttctttcagtatattttaatagagttacagaagattaactcctagtgttatttacgttttcatcactagatctcagtgatatttctgctgagactggatacaaaagagtatgtggggttctcagaaacttacacagtctttctgaaatttatctgcagggtcttgactttagtaactctggttgttggtatattagaaataatctattcttatttggaagaaaggtctgccctgtcttcaccgatgtgaactataattatgcttgccagaggaaaaaaattcacctgctaagaagtgacactaggcatttgcaaatgtaaagcgattttcttttttttagtccattgagatctggattacaaatgcagctccgtaaatgtagttgtcataaatgtgctttgaaatggcattaactgattgtttctatcccatcgacagcctcagttaaaagctcctaagggaatttaactttaaacataaagcctgttggaggaatgacaaaaatgccgcattcactaattaaatttaaatttacaataggaacgtgactgaaactaaaattccaagggcttgctggagcaaacacagggagaaaattttactctaaagactagacaaatattgagccttttacaacatttcaccttttaccacctccttttgctcattactataaggtaacaacatgcccagcaccccctaccatttcccttttccaaacttaaaattttgcagaggcacacacacacacacacacacaaagttgaaagtggactgggaaaagggattcacttatagaactcttaaatgtcagggcagagctgaatgaatgggtagtggatcctgttcaccacagctgccctaaaataggttccttcagctgatgacctggtgcaggcatcatatttagcctggggctcctccggctggatgaggctctgcgaagtggttactccaaagaactggacgctggaaaggtcaccaggccaagagccacttatctgccttgcccagcctgtatcctaggagggctggtagggtgctccctgccttttcctacccaaattacccacgctcctacacacttccccaccccttccccgcaaaggcggagagaccctggccctgggtcaagcctgtggcaaagcagccagcagcgctccaaatattaacagagagccgcgggctgcaaaagcctggcactggagccttggatagcaaagtgaaaggagcacggagcgcgcgcgtcctcgtccctccgtttgcactggtgttctctccgcggctgcctggtgcacctgcgggtcccccggggggcgctgcctcggcaaccaccgtcgccgcccagactgcgggagccgcgcccggggcagcctggagtgggggagcggagatgagcagcgactcggaccgccagtgtcctgtggacggtaacgactcagcgcggctgcggtttttgtccttaacctcccctgtctgggttttaatctccttatttttgacctggggactagaagtttggttatttctttgtaaagcggctggg

SEQ ID NO: 29190 - DNA, 2300 bp, Homo sapien
aagtttgtggtacatggttacaggatcagtagaaaactaataccatatcgaaggcaatcttaagaacaaaactgcaggacttaacgttctttgtttctaagaattgttctctccaccacatagctctaaatgaaagaatggcttttgaggccatgttcgtcttatatgactcttcctctctggctacaactggttggatggactgggatgaacttgattgtctggggaatttgaactaagccccgcagagacagggtctgttactccaatgtatctcaccccctaaataagtggagtaagtattcatgtgcttgtgtagtcttcttcctttgaatctgggttttaactaaaagaatgaagcagaagtgtcactgtgtcagttttactaatgtgaccatgtgtttatgtttacagttaggaaggacattaaaatgtaaaatggggctcatggcatgatagggttgatatgatgattaaatatgcttgtattcatgaaatgccatgtctgattcttgctatgtgcctgttacttaacaggggcctaagtaaatgtgagtttcatttgccgggtaaataactggagactgatggctttctgaatttttcttcaagtagtgatggttattgactcaatttccttagactaagtatagctatgtgcacagtagcttatcaggaattggatacagtctgtgaccccagagaagtggtgggggagaaaactcataagaagatcagaccagagcccaggctatataagtacagtgaaccaactgagctaaccatgagtcacggctcaaaaaaattaatacctcatgagtcaatccatggcaaacttcaaaggctgctcacagaaacctgtttaccttccctgccaccacttgagagaacaaggtcttgcgtttcttaactgccagccctagaaccaaagcttagttctttgatcctgttgtgtactctactacctggtggagttatgtcacatgtgatactaatgcctaatatgtaactgagcacttcccatgaggcagataccgttctaaatacttgatgtgtattaattcatttcaacctgccaatatgcctcatgagacgggtattaataatattctcatttatagatgatgaaactgaattagaagagtttaaatgactttacttcaaacaacaaattagtagcagaacttgaatttgtctcaggcagtctaatccaggatttgtgtttttaaccacaatattatactgattagctacaggatgagaaatgtcagagttaaaattattttgaaaatataattattttggtttcacaaattgcaggtacacagaaaaattgcagtacacagagttcagctttgttgacttcaaagacgaggtgtatttctcttcttactactttcaggacactgaaaagaatcatgtctacgagcttctcccctgcttcactttgtgatgagtctctgctttctaggacaggaacatttcctttcaggttcctgcacttgaatatctccttcccctaatttatcgtcctgaatggatggtcatggtgacatctacaacctgctttctgtaattcctattctgattagctaaaatataggtattgttttctatcttgtttatttttacacaagtttacctatataacaaacctgcacatgtacccctgaacttaaaataaaagttaaaaaaatttccttcattcacattctttcctctacaaccttacttccctatttttctgttttctgttagtcattttctgacattttgaaaattaatatttatactacccacatctatgtttgatttttataaaatggcccttgtcatgtgcaattgaagaagtggactatttgttacacaccatttaccaaggctttatttttcttacaattgcttgctcttgatgggccatttattcataatagaatgtggacctcttttaatactttaatatctaaagacttacactgaattttctccacatttacacttcctggagtcctctgaaattttccatatcttttggtacttcacacaggtgaaatctggggaccaaaagagataccttttcccatacatcaggcaaatatctcttttcctatcatgtttgctcacagaatgaaacctactctcaaaatcccttagctctgttctgagatccctgataaacttcgatggtgttggaaatccatcaatgtcagcctccaagttttctactaatgcttctagaccatgtggcctcttagaaacatccaactgatatacagcaacaacatgcaggaagacaaagg

SEQ ID NO: 29191 - DNA, 2300 bp, Homo sapien
agatacacaaagacaataaaatagaaatatccaaacaaattaaaataaaaacacaaattttattttagactgataaaactttggttcagggaacacagacaaaaatcctctgctgtcatttcagcatgtaccgtttgggctatgaggaaaagcatgtcatctttctctgtataacagaggcagttaatattttatcctaattctcattaaaatgtgtacgttcaataaatgtcggctattaaactgttggtgagaaagtctatttctggaaaccttttcattatttccttaataagactatttatggtttttttaaggaaacaagacaaaacgtaaccacttagcaggttaaaagggtagctggagttgccttactttcaaggagctacctcaaaataactagggttcatttatctaatattttaagacttctattaatattgaaacacaatttgtagttaaagagaaaaatttaaatcacctaagaaaataattcagggcctttatagttttacattaatatgccctttaatatccagatgttacttacctaataaaatgtacaattagctgtgaattgacatgaacaagtatttactgagcaccgattacgccgaaagctccgtactttctatggggtttatataagagcaattcgagtctccccactacctcacttagtttaagctcattttgccctgagtttatctggtagcactttattttagcggacaaggagggaagtggggaaaggaaaggaattataaaaatacaaggtagacgtgcacaagaaccttcgttctattattatttagtaaagtgagaactggaaacagcttaacgtccagggtaagttagtttcactcactcgacggaatgtatgcagccgttaatgtatttctgcattttcccatatttccagtgaacatacagtactttcgcaattcggagtacaaacgaaaaagggcgagagaaggtcgcattttgcctgccggagctaggggcgcgcttgccggttccaacgagttttcggtgtcggaaaacttgtctttgctcacattctcggattcccgcggccgcagaagccggaggcgggacgtgaagggcaatgagcaaggtaggctgtgtcactgccgccgcgggctcactcgcagcgccagccgaggagcgccacgggctgctgaacccctcggcccgacccacgcgccgagggctaggataatgcgcctgcgcggccgtcacgtggtgagggctccgcgcaaagcgggttaaaagtcacgaccgcggagagcccgcgagcgtcctgctggtcggtgcggcgctttccgcgtcctttaagacgagtttgaccgaggccgctccgcagttcccgcccctcggcccagctcagctccatgaacctagcggagccgcctagtaccctttctcgccgaccgcacaggcgcgcgaaaccgcgtctttcaactgacaatgaagccgtagccgcgcagctcggccactccgggcgaatcggcgcgaggccgggatggtgggggggagggggagacggttgggtcaagctccgccccagctcgcgcccctattggtgggcgcagcggttctgggcccgccccctaacggacctgtcgctttgtgacaggcggaggggccagttcctgtcgggccggaggcggagtcagaggttgcttgagctccgcccggactccagggggctcctccccctgctcctttcggctgggcgggcggcgggctagagagggaatgtcattgcttctcagagccgtggtgccgcctccgtctgctgcttctttcctggcgccctcgtcccgtcggctttcgccgccgccgccgcagctgcactggggatacggatggctagtggggcgccggggccatctgggttgagagagcggcgattgcggccgctgctgaggcggagactccccgccgccgcttcctccacccccagtccgccggcctcgcggcgctgagggcgggagcgcgcagagctcttccctcctcctttttcttcctcctcctcctcctcctccgggtccccgcccagcacccctcgcaccaggcggcggcggcggaggaggagagctagacccgccgccggggcacaacatggcggagccctcggccccggagagcaagcacaagtcgtccctcaactcgtccccgtggagtggcctcatggccctgggaaacagccggcacggccaccacgggcccggggcccagtgcgcgcacaaggcggcgggcggcgcggcgccgccgaagccggccccggcggggct

SEQ ID NO: 29192 - DNA, 2300 bp, Homo sapien
cctgggaggcggaggttgcagtgagtcaagatcaagccactgcactccaccctgggaatcagagcgggactctgtctcaaaaaaaaaaaaaaaaagaaaaaaattcattgaatttgtattaagtattttgattgttttaatttaggactagtatattatggtttctgagaggttaatgttgtagtttgtgtttgagaattgaaaattttaactttgttgacaatagccttgactttgttttctgagtaaaattttatttaagtaggaagaagtttttagggacattcatcttccagatttcagagcaaagaccattttatagcggaataaggatcacctttcactaaacatcctcttcattgacagatttgtatatttccaactaataagacttgaaatacaaaatatttaaatgccaagtatttagggttctatatttctaatataagtggacaaaataagcagatatcaaaggcttctacatgatttaatcacacatgaaatatgctgtggttgttttgtatgagataaaaactgaaactgagaaaaactttatcacgtgcacaggatcacaccagttggtaagtaatttgtagtgctagaaacttgtacaattataggatctggaccatgagtgacacatgaatcaggaaagaaagaacagcacctgtaggggttcagtttaaaggattgcacactcattgttctctaggttaatggatcctggatgaggccctgttaatactgcatcattcaagaagatttaacttaaacctcatgactcagtaatcccattcctatgtatatatctaagagaagtgagtgcatatgtctaccagaagacatgtttaagaatgcattagtaattttatctacagtaacccctaatagtaaatattccaaagtcatcagcagtagcatgaataaatttttgtatatctgtagtggaatacaacacaacaatcattaaagaacaggatggggaaataagagaagccaatacaaaagagaacatttttatgtggttacattcctgtaaagttcaacaataaggaatactaattctttagaagtctaaatagtggttaccttttttgataggggagggggttgttactgactgagaagaggcatgaggacatataaaaatgttctatatcattatgggttgtagttacacaggtgtgtatatatacaaattcattgagatacacacttaagaatatgatgcgatgtattttttagtcaggaagaaaaatttaattagcatcagataaggtaggagctcacatgactcactgaatttgtaaagttatacatagccttcagccagaaatagttagagtcttttcctgtggttagcacattatccagaaagctctggctattggaaatttgtttcaaaaattttttttaagtttcttggcagtaactttgcaggttcctcctttgattaataacttacgttcttctcatcccgtttttgttttaaagcaggttttatgccagatattggcactggctttttatagattttaaatctataaatttattttgcctggagatgtcatgcacaaatatgtttttatctgccagctatgggttttttatgatgttattgacaaatagtgaattaagtctaattcttcataactaattaaatttgaatcatatacatttttctaaactgtggatgtgtaggttttatttagtgaacactagttataatttctaaatgtggctaattaatcagttgttcagtagtatcaatttagaaacaattagatcgtttgtgagacatttatataattccaggttggttttatagttttaagtatctagttcagtttcctgggaactttttccctccaacatattgtaagagaatttgtctttgcagttgctctatatgcaatcagtgctgtctactttgctggagtgatggtgcgactgatgttgactttgactccagtcgtgtgtatgctgtctgcaattgccttttcaaatgtttttgagcactatttgggggatgacatgaaaagggaaaatccacctgtggaggacagcagtgatgaggatgacaaaagaaaccaaggaaatttgtatgataaggtggggaatctaaagtaaggcctttaaattgtctatgtcctttcttaatttttccaccacagtaagaactatacatatcaagaaatgttattaaatgatgatttggacaaactgtgacttttctagttggtctccactgtttgcctcaaaatatgaatcctggtcagtcctttagctcagagttagaa

SEQ ID NO: 29193 - DNA, 2300 bp, Homo sapien
aacttacgttcttctcatcccgtttttgttttaaagcaggttttatgccagatattggcactggctttttatagattttaaatctataaatttattttgcctggagatgtcatgcacaaatatgtttttatctgccagctatgggttttttatgatgttattgacaaatagtgaattaagtctaattcttcataactaattaaatttgaatcatatacatttttctaaactgtggatgtgtaggttttatttagtgaacactagttataatttctaaatgtggctaattaatcagttgttcagtagtatcaatttagaaacaattagatcgtttgtgagacatttatataattccaggttggttttatagttttaagtatctagttcagtttcctgggaactttttccctccaacatattgtaagagaatttgtctttgcagttgctctatatgcaatcagtgctgtctactttgctggagtgatggtgcgactgatgttgactttgactccagtcgtgtgtatgctgtctgcaattgccttttcaaatgtttttgagcactatttgggggatgacatgaaaagggaaaatccacctgtggaggacagcagtgatgaggatgacaaaagaaaccaaggaaatttgtatgataaggtggggaatctaaagtaaggcctttaaattgtctatgtcctttcttaatttttccaccacagtaagaactatacatatcaagaaatgttattaaatgatgatttggacaaactgtgacttttctagttggtctccactgtttgcctcaaaatatgaatcctggtcagtcctttagctcagagttagaaaatagaatgtaatcagagaaggaattcctctttttggtaatttgttatctaaatacttaagatatatacccttgttaatatacccttccatttttgagagcaaaaactttatgctgtactaaattacataacatttggcactgtaaacccctctgaaaccatgtggacagacaggtgcttatccttgaggtccatactcagtgcatactttcaaaatattttggaagtgacatttgattggttgaacagtaaaatgaagggagcaaaatgccttttttaaaaccctccagttcgttagcaataggtaactggccaatacaggtaatttatttttaatctatagtttctcagttggtgcaagtgtgaaaaggacttgtaagaattagagcacttgtcttggatgacatattaaactttgctatttgaatattgcctggattttaaaatactaataaattaaacttcccagtatcagtaataactttgaaattctttccttctataagatgaatgtaattcataaagatgtgtgttaataaacccacattcctgatttttgtgtttgttgttattgttggggtttttttgttgctttgtggtttcttaaccagccttgaaatttagaagttgtgactttttctattctctcttcccttttctgttggggaaggtgattttttaaggtaatcgtagttttaacaagtctgttggttttagggtttcgaaatcggaagactgattctgttaatgcagttttttcctatactaaagtggtacatggtcaaaattatagctgagcattgccattttcaggatgtggaattcagattttataagaatttacatattaagatttcaccagaatggggtcatttggttaatctcctttgtatttaattaaagtataaggacaactgggtttgaaagcagcttcttactggagataattattttgctctgtgaccagtttctggattggtatattcccaggaaaccttattcacgtttgacttagaaaacactccatcacccacataagaatatctgatggttatacattttctgagtcatagaattaaattgatagataaacagtctctcaactttttccattgagtatcttaatgaagcaagtcaaataatgaatttgtctaaccaatttttttaatatctttaggcaggtaaagtgaggaaacatgcaactgaacaggaaaaaactgaagagggattaggccctaatataaaaagcattgtcaccatgttgatgctgatgctattgatgatgtttgctgtccactgtacctgggtcacaagcaatgcctactctagtccaagtgtagtcctggcctcatacaatcatgatgggtaagaaaataactcggatacaaaaacattttatacttacacttctttttcgttgtctcaaaggatataattaaaaaatagaatgttgtttgt

SEQ ID NO: 29194 - DNA, 2300 bp, Homo sapien
tacaggtaatttatttttaatctatagtttctcagttggtgcaagtgtgaaaaggacttgtaagaattagagcacttgtcttggatgacatattaaactttgctatttgaatattgcctggattttaaaatactaataaattaaacttcccagtatcagtaataactttgaaattctttccttctataagatgaatgtaattcataaagatgtgtgttaataaacccacattcctgatttttgtgtttgttgttattgttggggtttttttgttgctttgtggtttcttaaccagccttgaaatttagaagttgtgactttttctattctctcttcccttttctgttggggaaggtgattttttaaggtaatcgtagttttaacaagtctgttggttttagggtttcgaaatcggaagactgattctgttaatgcagttttttcctatactaaagtggtacatggtcaaaattatagctgagcattgccattttcaggatgtggaattcagattttataagaatttacatattaagatttcaccagaatggggtcatttggttaatctcctttgtatttaattaaagtataaggacaactgggtttgaaagcagcttcttactggagataattattttgctctgtgaccagtttctggattggtatattcccaggaaaccttattcacgtttgacttagaaaacactccatcacccacataagaatatctgatggttatacattttctgagtcatagaattaaattgatagataaacagtctctcaactttttccattgagtatcttaatgaagcaagtcaaataatgaatttgtctaaccaatttttttaatatctttaggcaggtaaagtgaggaaacatgcaactgaacaggaaaaaactgaagagggattaggccctaatataaaaagcattgtcaccatgttgatgctgatgctattgatgatgtttgctgtccactgtacctgggtcacaagcaatgcctactctagtccaagtgtagtcctggcctcatacaatcatgatgggtaagaaaataactcggatacaaaaacattttatacttacacttctttttcgttgtctcaaaggatataattaaaaaatagaatgttgtttgtgagattctgcatttgcttgtttttaattttttattttaattttggtaggtacacagtaaatacataattttatggggtacattctatttatgtcttttgatacaggcatgtgtaataatcacgtgtaaaatggggtttccatcccctcaactatttatcctttcagttacaaacgatcaagttacactcttagttatttttaaatgtataattaaattatttttgactgtaatcacactgtggtgttcgtacccgttaaccatccccgtgcactctcccccgcccctgccagcctctgccttgtgctcctgtgaagctctgtatttgaatctacctttctttgtcctctcctccaccttggtgccatgggtagtaatcattgtatttcatgctcttttccagaatatttctgcatgcataatcatatacattagtttttctcaaatgtgtggtctttgtacacacagcatcatcattaccatgaaacttgttagaaatgcaaattcttgacctcaccctaatgttacagaattagaaacctggggctggggcctagcagtctgtggtttaatagacctaggtgattcagatgcagctaaaatgtaagaacagctgatttatgtattgccatggctttcaactactctttcacttgggagcttattaggcttgtacactattaggccctaccccagaactactgaatcagaatcggctttttttttttttttttaaatacaagatatgcaggtggtttgtgcacacacacattagtttgaataacaccagtctagctcttcattgtttcacttttttttttctcattggtagaggcttttacttaataactaccatccttaaaatctgaaagtattcagtggtttaatacctcaagattttaagttagcctcttcacatttgtgacatctcatttaaaagagtattgtgattcttttcagcaccaggaatatcttagatgattttagagaagcttacttttggctaaggcaaaatacagatgaacatgcacgagtaatgtcttggtgggattatggctatcagatagctggaatggctaatagaactacgttggtggataataacacctggaataacagccacatagcactggtaaggatttactaaatacaaggttaa

SEQ ID NO: 29195 - DNA, 2300 bp, Homo sapien
cctcacctctcagcccagttttcaccattcttctgccaagcttcactacccaagagatggaataagctaatgtttattatctatatacaagtcatatttcagaatctataaaacaatccaaaaacctcggaagtaaaaatgtctatagttgataaaaaactttcaggaatgtgataagattcatgttctcttgagattcatgcagtgtgcattccagctggctagatttatatggtccttggcttcgctttgccatttattgcttaataaattgtcagtgcagaaacaatagcagacgaaaaacgtaatggcactttccaccctgcctgtggtttataaaatgatacaaacccatacaaaagaaatatccaactaatttgacaattgagccatcttgttttgccattgaatcattaatatcctttggattattaagccctaggttttttttagagggcaattttaatagcaaatatagaggttttatgatctgcatggaataatcacaattgctaaatttagctaaagcgtaactataaaaaaaagtcaggataaatttctgcatgtttatggcttgtccttagcccgtcccacaagcaactggctgttggtgtctcatttcacatcttacctgcacatagtaggagttggatcatggtatcatgagacgcacagcttttgggagtatttttgatgcaaagcctttggatagtattgccacaaactggcaattcttcaagtttactaaggaaaaaggccctaatttctgcaaagtcctttgtctttggaagttcattacacctggtacacactgtaaatcagacttgtgtaacaggccttttgacagacaaatcatttgggatttgtaggggccatcttcatgccttaaataggactaagcaacgaatttcccatttggtaactctagatttcttctcctgaaagttcaagctgaagtcaggttttatggacaaatgacacttaggcccagttttgtaaacagatataatttccagggaatcgttgtttttttttttcatagtcaacatttatgcagctagtattattatatttatgcagttatttatgtgattaaattgatgatttagatttcattagaacctgttgtgtgcccatgatatttgagaataacttcatatatattatttgagagataggttatagatggaaggacataactatacaacatgactacttgcactttaatatctctttgggggaaatttgaggctctctaaggcagcatttggtatcttgctctttgcaatcgtatgaatctttgagagcatactaaaatggtaattcaactgaatgcttattttgtaaatgttaataacaccacaatacagccctggtagatagcaaaaggccctgaaaaactgccctttgaggccgggtgcagtggctcagcctgtaataccatcactttggtagaccaaggcgggtggatcatgaggtcaggagattgagaccatcctggctaacacagtgaaaccccatctctactaaaaaatacaaaaaaaatagccgggcatggtagcgggtgcctgtagtcccagctacggaggaggctgaggcagaagaatggtatgaacccaggaggcagagtgtgcagtgagctgagttggcgccactgcacatcagcctgggcgacagagcgagactccgtctcaaaaaaaaaaaaaaaaaagtgccatttgatactcatattagctacacaaggttagaggcatttgaaaataagcatgtggttccttgcctgctttctttttaaataagtattatagaaatgacttttttcagaggaggctaaaaaatggcaaaattattcttataacgggtatttcagaatccatttttcatatggctcaagagaggattttccgtgggattcagtgcagtctctgttttggtgtaagtacaggccgcttgagaacgttgtgatctgtgcttgcttccccaccttcttgctacctctcactccccaggctccccacccccttaggtgggtgtagaaataagttggatgtgttttggaacaatctctgcaatcatttctttctctgttttctctattttagctgctgatgcaaaagagaaacaattctgggtgactcagcttcgagcttgtgccaaataccacatggaaatgaattctaaggtaagtcaccgtgagaaaggaaggaggcattcgaataaccagcctggctttcagccccattatttgtttcttcggggaaggtgtttttcatgttattttttaagttgcccactgcagt

SEQ ID NO: 29196 - DNA, 2300 bp, Homo sapien
ttttgccaacttattatgtattttccaaattgtttttcaaacataaagactttttcctctccaaacataattctgcaggtaccttttccctatttgctatactacggtaggtcaaggaaagctttctggaagaagtgacttgtaatccataactccatgggtgagaaacacaaaccgggtgaagagagcagggaacagtgtcaccagcaggaggaacagcatgtgcttcatcactctttcatgatatagcctctactttcagcacatctgctccactcacctcttggacatttttgatcccatacggctggcttgctcctgccccatcctggccttgactattccttttagcttagttccttccccacttgaactggtctatctcaagggtctaattttttagtccaaggtgagaatttgttgtgctagctcattcagtcttaggttggctgcataaggtggagtaatggtggcataggttaggtaatatgaaataaaatgacacttctcctcttttagcaggagcttaaggtggcagtctccaataaaaggcatgttgttttggtacataatgctgacatttatagtccagtatgcacctaccttcccaccttcagtctgtatgtcaatgcaggactcaatgaacactcatatatgatcagtaagttagcttaggcaaagctatgctgtggtaaaaaataatgctaaaatctcaatggcttcaaacaaacattttgtgcatgttacatggccaacactaactggcttaggatctgctgtattccacaccttctcactccaggacacaagcttaaggagagtccttatccgggacatgctgctctcctgggataaggaaaagagaaagatggtggaaccatatgactgctcttaaagcttatgtttggaaggggcattcattacttctgttcacattccattgctcaaagcaattccatggccaagcctaaggtccatgtggaggaaggatactctttccataggaagcggcagtaaatattttgaacaaatgaacattcttgcatagtttattacagccggtatcatttgtcccattttgcagtgagaaaactaaggctaaaagaggtaatttgatcaaggtcataggttagaattcagctctgaatggcttcaaatttggtccaggcaagctcttttcagatttttttttttttaacactatgtaggcacctggaattgtaatttactcaggggcacaaccacttctcttcaactccagaagcttctccgtgcatctctagagctaaaccacccatgaaatcttcctggaaggatgtgaagctagaaaggggttgggctcggggaactgtccctttgagagctgacttttccatttagtaattttttttaactcttgaagtatttatctgcttgatgggtttgtagatcctttggacggagatcacctatcatctatcaccttttgttttgtctgtgtgtgtgtgagagagagagtctgagttcctcaaagcttttttctaggtaatttttgatacttcagattacaatggatatctatattcacaaaaaatattagtgggatagaaagagtatctttaggtaggaagaggggcgcagaagttacagccaacacagagaatccttcaatgtttgtaaatatctgttaatttcccttgcctctggagcagttttcccggtttcagagcctctgctcctaggtgcacgtgcagtgtggtagcaatggataggttttgacttgccaggtttatgcgtgccattcagggcaggggattagggttaggccagtgagtgacctaggacactcaatttaaggaagcactcgcacaaacctgagagttcgcgcgcctcaccccagcccagccgtgtgtctgttaagcatttatcataatcctgctgcatgaaaatgcccggcgagcttacctgtgaggatcacctgccactcccctcctccgccagacaacgcggagggcctccctgagctgtgactttgctccgccggtgataatttccaggttactgtgtaggagcgtctggcgcagcatcgtgtgcggaagaccgagagagggagtgtgcgtgtgagcctgtcaggccgggcgggtccatatccgggtggaccgggtgggtggggctgcccctccctccaggtcccgaggtggataaggggtggggagtgacgtgcagagattccctttcgccccttcggatccaagagagggtggcagaaggaatgcgtgggtgacttggcgtggatttagggcgtgcccaccctgcagatc

SEQ ID NO: 29197 - DNA, 2300 bp, Homo sapien
aacacccttctttctccctctgcaaaccttggtgtgggtatttggccttactgtgtcaggtgaagggaccctagttcagttagataacataaatatttgcagtgtatgtgtactacccaaggacatgacttcattattcaatttgacaaatgcgttctgttacacaaatacagaaaggattaataaagctttactagtccatctttcccattatccctgcatgtatccttgcattagtgcaaataattgagaacaaaccattggtgaggggatggaaagactgctctgactcaccagctccctttaagtatttccttaagtaaatatcataagtaacacaaataaatatttcatacaatgtagagaaaaaagcaaaaataacagttctctgagcatcaaactaataggcttagtattactatcatttttttgaaacggagtgtcgctcttgtcgcccaggcaagatctcggctcactgcaacctccgcctcccaggttcaagagattctcctgtctcagcctcctgagtagctgggattacaggcatctgccaccatgcctggctaattttttgtattttcagtagagacggggttttgccaagttgggcagactagtctccatctcctgacctcaggtgaactgcctgcctcgacctcctgaagtgctggggttataggcgtgagccacggcacccggcctaggcttagttttttgtaggtactagagtatttgtttctttagccagaatccactgatattttagtcttctggttctcaatcttggcttgcttttgcaactacctcttgaactttaaaaaattctgctccagcctgggcaacagaaggagactgtctcaaaaaatatatgtcaataagtaaatatcctgatgcctggatcccaccatgggacattctgatgtaactggcctgcaatggtgtctgggcatggggatttttaaaagccccagtgactaatatgcagcagagtttgagaaccactggtttaaaggactttgtcctactctgacagcgtctagcacagtgcctggcagagactgatgctcagaatgaacaaactaagattctatttgtcaaggaggagagcattgtgttactcacaaatgcaaacaaaccacaagcaagggataagtcaggccctgggcaaagacaatggtaaagcaattcctgccaagtaagcgtgtgagggtgacacccactgaatgcaagctgttgttacctttttccctttatttttatgtatttattttttgttgagacagggtctcactgtccttcagtctggagtgcagtggccctatcctggctcactgaagcctcgacctcctgggcacatgcaattctcccgcctcagcctcctgagtagctaggactataggtgcgtgccaccatgcttggctaattttttaaatttttgtacagaggggtggggggtcctaattatgttgctcaggctggtctcgaactcctgggctcaagtgatcttcctgactcggcctccaaaagtgctgggattacaggtgtgagccactgcaccaggtcaagtttctatcttgactctaactagaaaaggtgtcatccttgaaatgcaggtactgttcagccaaattccaaagtcctctgaagatccaagttctctaagaagttcagaggtgccaggctgtgtcttgtttgtgcaaatgaaacagaggatgacaaggtcgggtgggcatttcgagctctgccccaagtctggtcggcttgagagtcaacctaggagcctctctcggctccaaatggcaatgtggcagcccttcccgagtagggaaaaaggagcgtgtagggggcaccacggcaagctggttgggtctgctccacccatgaggatggagtgcagcctccaccgggaaccaggggcgcgagtcgctgctcagtggcctgggcctgcatgtggcgcggcgggagctgctgcctagggccgcgcagcgacggggggtgaggactacatgtcccgacgtgcctcgggcagggcggggcggtgccggagccgggcctggaggccggccggggccaggcgtgcgcagtggttcttgggagtggcgaagcgggtcctgccccgctgtcagctgcggcccccggcgccgggcgggggtggccgcgaccattggcggagaggcgaaaggggcggggccgccgccagccgctgcgggcaaggctgaacaggcggaggtgggcagccggccagggaagcacggtccaggcggctacattcggcccggccatggcagcggcgcccctga

SEQ ID NO: 29198 - DNA, 2300 bp, Homo sapien
gtcctccacacctcctgaagggataagggaattaaacttcagatacattttctttggggaatcctttgtgtgagggagtaactcttagcacaggcattagtcaaggtaataggctaagatactgcaaaagacataataatgtgacaaagaacaagagacttgtcttcctctcacatagaaatactccagtggtttgctttacactattattcttggtcccatgttttttgtttttttttcccctgtaccatctcctaagccttgtaaccctcagtgtgatcaaggctaagttaccaaggttttcagctcacagaaagggggaagagaaagtgtagaggaggcaacccactgtcttgagggctctgggctgtcagtggaaaccacttctccctctcacatccaacaatgagaacttggtccatggccatgtgtagctgcaaggactgctgggaaacacagtccctggctagatgactagcgaccagcttacaggtctgtgattatagagaaaggggagaaggaattttggctgggagttggcaatctccatcacaacccccaaactaggtttcctcagaggctggcccattccgaatgatgttcctgtgacagacacgatttcctcagagaagaatcttcatccaaggcctttcattttgggaaccaggaatgcttaatggggactaagtcagttatagttaggtttaaatacatatgacagaaaacctaaaataacagtggtctaagcaaggtaaatgtttgtgcatttttctctaatgtaaagacatttgtggttggtgtagcatcatggtggcagagacttgtttgattccactgttctgccatctcggcatgtgctgtcctccttctgctctaagatgactgtctgaatttccgccatgccttcacattcccactggcaaaaggaaggagaaggaccttccaggacattttctagaagtcacaggcagcacttccattgatgctcccttgatcagaactcagtcacatggtacacgtagctgcaaggagcacagggaaacatagccttctttgctggcattcaggagcccagcttgaaactaggggttctaatgctgaggaataaggaagaacagatactaggtgcagcaagaagcctttgccagagaccatgtgccctggagtccgcacggcatgccttcacttctgccgtgttaaactaatcttcacccttaaggaaagaaatcgtcataatagctgacatgtgttgagtgtatatcaagtcccaggcagttttctatatcatttagtcctcacagtggcactctcaaaggagagtttagtgtgggatcatttacagaggggccatggggtcgagggaatcaacaggggttggtgaagtgctcggagattagcaacagcaggaagccattaccacccctaaaagggtcagggaaagaacatgtcaccagcctgaagagggcttagagacatggccttagaaaggggctgcctggcagcagggacagctgtggaatgaagccaagccagaaacactgtgagcctaggcagaagtggcccgaggaggctgataaatacccttgacctgtctctcctcccatcctttgatctcctgacaatgcctcccattggctgaagcccactggaagccagagaacaagggagcctggggaaatagtttagagaaagcagcctcctgagaacagaatggggcagagaagagcggaaaatggatgagggggctggtgaggtgggagagcaacagagagcaacccacatagtgttattagaggtgccttttgcagataaggcagttgaggggtggagaggataactcacctgcccagctggtgacagaggcaaaccctctgcttcagacccccataaggaataaggaaggcaaagcaaacacacttgccttccttgtctatctgtgcaatgctctgcacatagtaggcatctgataaatggtcagtgagtgaaaccttgtggacaggcaaggtttgatataagaggagaaacggtcttctctgccttttggttgcaggttgccatgtcaaatcttagcgaggctgtgcaggatgcagacctgctggtgtttgtcattccccaccagttcattcacagaatctgtgatgagatcactgggagagtgcccaagaaagcgctgggaatcaccctcatcaaggtaactcgagtgcatgctgcccagggctagacattggttatcaggaaatttcatttcctcacactttcatctgcttgagatttggagctgaaggggaagttgtggcggt

SEQ ID NO: 29199 - DNA, 2300 bp, Homo sapien
ctcccattggctgaagcccactggaagccagagaacaagggagcctggggaaatagtttagagaaagcagcctcctgagaacagaatggggcagagaagagcggaaaatggatgagggggctggtgaggtgggagagcaacagagagcaacccacatagtgttattagaggtgccttttgcagataaggcagttgaggggtggagaggataactcacctgcccagctggtgacagaggcaaaccctctgcttcagacccccataaggaataaggaaggcaaagcaaacacacttgccttccttgtctatctgtgcaatgctctgcacatagtaggcatctgataaatggtcagtgagtgaaaccttgtggacaggcaaggtttgatataagaggagaaacggtcttctctgccttttggttgcaggttgccatgtcaaatcttagcgaggctgtgcaggatgcagacctgctggtgtttgtcattccccaccagttcattcacagaatctgtgatgagatcactgggagagtgcccaagaaagcgctgggaatcaccctcatcaaggtaactcgagtgcatgctgcccagggctagacattggttatcaggaaatttcatttcctcacactttcatctgcttgagatttggagctgaaggggaagttgtggcggtttttcgtttgtgttcttaaagatgctcaaaagtcataaaaaaaataagactagtttagctcagattgagagtgggctgctttccattgcagcagactagcagcagcagtgatgtgaagagctgtgccgccccttccagtccactctcggggctcagcctgccatctggaaagcaccagcagtttgaattagctgggaaattaataaccattagtgcccattcttggatatataccctaaagcatgtgtttttaaccagaactccatgaaccacctctgaaggtccacaggttgaatacaggaagttcatgcatttaaatgtggtggaaaaaaatccttgcattctaactcattttaacctctaagtgaaatgagcattctcttcatttatgaatgcagctcacagccaaagtttcagtaatagcagtattagcaggatctgagaccttgtcaataggagtcgcagggctttcatttcagtttacacctttttctgatatctcaaggtatcatttatactcatcactacttggaaattgtggtaattgttagacctgccatgatatctttttctaattgcattaataaaacagtgcatatattactttatcataaatttgttttttaaacaaatttcaacataattggattcctgggttattttaggtgttttgttttatgcatatgaaattctgagaatgagtccataaacttcaccagactaccaggggtaaggcccatgtcgttggaaagattaagaactcccaagagaggctgtgccagagcatttacagatgaatgttcatgaaggcaaaccagagcaacccaaatgtcatcagcaagagagtagacaaatgaaatgtgaactattcattttggaatactgtgcagtaagtgaacagaaacgaaccagaagtttgatgcagccacatgagtgaatctctaaaacggtattgtagttcaagacagcacatcacaggtgaatggcacaactctctttatagacttgaaaccccagggataatgacgtataacattgtctagggaccatccgatgtggtaaaatagtcaagaaaagcaagggagcaatgcatacagcattcaggacagtggttcaccctggggagcaggggtagaaggaggatgaacttgagaggagacacacaggggacttcagtggtgtcagtcacgttctatttcttaacacgagtgatgagtacatgtttattttcttcatttgattcttctttaagctgtacataggcagtatagatgcttttactcttgtaagtaggagacatttttcaagttgtgtagccatgggacatctactatcccatgcctctttgatttggcggtttgttctctcctaacttcttggcatccttgtagggcatagacgagggccccgaggggctgaagctcatttctgacatcatccgtgagaagatgggtattgacatcagtgtgctgatgggagccaacattgccaatgaggtggctgcagagaagttctgtgagaccaccatcggtaagcactgcctgggagggaccccaggagtctggacatttgatgtttgaacatgtacatattccatttctgatattttctgtaatagactcttc

SEQ ID NO: 29200 - DNA, 2300 bp, Homo sapien
tatagttcgcatagcctgtgtggtaggaagaggctgagaagctttcgcaggttcaggcaagttggtaccttacgaagacatatgcacttggtcaggctgtcagttcctaggaccaattcctcatcagctctgcctgcatcatttttagagaatttttccactttttcctttctatgttgactgcaatgagaggcataagcagcaaccgcagtaagctctcacattattgctcaggaagagaagacactagggggccttcctatccccatcctttattctctagccctcttcattccacatcaccccgtgggagagggcaagagagggctctgttctgtgggtctgtggggagtagacagaaacttcaggaggcccaattggatgttttttttcatgtgaagtatctttgcgcctcggtcttctggtaagcaatagctgtatctaaatgaccaagtctgtttgtcatggtgagcccggccacatcaatgatatgtttgatgtgttttatcaaaaactgcctgtgtactagagaagacatttttattccccagctcattctgtttttcatctcatccctcacattttataggcctgatgttttaagaaaagttattctttcactataaaacttggttttattaaaatacacttattttaactcatttcccaaactaagttcatgttttaaaatctcccacggctctctgtacagtcacaggtattactggaattgctagtgtggttagacagttggatatttgctttttggggggcattgagtgttcttggtgaaggagctggaaaagtggaaggggccaggaacctaggggctcaactgaagttccaactgagttgccacctgtgcaactgtgcaggtgttacttgtcataggtggtaatctgacttttacttattatttgggcccagctcagatgccgcctcctccatgtggccttccctgctgtgaacggaagcttgtggctcctgccacttgtcagcacactctctcccctctgccttttttttttttgagacagagtctcgctctcgcccaggctggagtgcagtggtgcgatctcggcttactgcaagctccacctcccaggttcactccatcccctctgccttttgatgtgctttgttgtgtctcttttctcagccagattgtcagctccttgaggacaagctctatgtcttaactctcatctttgcagctctcccctgggggcatcttcagcccctgcattccccctgccacccgctagcccctgcaatcactgtgtccctccagggctgagtggggtgctccccacacagtacatgctcagtgcatacctgttgaaacggaatttcagattctcagtaccttttatggaatatcactttctgctgagcattaacagttatttgtacacgttttatttttcctgtaaggtcagggctggtaaacgttttccatcagggccagacagaagaggccttgtggaccatatggtctctgttgcaattactcaaatctgcaaccatagacgatgtgtaaatgaatgggtatggctgggttcccgtaaaacattatttacaaaacaggcagttggcctagattgccagcccccttagcagattttcagcttctgaaaaggcaggctctgtgtctcatttgccttgtgtctagcagaggccatgcagagagtgagtgctccataaatactcatttggggattattaaatgaagcaaaaggctggaatttgagctgcacacatacaggcctcatgacccagtgtttcaattcctaggtcatacccaacaggattgcctgcacgtagtcaccggagggcatgtgccagggtgtccatggcagcactgtttgtcatggccccaaactggaatctaccccagtgccagttgacaggagataattaaatcaattgcagcatattcacaaaatggaatactatgcagcaattaaaataaatgtgctctatgtaaaaatatggatgaatctcacaaacacgatgttgaattaagatgaagctacacataaaatattacatattgtatgactccattcacaaaaagttgaaaggcaggtaaaacacatctatgctgtgagaagtgaggagagtggttacctttggtggtggaggtgggctggaaggggttctcgggagcttcctgaagcactggctgtgcttttctccttgatcagtgtgctggctatgggggtatgctcagtttgtgaaaattcttcaatccgtgcacttaggatttgtgtacttttctgtatgaatgttatggttgc

SEQ ID NO: 29201 - DNA, 2300 bp, Homo sapien
tgactccaatcacaccatgcaaagcagaagaacctgccagccaagcccttcccaaattcctgacacaacagatttctgagcaaataaaatggtgattttaagccactaatattttgtgaacatttattacattgcagtagataatccaagcatacacttatgtcattcatgatttcccttgcagaaaattagtatattagagtgtcaccccagaccttaccaaaggtattatgtaatatatggtacatgcacattttacctttctaaattgaaaaacaaaatctgaatttagaaattcatctgaccccaggaattttaagagaggattgtcctttgttaatattatggaaataaagttgtctagactccgtcttttacgttcactaaatgtcatgcataatgcttgagtctcctccagccatttcatgtatgtatctcttatttccccaaactcattaacagtttctctaaagcagcagctaacttcagcatgcatcagtgtcttttggagggcttgttcaaacacagcttcctggctccaccctcagagtttctgattcagagggtctgggggtggggcttgagaccttgcatttttgataagttcccagggaacttacctgctgttggtccaaggaccactttgagaactactgctccagggagaagtgctatattttaaattttaagaatttacccaccagcccaaggtgcttaccaaatgcacatggatggaatctctccaaatctacatctttgccatgcttttgaagccttaacttttactcctggaggtcttcctggctaggccctagacttaaaagacactaattccttgttttattttattagattgtcgtttttgctttcttctcagcacacttgataagacactgtgaagaaaatgtcccttctgatctcgtttttaacctgtcttggaacagatcagcagaaatgccttcactgtgaatcaaagataccctcgatttatagccaaagattatttccttttcttttggtggcttccagataaaatgtttcttgctaccctttcacaaaatagaaggagggaccaagcggaagataatctttttgttcagaggtccatctgtcaaagcctgcattttagagatggcattactgaggtccaaaaactagagccactcgctctgggtcatacagccgataaacgcacgcagccgagctcagttcttccctgaccctgttacaaactgcctcactaaatgaggacccccatccccttcccatgccaggaaagcacagctcatttgtcctaaagttaacattacacaaatcacacccttcaagccttcttgaaacattttttttccccgagggtgacgggacggttacgctgattcatcctggccagggaccccaaacatctcccctcctccggcccaggcgccgtcacccaggctccaccggtccgcgggacagagccgcggagagcgcctggaagcgtcgcgccctcaaagccaagcgattaagttggttcctcaaattgttcccgacaggaggggcaggaaataacaccgggctctggcggcggccgcagcaggagggggagaagagcgggccgtctcccgggcagtgctggcggcctctcatcgatctcgggtctaaggtccggccgggtcatcattcctgccatttccacagcattcgaggtaccacatcaccccctgcctcggtcgtcgctcagtcattccctccgcgccgagtcctggagcggcggagtccctggaggcctgggtttccttaaggggccccaatgcccgcagcccccgacccgcccaggtggaaggaaacaggctgcgggcctgggccaggcggggcctgacagaagtaaaggccgggagggggagcggaagacggccagaaggacccctgcgccctctcctccgcgccgcccgccaggctgccaacccagccaccctgggtgcgacgcggcgccttctccgccgctgggagtcgggcaacaggtgaagagggcgggcgtccgcggcgcctccgcggggcggtccctctcctgcccgcctcccgcccgcccctctccccgccccctcccctcctccgggcctccaccgccttccccggctgcccggcagcctcccctcgctcgctctcctcttcctctagggccccagcgcagctcgggagcccgcgcaccgaggcgctaggggcaccgcgcactagagggacacccgccgcgcctggacagcccccggcgggcgcccccctcgcacctcctgccccgcgcgggccgcgctcccctc

SEQ ID NO: 29202 - DNA, 2300 bp, Homo sapien
taagagacttgccaaaacagatattgcatgggtatcatccaccaacaagaattattaggactttgccacatcgaaaactcttctgatgacaagacagcactggcagggaataaactcacaaagatagttttatgtttcactttgctttgttttgttcttgaggcagggtcttgctctgtcacccagcctggagtacagtgttgtaatcatgactcactgcagcttcaacctcccgggctcaagcaatcctcccacctcagcctcctgagtagctgggactacaggcatgtgccaccatgcccagttaatttttgtatttttttgtagagatggggtttctccatgttgcccttgctggtgtcaaacttgggcttgtgagcttgattttgggattacagacatgagccaccgtgcccagccagattttttgatgttatctccaaatgaataaatgtaagtatggccacagggacactgctcaaaaggaacatgataacatacctcgttttggtagtcccgtttgggcctgtcttcatttttatgtttttttccttttctttttctttttctttttttaagagacagtgtctcactctgtcacccagacaagagtgcggtggcaagatcatagctcactgcaatctcggactcctggcctccagggatcttcatgccttgacttcccaaagtgctgggattataggtgtgagccaccacgcctggcctcttcatttttaaaacaacccaaaagggatacagaatagaatgtcacttggatagctgtttgacagctttttctttttcttgtctttttttttttttttaattgagacaaggtcttgctctgtggcccaggctggagtgcaatgccactgtcatggctcactgcagcctcaacctcctgggctccaaggctcctccagactcagcctcctgaacaggcatgtgccactgcacccagctaatttatttatttatttatttttatttttatttttattttgagacagagtctcgctctgtcgcccaggctcgaatgcagtggcgcaagctctgctcactgcaagctccgcctcccgggttcacgccattctcagcatcccgagtagctgtgactgcaggcgcccgccaccacgcccagctaattttttgtatttttagtagagacggggtttcaccgtgttagccagaatggtctcgatctcctgacctcgtgatccgcccgcctcggcctcccaaagtgctggaattacaggcgtgagccaccgcgcccggcccagctaatttatttttattttttgttttttgtagaaatgaggtctggccatgttccccaggctgacagcttctaacagaagcaaacatatgctccccttgtaaccagtgcgttcacttgcagatatttgtcccagagaaatgagagtttgtatccaccaaaaaaacgtgtaccataatagtgactatagccagaaaagagatgagggaggggggaaaggccggaaggagggaaggaggcaggcaagcaggtaggaaggaagcaagcttggtgtccatcaactgggtaaacgtttaaaaaatacggtatctttgcacagtggagtactactcagcaataaaaaggaaggaactgatatgaactacttatattcccaacaggatggatcttctaatttgttatgttgaaggagaatattctgtattacttcaagtttatgaagtccaagaacaggcaaaatgaacctacagtgacagaaagcagaatacactgtagtggttgcctgaggctggataaggatggggccagggaaggaaggtaggtcaggaaggcccaccacggaactttctggggtgatgggcacgttctatttgttgatctgggcgacggttacacaggtgtacacatatataaaaattagtggagctgaacacgtaaggtctgggcatcacactttatgtaagttaaacttcagtaaagtgctctcagcacacatccgcagccgcacccacacaaaatcccaggaggctcagtaccagctgtggtccgggccttgcccacctcggagaggccacgacccaaggcatccggtttcctctcgctccagtctaacttccgcgcatctacgagggccgggactgccgctacctttctggaaggcgccggccggccagtcaccggagggatcccgccagaggcggctccgcgtctccagcagcggggcagggacccgggcgccccgccctcgccagcgcccgcccccgcccgcccccggcccgccctctgtatctggcccctgggcagc

SEQ ID NO: 29203 - DNA, 2300 bp, Homo sapien
gggaatgaatacctctcaagtccacacttggggccattcacagagtgggctgacactcccatcagtcacacaagaccagcacattgttagcccagaactttctccgaagcagaagagaaaggcaaatatctctttaaggtactttgcttctccgagctggagctttgtttaaactctccagccgggaagttgcaagaagctcgtttgctttttagtagctttagccagaggttaaggcactgtccacagattgctctcaggagtagaggagtccttagtggctatctctgctcacaccagaagcttcctttctctctgtcctcttcccttcctgcctgcccggcatcacttctgtcttgcttggcctcttcctggtcagcccgcatgttggctgcctgcgagcggctctgctcatcccatttgcgtgttgcaagggagaagaggaagcgtcactctctccctttcttttcatgtcttctgatgcccagttgctcttcccggaccagaaatggacggccctacccacttatttgctttgtttctgcccccaggaacttctgcactatttaatcggtaccctgctcctcctcatcgcctccattgtggcagcttccaagagttacaaccagagcggactggtagccggagcggtgaggatgttttggggagcctttaggaatgaattcttatttaaaatgctcattttcttcctgatgggggaagagaagggcttggtttctggggcattcccttcatagaatcaatacctaccttgatccagccatcagctctctccaaagagccttaagcagaggcgtacagtcccagaaggtggattgtcagggctgccagcaaattcatagaccccagcagcccaggcctctctctcttacaggcactactgaaatcagggggccaggcgggttttaattcacacacccactctgatcatttgctcgttggctgcctcagcactatgcagagacagatgctggagcctcttttgggcccagtgggaaatgtactgtgatcaattagagatacatgccatgagcctgagctttgccattcctgatttttaacagtattcaggccaggaaataatactcctgtatctttcagaggcaaaaattgatccatctgatagccataaatagaagtagatggaaatatacaaaaatacagtcctgtgagatatatacatacatatatatgtatatacatacagatgtatatgctatttttttaaagattcatagattcctgtcatctgatttctgatttagctaactatttatagttcagtggcctgtgggccaacactgatttgcttcactgatgagcagacaagattttaaaaatgagttttgagaaaagctctctcaagccagatgtggtagctagcatgcacctgtagtcccaggcactcggcaggaatgcttgtgcccaggagttcggtctggcctgggcaacgtactgagaccctgtgtcttaaaaaaagaaaaagagaaaaagaaaagctctctctgtatgtgacattcattgtctttcacttacgtatattaccaaaattttccagactttggcctgggagtgggttggctcctggaattccactgagggatggagtctctcctctgaaggtcagcatgggggcagaaggtcactgtagagggtggccaaacctcccaacactgatgctccacatggccctcccacagcccaccatcacacctctctgccccctctctctgctgtctctgaagagagggatggttgccccctgaagcttaacacctgcccagctacagtgcagggtactggaagaggcacacaggagacctgtgcccactgtgtttccgggcccacttgaggagattcccactgtgtttagtaattcaggttgcacataactgtttagccctggaatctctatagctaacattcatcatatgctgtctgtgtgcctaggaccaaacctgggctatgaggaagttagaagaaatttttaaaatatggtccctgcttataagaaagtggtcatctagcttaggagacaagacacatgaaacaattagtaaacaaggcgttgtagtctagaatagcattctgtagcgatataataaactgttcaattatgcagtgcagacagttggggaccgggatggtatataacgtgctaattgtgcagaacagacaatgagaggccgggacaggctctaataggctaattatgtgctgtagacaattggtacaaaaggagcccaggaaaagaaacccggggaagaagtggatgtggg

SEQ ID NO: 29204 - DNA, 2300 bp, Homo sapien
cggctcactgcaagctccgcctcccaggttcacgccattctcctgcctcagcctcccgagtagctgggactacaggcgcccgccaccacgcccggctaattttttgtatttttagtagagatggagtttcaccgtgttagccaggatggtcttgatttcctgacctcgtgatccgtccccctcggcctcccagagtgttgggattacaggcgtgagctaccgcgaccggcctgcttttttttttttttgagacggagtctcactctgttgcccagaccggagtgccgtagcgcgatctcagctcactgccacctccacctcccgggtttgagcgattctcctgcctcagcctcccgagtagctgggattacaggcacacgccaccacgcccggctaatttttgtatttttagtagagacggggtttcaccatgttggtcagtctggtttcgaacccctgacttcaggtgatccacctgcctcggcctcccgaagtgctggaattacaggcgtgagccactgcgcctggcctatcacaaatcttttatccatctctctagtcatcaactcatcttaattttggatgaatttcaaaggaacttttagacatcagtagtgtctaatttgggatgatagtgacttgaagaataatggggcaatgaatccttgtagccctggtgaaaatacagtggccttccttgttggacagaattggtggcatcttggccttgggaggacattcagagtgcatgtaatcagagacagaagggtagttctggctggttgtaggtggcccctgcagggcagtatctacttgtctctattcatttgaatgggagcttttgtttgttactggaagaagaaagggaggtttggggccacggagaagatgtagcagctgatggcagcagaaaccccttctctcttccatgggttttgagactccaatggagagatgagttagaagctgacgttttctgggttagcgtttagcagcaaggtttcgagtcagactgcttaggcctgcattccagctgctcctggctgtttgaccttggatatgatttcagcctcttggcctcagttttctcatttgaaaatgaatgtaaccgactttatactgtcgaacctactttatattgttgtgaacatcctgtaactcaatcaacttcagttgctaaaatataattacattccttgacaagttcacacaaaattaacatatgtgactgtagcagttggtgaccaagaaagagaaaaaggaaatgattttgaaaagtgagcctaaatggaatttcgggagacgcgggagggagcgattctgaaagtccttacagacaactcattgtacttcaaatgaaatacgaattcttcccttggtctgcaaggcctccacattatctggcctttgcctacatctccaacatctcctttcctcccgtacttattcctagcgacacaggcctttgggcttcagattgagtcaaactcatttggtcctcgggacatttgcactttcgtgaaaggctctccccagaactttacaagcctggcttctcacactttgagtctcattcaattcaaagatcatggtcctcagagaggcctttcctgaccactcagtttagtagtggccatttaagtagagcacccaattctccatccttttttccttctccttcctcttctcctcctcctccatcttctttttttttttaataaatttatcaagccaccagaaatgctgaatccattattttcgtatcatattttcacgtcacttatcactatctgaaattgctatccatctgttttcttgtttattgtctgtctctgttactagggatcctgtgattttgggtagtacttggctgtcacccaagtacctagaacggggttcactgcacaccgaaagtacgcaaaaatactaagtgaatgaatgtcaggaggatgaaagatggagggaggtgagaaatccatcaaaggctcacagaaagaactcaattcttggatgaaagtcggaagaatcccaacagctaacaagcaaatttgctgagagggggcggggcgggccaagggcgggggcgggaaggggcggagtcaggcggaagccggggagaaggcccaggaagtgacggccgcctcccggctaccggggacttctggagtccgagaagtcaacggcgcggttgctgcggccgccgcgctccccggcccgaggcgatggagaacggagcggtgtacagccccactacggaggaggacccgggccccgccagaggcccccggagcggcctcgct

SEQ ID NO: 29205 - DNA, 2300 bp, Homo sapien
acagtgtttctctatgtggatggatttcttcccagattcacatgaagagcttgttacgaaagtatattcccaagccccatctacattcagaatctttggggctagatctccaagaatcttcctttttaattaatctcacagatgattcttcgccatgttggagtttatgaatcacaggctaaatttgtgtcttcttctaaaaatgcaaagagaagcagagacccctagagaattgcataagtgtgccctaaacaaaccaagagggttgacgaagtctgttcatcttctctcttgtctcaaagtatccttgtttctttgtaacttcctcccaatactttattttgaaaatgttcaaacatacagaaatgctgaaataattgtacagtggacacccgtatacttcacctaaatattaccattaatatgttactgcagttgctttattagagatccttgttgttgttgtttttttaacaatgatttttttttttgagacggagtctcggtctgtcgcccaggctggagtgcaatggtgtgatctcggctcactgcaagctccgcctcccaggttcacgccattctcctgcctcagcctcccgagtagctgggactacaggcgcccgccaccacgcccggctaattttttgtatttttagtagagatggagtttcaccgtgttagccaggatggtcttgatttcctgacctcgtgatccgtccccctcggcctcccagagtgttgggattacaggcgtgagctaccgcgaccggcctgcttttttttttttttgagacggagtctcactctgttgcccagaccggagtgccgtagcgcgatctcagctcactgccacctccacctcccgggtttgagcgattctcctgcctcagcctcccgagtagctgggattacaggcacacgccaccacgcccggctaatttttgtatttttagtagagacggggtttcaccatgttggtcagtctggtttcgaacccctgacttcaggtgatccacctgcctcggcctcccgaagtgctggaattacaggcgtgagccactgcgcctggcctatcacaaatcttttatccatctctctagtcatcaactcatcttaattttggatgaatttcaaaggaacttttagacatcagtagtgtctaatttgggatgatagtgacttgaagaataatggggcaatgaatccttgtagccctggtgaaaatacagtggccttccttgttggacagaattggtggcatcttggccttgggaggacattcagagtgcatgtaatcagagacagaagggtagttctggctggttgtaggtggcccctgcagggcagtatctacttgtctctattcatttgaatgggagcttttgtttgttactggaagaagaaagggaggtttggggccacggagaagatgtagcagctgatggcagcagaaaccccttctctcttccatgggttttgagactccaatggagagatgagttagaagctgacgttttctgggttagcgtttagcagcaaggtttcgagtcagactgcttaggcctgcattccagctgctcctggctgtttgaccttggatatgatttcagcctcttggcctcagttttctcatttgaaaatgaatgtaaccgactttatactgtcgaacctactttatattgttgtgaacatcctgtaactcaatcaacttcagttgctaaaatataattacattccttgacaagttcacacaaaattaacatatgtgactgtagcagttggtgaccaagaaagagaaaaaggaaatgattttgaaaagtgagcctaaatggaatttcgggagacgcgggagggagcgattctgaaagtccttacagacaactcattgtacttcaaatgaaatacgaattcttcccttggtctgcaaggcctccacattatctggcctttgcctacatctccaacatctcctttcctcccgtacttattcctagcgacacaggcctttgggcttcagattgagtcaaactcatttggtcctcgggacatttgcactttcgtgaaaggctctccccagaactttacaagcctggcttctcacactttgagtctcattcaattcaaagatcatggtcctcagagaggcctttcctgaccactcagtttagtagtggccatttaagtagagcacccaattctccatccttttttccttctccttcctcttctcctcctcctccatcttctttttttttttaataaatttatcaagccaccagaaatgctgaatccattatttt

SEQ ID NO: 29206 - DNA, 2300 bp, Homo sapien
agtctcccgagtagctgggattacagatgcgcgccactgtgccctgctaattttttgtatttttagtagagatggggtttcaccatgctggccaggctggtctgaactcctgacctcgggatccacctcccttggcctcccaaagtgctaggattacaggcgtgagccaccgcgcctggcctagttagcctagttttaaacctttttaaaaaatacttgtgtcaaatttaaatcacgtgattttctgtcattaatacttttaagtctatttttaatttttgtctgttgtacatcccccctacactttttcttgcccaacttgttatccccattttctcaccatctctcctgctacgtatttattatggcttcatggttctgctaaaggtcacagttccctgtcctgatgtacagggaactgattgatgtgccatccttcccccttgattggcccttaggtggacatataactcaaactgggccaattaagagtctttacctgaggttcttcagattgaaagctaagagtaagagtcttttattccttgtagattaaactgggatgacatgagagtggaaattcctgaaacctaaggtgtttcactttaccttctcatctcctgaaaattatccgtagaggaagtcatttgcaataggataggacaagatttaacaagacggagagagaatcctggtcatgatggagtctgcatcttttttatcttttttttttcttcagacagagtcttgctttgttacccagcctggagtacagtggcacaatcttggctcactgcaacctccgcctcccaggtccaagagattcttctgcctcagcctcctgagcagctgggattacaggcatgcaccaccacgcctgactaatttttctacttttagtagagacggggtttcaccatgttggccaggctggtctcaaactcctgacctcaagtgatctgcctgcctcggcctcccaaagtgctgggattacaggtgtgagccaccatgcccagccaagtctgcatgtttaatactgtagctgctccattatatttcatcaaattgcctttttggttgaagctagttccagttgggtttttcacttggtactagaaagcatccttaaataatcggtgttataatttataagatttatcctttttttacatatctaggtgaagatggagctggaaaaacaagcttaataagaaaaattcagggaatagaggagtataagaaaggaagaggattggaatatttgtacttaaatgtgcatgatgaagacagggatggtgagtgtcatttgtaacataaatttctgaagtctattttgaggtgcactgccattcacattagtctttgattttttttagtgtgtaattttttactagaagttctgtgatgtcatgctggtcaagaaatagctatgtttagccatacttttattaatttgggattgggattcatatatgatacttttaagcatcttaaggtatcctggtgtgcagatacttctttcctaccatacttgaagaatctcagtttttcagttcatcttccctcagatagtgattgttttgttgactcccatttcactttctaattttctgataaaaatattatctactcagcttttttatctatcagctattttttcttctgtagatcacttgccttctcatttttgtatatgatatcttgagtatgcatatctctatctgctgatggtaaaaacataaacaagttatgcatcctctggttttggattaagaaatatgaagtagaggatgctacagttaagtcattttaggcctttagataaattagcagatggcctaaacagttgaactttactggcagttaagtcattttcggcctttaaataaattggtagatggcctaaattgttgaactttgtcaaagccaatagcacatctcctgtggagatgcactaaaataccaagtggtactgttagttggatgatgaaatgacttaatcttgttgccttggttactttgttttgtctgttgtagatcaaacaagatgtaatgtttggatcttagatggagacctatatcacaaaggcctccttaaattttcactggatgccgtatctctgaaggatactctagttatgctggttgttgacatgtcaaagccttggactgctttggattctttacagaaatgggcaagtgttgttagagaacatgttgacaaactgaaaatccctcctgaagaaatgaaacaaatggaacaaaagtgtaagtaatctagaaacagtaatgtaggtttc

SEQ ID NO: 29207 - DNA, 2300 bp, Homo sapien
ctggcacatagtaggcattcataaatgaccacttttgtcagccaccttaatggaagaatgctggatagggatattataaaaccacaaggaatacaactttgacctcaatttaggtgggtagttgagcatctggaagtcatgaggtgttgaagcctgacactattataaaagtaaacacttctcagactaagcaaatatgatatggaactgacaacaaaattgaggggaaaatgctctgaggaagatgactgaaagaataaagtacagagtaaaatggctttcagaggggccaagagcagtatacagctctcctttagaacagtaacataaagactcagcttctcctgggggtctccatcctgctttgtgccacagaaagtgtaggactactggggagggttctggttcctttcttaagtatataaacaacaaaatcaaaagttttattttatttatttatttatttatttagtgacagggtcttgctctgtcatccaggctggattgcagtggcatgatcacagttcactgcagcctcgacctcctggactcaggtgatcctcccacctcagcctcctaaatagctgggactataggcacacaccaccacgcttggctaattttttgtagagccggggtttcgccatgttgcccaggctggtcaagaactcctgggcttaagcaatctgcctgccttggcctcccaaagcgctggcattacaggtgacaaagaattttagctccaagagttctttaggcccatcacttctagaggttggtcagatattaatggtgtgaaaggtaaagaaagtcattgataacaattaacatgtggtaagcgcttaagatttgccagtcgttattctaagccattttacatgaatcatcccgtttaatctcaataacaactctaagttcttttatcctcatttgacagataaggaaactgagactcacggaggttaagtaaattgcctaaggttacacagccagtaaactcgaagagctagacctgaactcagatttgccagcctccaaaggcttccagacttctaaccgtaatgctaatatatagcaaatagtctttagttgtggattttctcactagcataacagcattgatcaggccatattctagcaagtgattttcaaatatgaagtgacagagataacatacaaaggccaggcaattttaagcaaatgctcttacaggtgtactaggacagagccttaaaaccaatgactccttctaaacatggagttcagacattcaaatacctttacctagtaaagttctaatagaaaaggagttattttagggctagtataagtccatccatgtattcccagtgtcaactgtgctcgacgtagtaagtgtggaatcaatgtctagtgaccggttagatgacccgcatagtggatcttttcaaatctcacatggaggatctcatacaaaaacattaagaacattaaagcaagccctgacaataatttttaaaaaataacagtctatttccagggtaaacaattactttgtcacgccgctgcttaggggctcggagaacctgcttctgatgtgggtccaggttgaggaacacttcgccacttgagaacgcaaataaagtccagaaatccaggaccacagcaatactccagcccagggttgcagggcagcctctttaccagccgggcgacccatttctatcttggcgccggcgaagcgccggtttgggcgggggaccgctctcagcctgaacagtgggtgggccggcaatgacaatgcaggaattccgcgcaggccgcagggtttggggacctgtctgaagggtgggagggagcacttttcacctgacacacccaacccccctgccgcagcccagggccgcggatgagcggaaggaaagcacttccatactgtcagatcactgggcttcagttgcagcatagcggcccaccccgccgcccgcgtacgctcagcccctcagcgccggccaggcagccacgcacgcgcagtccgttctcgctcgctccatcagtcctggcccggcccggggccccgcccccgcaggccccgccccgctcccgtgcgctgaacgccccatatccgggttcccgccgcctccaccgccaccgcctcagccgcctcgcacatttagtcttgccgggagtggtgtgattcccgaccaagatggcggccgtggggcgagtcggctccttcggttcttctccgccgggattatcctcgacttacactggcggccccttgggcaacgagatagcgtcgggcaacggtggcgccg

SEQ ID NO: 29208 - DNA, 2300 bp, Homo sapien
gcccggccaggtatgcctttgcccagccaggtatgcctttttatggtgggcacatattcatcaaaagtcatactagagtaatcatattggccctattcaaaatagataaaatatccaaatgcccaacaataaaatgaatacataaattaaggaatattcacataatgtaacattataatatataacaatgagaaacaaatacaacttcattcaacaatgtcaatgaatctcatactatcgagcaaaagaagctagaccctaaaaaatatattgtataatgtatatacattaagtttaaaagcaggtgaagctaatccatagtgttaaatgtcagcataatgattatctttgtggagagatgggaagaggcatgaggggaactcccagatatgggtaaagctctgccctttctctgggtgctagttatatgtatgtgttgagttgatgaaaagtcaatacactgtacttatgattcatgcacttttctttgtgtatgttagcctgaattaaaaagtttaagaaaaaacaaatacttttttttttttttgagacagagtctcactctgttgcccaggctggagtgcagtggggcaatcttggctcactgcaatctccgcctcccggattcaagggattctcctgcctgagcctcccaagtagctgggattacaggtgcacaccaccacgcccagctaatttttgtatttttagtagagacggggtttcaccatgttggccaggctggtcacaaactcctgacctcaagtgatccacttgccttggcctcccaaagtgctgggattgcaggtgtgagccaccacgcccggccaaaaacaaatacttttttaaaagaaagtttaaaacaaaagttaaaaaaaaagaaaaaaacaggtacaaacctgaaaaatctcccaattaacaaagctgggacaattttagcaacaaaataatgtagtattggaatgtaaccattataagataaacatccatgagtccatactgatataaatagctaagtgagggagaagaggcaaacttcccttggggaagataatttatgtacatactccccactgcaggaggtagagcttaaataccccgccttcccaccttgagtgtgggttgcatttattgacttggttccaaagtagtgtggaagggtaggaggagtaattgcacagtagagaaaactggcaagcactaccttagagaggtaatcaaggttaacatgatcagtgatgtcattttgacagcatgtacccttgattctatgtgatgagaacagccagtcaccttgtggtcttcctcctaaacacccaaaaccccagtctaaccatgagaaaaatattggccaaacccaaattgaggcacattccaccaaatatctgaggagtaactcttcaaaactgtcaaggtcatcaaaaacaagaagaatctgagaaactgccacagccaaaaatagcctaagacgacataatgaataaatgcaatatggtgtcctggacaggatcctggaacaacaacaaaaaaaggacattgaaagaaagctggtaaatgtgaataaaatgtgtagtttagtgagtaatagtgcgccaatcaaactggtttcttagatgtgatcaacgtaacatagtaaaataattaagatgttcacaataggagaaactaggtgaggagacaggaactctaggtgtcatctttgcaacttttctgcacaactacaactattctaaaataaaaggcgtttctttttaaacgggaatcctcaacagcgcctctctcatggggttgcaagaaatcaatgagatagtacagaccaagtgcagggctcagtgcttagcacataaatgtcagatgtggttattgtaatattatgtaacattgagggacaaaagctctgacacctcggtgttttaattagagtaagcaaaggacagacgcgcgtacgtcccaccgcgtcagccctgtgaacatccagaggttccagccagagtacgtccggccggaggcggggcgcggaggggacgtcggcgtggggcggggccagtagcagttcccacgccggcgctccaggcgcggcaggctgccgcccccggaagtagtgggtaccgggacgccgtgaggcggaagctgtgtatggcgggaggctgtggcggtcccttggtggggaagctgttgctgttgctagacgacgggaactagctctcgtcacttcctcagcccgccgtctgcccactcctctagccggaacctgggggcccggagccggggtaggcacagagttgtcctcggaggtccag

SEQ ID NO: 29209 - DNA, 2300 bp, Homo sapien
attgctgggtggcagatctaatattttttaaagagcacaatattctcagcttgaatgtcctcatctacagggcttgtggtctttatttaagtgggcaggttttcattgtgtttcaacttggccataggaaccttttcaagctttcagaggagtagcttcttattagcttataacattaatcagtcattgttttttgttgtttttttttttttgagacggagtcctactctgtcgccccggctggagtgcagtggcattatcttggctcactgcaagctccacctcccaggttcacgccattctcccgcctcagtctcccaagtagctgggactacaggcgcccgccaccacgccaagctaatttttttttttttttttttgtatttttagtagtgacggggtttcaccgtgttagccaggatggtctcgatctcctgaccttgtgatgtgcccgccttggcctcccaaagtgctgggattacaggcgtgagccaccgtgcctggcaacattaatcagttattgttgagagagccctaactttggccactttattaggaagaacacaagatgaaaactagggacaaattcactatacagtagtcccccaccttttcctcagaagatacattcagggtcctccggtggatacttgaaaccacagatagtactgaacctatgtactgctttttttaatacgtacataactatgataaagtttataaatgaggcacagtaagagattaacaacaacagtaataaaataacagttatctgaatgtggtttctctttctcaaaatatcttactgtaccctactcacctttcttcctgtgacctattgatctgataaccaagatggctactgtgtgtccaagggggaggtatcttatacaacatggaatgctagacaaaggaatgattgacttcctggatgggacagagcgggacactgcaggatggcaagagatttcatcatgttactcagaacattgctgtttaaaacttaagaactgcttatttctggaattttccatctgatattttcatacttgaccttgggtaactgaaactgcagaaagtgaaactggataaggagggaccactgtacaacttttatttctaaagaactgtaaaatttgtgtgtttgcagatcagggagcagagaaacatgaaggcacaggtcagtcctctgggatcactgatcaagagaaggagttatccaccaatgctttccaagctttcacagtaagaaatggcttctcttagtctgctcaagttgtagggttctgtcaagtatgaatcttttcatagtgaatttttaaatttacaatttttactctgtaataattcaaaagttaatttagagataagtaggtttaatttttaaaataaatgttttagagtttaaatatggtgaaaggaatgggaataattggagccattcccaagtttttgtaaacatgttttaactcatatactgttgtttttaagtcttttaaatttagatttgtaagtatgtgggtcagtcttttcatttcactaagctgttcaattcttttatttatttatttctgaaaatatcagattcaaaaattattttcttgaaggtactttaaaatggaaccccaaaactttattggcagaattttaactttttctggcattaaacaatatgaaagaaaaccttatttggttatcaggttacgtgcatgtaagcagaagaacttgatgcttgggtatttaaaatatatttactagaaaataaaatttggagtgattatattacctttcttgactagcctcagccattaataccctgctagcactatatgtatatgccagtatatttatcatatcaatatatgtgtcttatatgtgtcaatgtcagggttttgagtcttaggaagtaaatatccacagtttaactgacatgaatgttgctttagtgactttgattagtatatgtagggaaactacatctttctttttaagaacttttaagataaagatgaatgaaatatatttggaatgatatactgtatttaaagctggtatgtaattttgtgtgtgtgtgtgtggttttttttttttagtctggaaattatgatgcctgtctacaacaccttgcctgtctacaagatataaacaaagatgattataaaataattttgaatacagcagtagctgagttttttaaaagtaaccaaacaacaacagataatttgagacaaacacttaaccagctgaagaatcaggtgatacataaatgaatttaactataaaaaatattgttctgttct

SEQ ID NO: 29210 - DNA, 2300 bp, Homo sapien
atgatatcagcattggaaggcccccaggaagcattgcaggatggaactgtgtttaacctgaacccaagcccagcattccctagacctacctgaccacacatccccatttctcttttgcaggctatccatgaatctggttccacagtttatactctggggaacattgctctagctcattgctctagctcaggatttctcaacctcagcaccattgatcttcttggtcagacaactctttgctgtggtgggctgtcctgtgcattgtaggactttagcagcattcctggactctacccattagaaaccagtagcaggctgggtgcggtggctcatgcctataatcccagcactttgggaggctgaggcaggcagatcacctgaggtcaggagttcaagaccatcctggccaacatggtgaaaccccgtctctactgaaatacaaaaaattagccggacatggtggcgcgtgcctgtagtcccagctacttgggaggctgaggcaggggagttgcttgaacccgggaggcggaggttgcagtgagctgagatcatgccactgcactccagcctggtgacagagcaagactccttctcaaaaaaaaaaaaaaaaagccagtagtaactccctcccaccccaagctaaaatgtctccagatattgctgtatgcctcaaggaggcaaggagcctgagttgagtgcctctactctctactctaactcgtgcattctcagtagaggcaatattgcccccaagataaaacttggctcttggagggagaaaaatttcatactcattttatgtataaagcacagatatacatacactgtataaatagatatatggtatgtttgtagcattaaaattttatgagggagtgttaggaaaaaaagtctcaaaagactccttggggcaagtgataatgaaaaaaaagaaggggttccctaacaccattctagctcagtgttttaatttctatttatgccaattccttagaaagaatgatctttatggctcttttaagctgaatcaaagagctaagcaacagttgaaacacagggaaagcatctggaagttgccaaaaagctgaggctatgagagacttagggctcatgtcagcccctcgcttatgactgctacccacatccaaagtgaagatcaagacctcagccaagaccactgccaatgaagctccgcaatccccaagcagaaggcgcttgggtgaggggtcttcctgactcaaaaggacttgaagctatgttgccaggccacttcacactggtttgaggccatgtcaactattgaatcaaagaatgtggttggctgatgccttccaagtcactcacagacacatacatttggacaaatttttctcttctctcttcttgaatatcctttttcttgactatctctggccttccttctcaccctggcctctcagatcccagttgtcaggagaacattgcacatcttgattgctggcccctgcatatccatgatgagaaactagcaaacaggttgctgatccaaaatgtagagatcattgctaccgcatatggccagttaaatggaatttttttttttaaactaaaaagcgaaaaaggagtggctgattcctgtaatcccagtgctttaggaagctgaggtgggaggattgcttgaggccagtagttcaagatgagcctgggcaatatagcaagacccctatctccccaaaaattaaaattagtcagtcatggtggcttgcacctctagtctcagctacttgggagactaaggcaggaggatcacttgagcccaggagttcaaggttacggtgagctatgattgcaccactgaacaccagtctgggtgacagagtgagaccctgtttctttaaaaaaatctcttttttaaaaaccaacaaatacatttttgtatttttaaaaaaactaaaaatcttttttaaaaagaaaatgacttcattttttttcttaatctttttttggcacatcttcttggccttcggtcttgggaaatgactaagaatcattttctgcttcctacttctatcaaaaaaccccacttgaacttagtacagttgggtgagggagataactcgtgctcacaggaagccacgcacccttgaaaggcaccgggtccttcttagcatcgtgcttcctgagcaagcctggcattgcctcacagaccttcctcagagccgctttcagaaaagcaaggtaagcagggacggggacattcccagggtcttgggtcgcacactgctttctggacctggctgagatgctcaggcccctcacga

SEQ ID NO: 29211 - DNA, 2300 bp, Homo sapien
ccagctactttggaggctgaggtgggagaatcacttgaacctgggaggcggaggttgcagtgagccgagattgtgccactgcactccagcctgggtgacagagtgagactctgtccccccacccccccaaaaaggaaattaacattgatgcatggtactaatctaacctacaagtctaattctgatttcatcaactgtcccactaacatcctgtatataccaagcttcttatcgtcatcatctctggtaatttccccaattatccagtgaatttgatattattagccctgctttaccaacaaagaaactaagctcagagaggttaagtaatttgcccacagttacacagacagtaagtggcagagctggaattccaactcaagtgtacttcctccagagcccttgttctttaatactgaactagaattgcagagcttggaaaggacttcacagtgcaaggacacggaattggtactacaggcatgaaaagaagccaggcacggtggctcatgtctgtaattccagcattttgggagttccaggcaggtagattgcttgatcccagaacttcaagacctgcctgggaaacgtggtgagaccctgtctctacaaaaaatacaaaaattagccgggtgtggtggcgcacgcctgtagtcccagccacttggtaggctgagacgggagaattgcttgagcccaggaggccaaagctgcagtaagccgtgattgcgccccactccagcctgggtgacagagtgagaccctgtctcaaaaaacacaaaaacaaaacaaaaaaacaaccccccaaaccaaaaaacaaaaacctaagaaaagccagtaactgatactttctcaatctctcaatgaaatgtcctttctgatactttctcaatctctcaaggacatgtccggtaggaaaggagaaaggagtgaacaaatagaattttggctactttgttatacaatgtaaaaaggctttttggaacaccaaggcataaactaaggttattttaaaaaagaaaatttttttttgatacggaatttcgctcttattgcccaggctggagcgcaatggctcgatctcggtttactgcaacctccacctcccgggttcaagcgattctcctgtctcagcctcctcagtagctgggattacaggcgcctgccaccacgcccggctaatttttgtatttttagtagagacggggtttcatcatactggtcaggctggtctggaactcctgacctcaggcgatccgcccgcctcggcctcccaaagtgctgggattacaggcgtgagcaggattttcattctaacaagttccaggtgagttgatacagtggctccagggaccgaccacattttgctaacccccggcttagagttattcaaagagcccgtatatgagacgcggattccatctagggcgtttaggtttaatgattaacaatttccctcttctgctctctcaaggcagccagggaacagggagaccatgattcatgtccaatccccgaggcgcgttatcaagctgctgaaagcaggccctccggactgcagttccaaagggtcccttcccagggaagacgcctgcaaaacccagatagtactatcctggagtcacgcggcggcgcgcagcctcctagccgcccccacccgcccggctcggccacagcggggcggggcgcggggctgagcaggcgcgagggctggctgctgggccgacgaggggcggtgccaggccgtgggtccttagtcaagtgacgcgaagcggccggcctgggcgccgactgcagagccgggaggctggtggtcatgccggggttcctggttcgcatcctccctctgttgctggttctgctgcttctgggccctacgcgcggcttgcgcgtaagtctgcgggacccgggtacggggaggcattgctaggggacaggctggcggggaaccgggctggggtcgcagccacccgcggtcccgcagggcggggagcctgagccccgaagtgccccccagcaggctcgcggccggcggaacgcaggcagtggaccggccttcccgtcgggggcgggccgggcggggcgcgcgtccttccaggcagctcggtcgcttgtgcgttccgctccggccgccctttgcgcttggatccacttccccatctgtaacgaggtgttgagacgaggtgcgtgtaaacatttcctaagttggctttccgggaggggattccaagttgcgcgggttagagggtgcctccggctctggtttggggcgccctcgctttcccagttggtgctctgcg

SEQ ID NO: 29212 - DNA, 2300 bp, Homo sapien
tgtttgagaatcagttgcaaagatgatgcccttttgtttcctaaaaaacaaggatgttcttttatataaccattaccaaaattaccattaccgttacccaaatcaatacactaatacaaaactattatttaatatttagaccgtgtaccattatcaaaatcagaaagttaacattgatgcggccgggcacagtggctcatgcctgtaatcccagcactttgggaggccgaggtgggcaaatcacttgaggtcaagagctccagaccagcctggctaacatggtgataccccatctctactaaaaatacaaaaattagccaagcctagtggtgggtgcctgtaatcccagctactttggaggctgaggtgggagaatcacttgaacctgggaggcggaggttgcagtgagccgagattgtgccactgcactccagcctgggtgacagagtgagactctgtccccccacccccccaaaaaggaaattaacattgatgcatggtactaatctaacctacaagtctaattctgatttcatcaactgtcccactaacatcctgtatataccaagcttcttatcgtcatcatctctggtaatttccccaattatccagtgaatttgatattattagccctgctttaccaacaaagaaactaagctcagagaggttaagtaatttgcccacagttacacagacagtaagtggcagagctggaattccaactcaagtgtacttcctccagagcccttgttctttaatactgaactagaattgcagagcttggaaaggacttcacagtgcaaggacacggaattggtactacaggcatgaaaagaagccaggcacggtggctcatgtctgtaattccagcattttgggagttccaggcaggtagattgcttgatcccagaacttcaagacctgcctgggaaacgtggtgagaccctgtctctacaaaaaatacaaaaattagccgggtgtggtggcgcacgcctgtagtcccagccacttggtaggctgagacgggagaattgcttgagcccaggaggccaaagctgcagtaagccgtgattgcgccccactccagcctgggtgacagagtgagaccctgtctcaaaaaacacaaaaacaaaacaaaaaaacaaccccccaaaccaaaaaacaaaaacctaagaaaagccagtaactgatactttctcaatctctcaatgaaatgtcctttctgatactttctcaatctctcaaggacatgtccggtaggaaaggagaaaggagtgaacaaatagaattttggctactttgttatacaatgtaaaaaggctttttggaacaccaaggcataaactaaggttattttaaaaaagaaaatttttttttgatacggaatttcgctcttattgcccaggctggagcgcaatggctcgatctcggtttactgcaacctccacctcccgggttcaagcgattctcctgtctcagcctcctcagtagctgggattacaggcgcctgccaccacgcccggctaatttttgtatttttagtagagacggggtttcatcatactggtcaggctggtctggaactcctgacctcaggcgatccgcccgcctcggcctcccaaagtgctgggattacaggcgtgagcaggattttcattctaacaagttccaggtgagttgatacagtggctccagggaccgaccacattttgctaacccccggcttagagttattcaaagagcccgtatatgagacgcggattccatctagggcgtttaggtttaatgattaacaatttccctcttctgctctctcaaggcagccagggaacagggagaccatgattcatgtccaatccccgaggcgcgttatcaagctgctgaaagcaggccctccggactgcagttccaaagggtcccttcccagggaagacgcctgcaaaacccagatagtactatcctggagtcacgcggcggcgcgcagcctcctagccgcccccacccgcccggctcggccacagcggggcggggcgcggggctgagcaggcgcgagggctggctgctgggccgacgaggggcggtgccaggccgtgggtccttagtcaagtgacgcgaagcggccggcctgggcgccgactgcagagccgggaggctggtggtcatgccggggttcctggttcgcatcctccctctgttgctggttctgctgcttctgggccctacgcgcggcttgcgcgtaagtctgcgggacccgggtacggggaggcattgctaggggacaggctggcggggaaccgggc

SEQ ID NO: 29213 - DNA, 2300 bp, Homo sapien
tgaacctacatcaacacatcgttatcacccaaagtccggtttacattagggctcactcttagtgttgtacatattatggattttaacaaatgtatagcatatatccaccattatactatcatatagaatagtttcactgctccaataatcctgtcctctacccattcattcctccctttccataattctcagcaaccactgatccttttactgtctccatagttttgccttttccagaatgtcatttggctggaatcacacagtatgtagccttttcagtttggcttctttcaaccagtaatatgcatttaagacttctccatgtcttttcatggcttgatagctcatttctttttggcttggaataaaattccattgtgtgtatataccacagtttatgtatccacttacccactgaaggacatcttggttgattccaagttatggtaattgtgaataaagttgctacaaacatccattcgcaggtgtgtgcataagttttaacccatttgggtaaataccaagaagtgcaatttctggattgtatgagtagagtatgcctagttttgtaagaaacggcccaactgtcttctaaactgtatgtaccattttgcattgccactatcaatgaatgagagttcctgttgctccacatccttgtcagcatgtgacgttgtcagtgttttggattttgtagtggtatctcattgctgttttggcctatatttttcaaaaatgacaacggcatgacaagaaaagccgaggaaccagtttaaaggatatgaaatagactagatgtaacagtgatcacggatggactgcatcctaagagaaaaaagtgccatgaaagacataattggaacagctgacataaccggaaatggaacatgattaaagtcttctatcagtattaaatttcctaaatttgattgtctggtagtttcattcttaggacatacatactgaaagactaaggggttgggcacggtggctcacgcctgtaatcccagcactttgggaggcagaggcaggtagatcacctaaggtcaggagttcaagaacagcctggccaacatggcaaaacctcatctctagtaaaaaatagaaaaattagccaggtatggtggtgtgtgcctatgatcccagctactcgggaggctaaggcagggagaattgcttgaacccgggaggcggaggttgcagtgagccgagatcgcgccactgcactccagcctgggtgacagggcgagactccgtctcaaaaaaaaaaaaaggaaaaaaaaaaagaaaaaaaaaagactaacggacagtgggcctgatacatgcaacctatctcaaatgagtcagaaaaaaatgtaaagatagaaatgtggtataacgttagcaacttgtgaatcttgatgaagggtatataggaactttttgtactgtttttgcagctttcttgtaaattatttcaagatttaaaagtttaaagattttttaaaagtgctgccattaacattccatccatattttttgatgcacacgcgcaagcttctccagcatattccaccgaatggtgttgcagattcataaggtgtgcacatcttcaacctgactagctatacagtttacaaagtgctgacatccttattaattttatttttgcactgtctttttctctcactaaaatttaaggttgggcagtgctattaaaagtgcggcccttgggcccgcagcattagcctcatcagggtgctggttaaacacacaaatcgtcagacctccaccccagactttctgaatcagaaactctgggggcacagcccaggaatcttcgttttcacaaacctccaaacgaatataaagatcgtagattatatagaccgtagggccgatgtatataatctattagggccgcgtcggccttgcaggcgggtctccaagtgaatgagcggcagagtcccatcatgcgcatcagcctgcgtgaaccagtgcgcagcgcgcctttcccgggcaccctctaggtgctggcagctggcgcccagatcccccggctgggtggggaggggcggccggacggggcgggccggaggctggcgtccccgccccgaaagcactgggcccgccgcgtcgcaccgtcctctttcctttccttctccctccccttttcccttccttcgtcccttccttccttcctttcgccgggcgcgatggagccggggcgccggggggccgcggcgctgctagcgctgctgtgcgtggcctgcgcgctgcgcgccgggcgcgcccaatacgaacgctacagcttccgcagc

SEQ ID NO: 29214 - DNA, 2300 bp, Homo sapien
agtaccacagggacacttggggcctctcggatgagcacttccagcccagacctgtaagtctggtgcaccacaccttcccttttctcttcattcttgccttctggagactacctcgtgccttaagagaaagggttattttggaaataaaggggctgggcgcggtgactcatgcctgtaatcccagcactttgggaggccgaggcgggcggatcatgatgtcaggagttcgagaccagcctggccaacacggtgaaaccccatctctactaaacatacaaaaattagccaggcgtggtggcacgtggctgtagtcccagctacttgggaggctgaggcagaagaatcgcttgaacccaggggcagaggttgctgtgagccgagattgcgccaaaaaaaaggaaatcaaggaaaagtcatttttttctgtagttttgtgcatgtgtgtgttttaacattttactgcttcattctgatttctgaatctgtaaaaactctacaaatttcaaacattacagaaatattttactttgaaaacaaaattctctcataatcctacaccttctttctctctcggaaaacaaaattctctcgtaatcctacaccttctctctctctttttttttttttttgagacagagtcttgctctgtcacccaggctagagtgcagtggcgtgatcttggctcactgcatcctctgcctcctgggttcaagcgattctcttgccttagcctcccgagtagctgggattacaggcgtgcaccaacatatcacactaatttttgtagttttagtagagatggggtttcgctgggctagtctcgaactcctggcttcaggtgatctgcccacctcagcctttcaaagtgctgggatttacaggcatgagccactgcgcccagcctgtgccatctctttatctcctgctttaaaggtatatatttactcatatatatagtaaatatttgtgtatttttataaaaacaaggtcatatttacatagttttacaactttttgcaactttgtctttctgacaatttgtcgtgaatatttctccatgtcacatccatgtatcatcttaattattatcctttaacagctccctggtagtctcttttgcggatggaccatcatttaattcccttgataggcaaactcaccacttagcatgtgttgtcagtgaaccccattcattatatattactttcaaaagattttttctaattgatctttgctcttgtattttcattgggatttctatatgccatcttgattttcataagtttgtcttccactgagggctggccactcttttttaaaaattgagatataatttatataggatagaattcacctttttaaagtgtacaattcagtggttgttagtatattcagagttgtacagccattaccactatctaattttaaacattttcatcaccttagaaaaaaccccatatcctgttcctccctcctcccagttctaagatgaaaaggttggtcctataaactgttctctgttgtgtctgaacaggaagcagttcagttctttaatgtgaccacactccagaaggagctgtatgactttgctaaggaaaatataatggatgatgatgaggtaagttttcatgcttagcacatgtctggtggctacgagaaaatattactcacatctttgctagaatcactggaaggctgagtcctccctgaagtaagaaacagaggggaccttgagaaagacagttcctgtgggtgtttcagtgacagtcagaatgctggcatgggaaagagcggctttctaggaaacctaggcaggagtgccacatttcctgatagcgaaacgggtgtggggccacactccaggaattcacagtggtcattcttcatcttttcactttatataaaaacagtgaatttttaattgctcagcactctgaagagacatggatactcacaccccaatttttctgctagactattgctattattattttttctaaattgcatctttactgtaagcattttgtcattctctagaattgcttgaaattcctgattccaccttactcagctgaccccttttctgaccctgactcaactggttatggagtggtcattttgtgatgagtctggtcacagaaaagccatcattagcggtagtatttagagtatttgtttggaacaaactggaaaatgcttactgagaaagctggggacttgtcagctattggagctcgaagagagctgtgagcttgctctggtctgatccttcgctttatagatgaggagcatggggccag

SEQ ID NO: 29215 - DNA, 2300 bp, Homo sapien
gttcattcctgttgtcgaatagtattctattgtgtgaatatgacagtttgtttttctattcatctgttgatgatatccgaattccttctagtttttgatcattgcaaataaagctgctatgaacagttgtgcacaaatatttttgtgaatataggttctcattcttttggatataatcctaggagaggaatttctgggtcctaaggcaggtatatgtttagatggaacagccggttttctaaagcaaccataccaattacccttacagcatgccatctcctcacatcaggacaggccaagacaattgtgaataagcataatcttgaaaatgttaggagaattaagtagtaatattcaattgactgtttttaaaatgttcctaggcaaagctcctgagtgagtgagttggtagctcttggcaggtaccttctgatccctcccctccgttctcagcactaaccaggctttaaaatgacccctccagtccagacatgtgaagtctcactccttaggttaccagctaactgttaaaagggaaggagctggccgggtgtggtggctcatgcctgtaatcccagcactttgggaggccgaggccggcggatcacgaggttaagagatcgagaccatctggccaacatggtgaaaccccgtctctactaaaaatacaaaaattagctgggcgtggtggtgcacgcctgtagtcccaactactcgggaggctgaggcaggagaatcgcttgaacctgggaggctgaggttacagtgagtcaagatcgctccacggtactccagcctggcaacagagcgagactctatctcaaaaaaaaaaaaaaaaaaaaaaaaaagggaaggagctaagtaaattcatttatacttgtcaggcctcactgcatttaacacctcactgcattaacagctaccacgcccggctaatttttgtatttttgtaaagatggaaatttcaccatgttggccaggctggtctccaactcctgatctcaggtgattggtcggcctccgcctcccaaagtgcttggattacaggcctgggcaaccgtgtccggccagtatttgtattttgaaagcaaagtttaattatccaaaataattactcattaatagtagcccttgtagttgatgggaagtaataaggagagaagaaatcttttcagtacatttcaacaattaatgcaagctgaaaaatgacacctgtagtaaatcagatgtggattcaaatccaagttcttactgtgaaaagaaagtaaattatttcaatgtctgtgtcctggttcattaaatgaggataatcatctgcccctttagcaccaatcactttttcaattgtaagtatattttatttaagtgtgaacatttttaggaccgattgcagccacattcagggtctagcacagggacaggcatgtatgggcactcaatagatgtttgttgacccatacatcaatataaaagggatttgcaaattgtagagcaccgcgcatgcctcagttataacaatactgatctttattactctacctatgaagaaagcaagttcttctttcactgaacagggctggtggtagggagacaggctaggggcgagcaggaagaaggaatcaagtcaaacagggacccctgcagcagaatccattgggacactttaacttagagtgtagattcccagaccagaccgacagagtccgaatctcagaccctttcgaggtcaaaaagccctgatttgggaggtgggtgataatggtgacaatctcactagccctcttactgctccttgagaaatactagcgtaccaggaaaagtggtgaaggaagcgttcctgaagatatcctttcctcagtgactctcaaacttcgcttttaggaaagaggaatttcgctattccatgcgtttcacaccttagagtgagggtggtaggtaacttagattttcctctcttcattaaaaaaaaaaaaaaaaaagagtgttggtggggagggggaggaggccagttgaaaagtagaggccgaggacagagttagacactcgttgtctaacggccctgccggaggggctccgcctgtcagactgcgtcaccctctcgccaagggtcccccagacgggcgggggctccttgcggccggctagctactctccccgcctccctgcgccctcgccctccgccccgctgtacccgcagagcgcgcggcccagcgcagccccttttggcaccgaggtttccaggtgcccagcgcgaaggcggagccgggttacagccgcctcctcggcgccacagagaagac

SEQ ID NO: 29216 - DNA, 2300 bp, Homo sapien
ctctgcttccaagatggtgtcttgttgctgcatcctctggaggattgctgtgtcctcacctggcagaagggatgaaaaggcaaaaaggggctgaattcactccctcaggctctcttataagggcattaatcccattcatgaggacagagctctcacggcctactcccctccttgaggtcctcttcctaaaactgtcacattttatatgttttcatataaagtttgaaggggacacaaacattcaaatcatagcacatatggagatgaatttgggtgagacaatagtggttgtgaggtggagatgttgtagagtggatagattgagaatttaaggtggagtcaagaatatgtgataatggactggaagtgaggtgtgaggaaacagcggaatcagggacaattcctaggtttttgtcttaacaatcaaggggatagtagggactttcgctttgagaagactggggagtaagaaacttggatcaagaggttaattagggccatattacgttgtgatgtctattaggcactccgggggagatgtcaggtcagctgttgaatatgattcttcttcacagatttttttttacactttaaaattctttttctcttttttgtaactttttttgttgttgtttttattttgtcatttttttctgcttctaacacaccaaaactcactccttccttccttccttccttccttccctccctctctatttctttctttttttttttttttttgagacagagtctcactctgttgcccaggctggagtgcagtggcacgatcttggctcactgcaagcttcacctcctgggttcacgccattctcctggctcagcctccaagtagctgggactacaggcacccgccaccatgccggctaattttttgtatttttagtagagacggggtttcaccgtgttagccaggatagtctcaatctcctgaccccttgatccatgggcctcggcctcccaaagtgctgggattacaggcgtgagccaccgcgcccggcctttctcactctttctttctttcgagtcagggtcttgctatgttgcccaggctggtctcaaactcctggcctcaagcaatcctcctgcttcagcctcccaaagtgctggaactacaagtgtcccatcgcactgggtccttcttcatagagttaatggactagatttcaggatatctagagttcccttcaaccatattaaaaacattcaacaaattgccagttgatttaatgaattagacaacatgcatagaatgctattccattaagtggtatgcaaagataataattttttttttttttttgagacggagtcttgctctgtcgcccaggctggagtgcagtggtgtgatctcagctcactgcaagctccacctcccgggttcacgccattctcctgcctcagcctgccgagtagctgggactacaggcgtcccccaccatgcctggctaattttttgtatttttagtagagatggggtttcatcgtgttagccaggatggtcttgatctcctgacctcgtgatccgcccgcctcggcctcccaaagtgctgggactacaggcgtgagccactgcgcctggccccaagataatcatttttaatctaaaaaagtagattataaaacagttacctatggtttgccaccatttttaagaatacagtatattataacaactcattggaagcttgaagcagatagaatggaatctgagcagtagctacttcaggtgctggggtgagtgtcgttttatccttttaaattcttgttattggtaatttaaaatgttttcaataatcatgcattacctgtataacgttttttttaaaaaaaaaaaaatccatggtctctttcagctgggcagtctgcggctgggtaatctgtcaggtgagggacatcaaggtgatcagactgagaggatggaccagatacgaagtgggagaggcgaagaggcccagttccagggccgggggcgaggggtgggcggtccaaagggcaccgcccctgcgggtcacgtgctcgccgaccaccaatggccgcctccgagcccaccttggggacggggcggggcgcctggctggcgtcaccaggacaacgggcgtcgccggcgccgtgtgacttcgggctgtgggctcgctcgcggctcttcggccatggtgagtctgggacccgcgtctgcctagctgccccgccctacccctaccgggctgggtccgcacgccgccgcccgctagggtcgggcaggcggcgcaggggtcgtggagaggccgggccgcggcctg

SEQ ID NO: 29217 - DNA, 2300 bp, Homo sapien
ggaggctgaggcaggagaattgcttgaaactgggagggggagattgctgtgagctgagatctcgccattgcactccagcctgggcaacaagagcaaaactccataaaaaaaaaaaaaaaaaaagtaccaggaatatgagaaaaatccccagttgccatgttccctacacagggataactatcactgtggccagtttctgtcctttttgagaaattctttgtgcaatgaaaagtgattgtctttctctgtccctctcctccctgtctctttcatgcacacacatccacaccacatccatgggagcagaagacacctgctgatggcaattaaaagtaaccacctctgagtcaggaatgtgatataagctgctcgcttccagaatgcatcactcctgccagggatgagtgacagtgcatgacaggagaaaaggctttaaggccaacctgagctgggtataattggcaagtctcaagttctttgagccacaatgctgtcatctgtaaaaagggaataatgacacttactctgcagaattggcccgaaccagacagctttgactattgactacgttgttagtgttaatatagaaggccccactgctgtgtgaaccatgttggcagcggattttcctgttaactcagaacaggtcaagcaccctctgattttccttaaatcagtttttaaaaatttctatgaatacttgaatatgccagtacataagtttttcaattaatataacagtatctcctcagtctcatatgttactgttaacttcttgatttctgaatttccctatattaaaacaatggagaaattgacattcatacaccatctccatcatctttctccaatctgtgtttgtaaatatacacgtatatacgtgtgaatccatatgtaaataaaatgaaattggctgggcacggtggctcacgcctgtaatctcaacactttgggaggccaaggcgggtggatcacctgaggtcgggagttcgagaccagcctgaccaacatggagaaaccccgcctctactaaaaatacaaaattagccaggcgtggtggcgcatgcatgactgaggcaggagaaccgcttgaacctgggaggtggaggttgcgttgagccgagattgcgccattgcactccagcctgggcaacaagagtgaaactccatctcaaaaaaaaataaataaaaatttaaaaaaaaaagaaaatgaaatatatacatacacagagagacactttttttctcattccattttattgtaagtaatcaaacttctatttttttatttaccaattttaaacagcctcctaaagaaccagttttctggctttactcttaattctaaaagctaaaaaccaatgaacagcattgattacataaatactatttgatgtaaaccatgtagagtgattcgattcatgagaaaggaaatatattccacattgttaagatcaagctcagagaagaatctttaaagcatcaaggtccaacagaattcctctcctctagcttcccttccctcgaggtggtactctgctgcctagttacatagccagtagttctagtttctagcagtagtttctagtttggggctgttacaaccagtactgcaatgtcttagatttttttattctgcaggaataccttacacccatccactcaggtctcctctgccaggacttgtcaagtccaaactctcagacatttccttgcttcatagactgcagtagccattcacttgctctaaactgtatccactttcgcactaaaaaatttggcagagtggtttttcaaattttaactttactgaagtaaaatatacatgtagaaaagcacatttatcattggtgtatagatcaatgcatttccataaactgaatacaccccgatcaaaggtcaacattatcatgaccccggaaaggccctttctgctccctttcaatcactgatcccccaaaagtcgtgacttccaaatagtatatattagttttgcctctttgtattttatttaaatgatatgaatggaattatcatgtatactcatctggtttccttatccatattgttacatgtagttgtatattgttcattctcactgctttatagaatgggtacactgtgatttatttatcctttctctacttttgaatatttgagtactgcttctagtttggggccattacagccagtattcctgttttttggttaacacatgtatgcatttcagtcagaaacatcgaaataacccctgcagcatatgagacttccaattgctccacatcctcaccaacacttat

SEQ ID NO: 29218 - DNA, 2300 bp, Homo sapien
aaaacatagatattccaatgtctgtgggaataattgacacaaggacgaatccaagccagttaaatgcggttgaatttctgtgggacccagcaaaacgcacctctgctttcattcaggtttggatttttacattattagaagcttactaacctagttatttaggtcatggtaggattgaatttttgatacagtatcatttcctttaaatgtctatttataaactatgttgtagtgtctttctatatacatagttaggtttaatctagtaagttcaccctattttaaactaacatatatgaagacattctatgatatgtaaagcattattcaaatgttatttttaccactagtagtcccaataatgaaaatgtctatttttcatgagatgtatttctcttgaacacaagctgctatttaaaaggatacgattgaaaaaagattgaggttttaaaattccttctagcattatttttaaaacattctaatactgaaaaattcaaacctctacaaataggataataatgatgactaattgtccatgtaaccatcacctggctttagcagtttttagtagtttccgcccccttttagttattcttggagcacttttttttttttttttttgagatggagtttcattctgtcacccaggctggaatacagtggcatgatctcggctcactgcaatctccgcctcccagattcaagctcttctcatctctcagcctcctgagtagctgggattacaggtgtgcaccacaatgcctggctgatttttgtatttttagtagagatgggggtttcaccatattggccagactggtcttgagctcctgacctcaagtgatctacctgccttgtcctcctaaagtgctgggattacaggtgtgagccactgtgcccagcctgttagagtactttaaagcaagtttcaggcataccatttcatccataaatatcatgtctctaagagatgagttttaaaaagtaactataatatcattattctgtgtttaaaaaaaatagtgattctaatacccacaatgttcaaatttgtatgtggtggaatttaaactaccaggtaggtaatatatagaaaaggaaaaccacttacttgctgaccagccttcataagctatgctttgcatgaactgtaaaaaatcatttgtattttgcattttggtattctaccaatattattctccatcagttaatccctgggggcatggtttatatccgttgaatattgatgtaaactcatactgttggtgtttgtctataaggcaactagttatgtagtaaatcaaagtgatacaagacctggctttacatatcaggttgtgttgtcatattgcagagatcagttttaatagtgagtcattagaagagggggatgtgcagcagtcagaaatgaccaaggtcttgctgttaactctgtgtgaaaccctaaggctgtcatccagggtgggtattaggagacagggcaggagtggtggaagatgagtattgccctctggatcctgaatggactttgaagagttgaccaaagagtttagatggatacagaataggatgggtagtgggttttctggactgtaaaatttccccaggcaaagtatcacaaattggcatctgtaggaacagcagtaagatagttggctgggtagaataggggtaatggcagtagagggcaaacaacagaagctctaaacaatgaagtgaagattgctgtggattgaacagggcttagtaccctgggtctgagatgagcagacagtccaaggtggaggtgggcagtatacataggaagctactgtagtgttgtacccctgattggacccaagtcctgcattagaggagaggcactgtgatgggcaagagctcagaaagtctggagaggctcagttggatttgtgagagggaagccatatcttaaaaacaattaggttcatagataatttggctaatatgtgtgatgagtttattttaaaggatcttgaatttatagtggtgtcaggtcactcaagagggaacaaaatagaaaaataaccagtggaagttctttgaatccatttcagcctgaatcgttttataggtacactgcatcagcacagaatttactccacggaagcacggaggtgaaaagggagtgccctttaggatccaggttgacacctttaagcagaatgaaaatggagaatacacagatcatctacactcagctagctgccaaatcaaagtttttaaggtaagacagagaacccgggttttctgtaattaaggctcagttttgcctgtaa

SEQ ID NO: 29219 - DNA, 2300 bp, Homo sapien
ctcagtctctctcaagtagctaggactacaggagcgtgccatcatgctcaactaattttttttttcttgtagaagcgggatcttgccatgttgcccaggctagtctcccaattgctggccttaagccatcctcccaagctttaagtcttggtctcccaaagcgctgggatcataggcctgagacactgcccagcctgaggctcaatttctaaatatttgacccagtacttccttagggcacagcctgattgaaaaattgatggtagcttgtacttttacactctctccaaaaaccagagaattatcttcccccaattccatttctccaaattttccaacaactaatagtaggcctggctaatctggttatagactaggttatgcaagtgaggtgagatcatggaatgaagacatatctgagacccccaatgagaccaatgtttcccttgactatccaattgtttgtgcagatttatttgtaatagtggaatggagcttcctgaactgatggccaatctaatgttttcgcctggaatcagagaaatctggattagtcaaatagccccggtttacctgcttactgtgtgaccttgcactgtgtaatctttacacattttcacctgaattacctcatctctaaagtatggctttatcaaatgaaatgtttgcaaaaatgttgtgtaaagagaaaaacattctccaagttaatttgtggtttttttttttggagaccgagtgttgctctgtcttctcccgggttcaagccttactcccgcctcagcctcctgagtagctgggattacatgggcgcgccaccacatccagctaatttttgttatttttggtagagacggggtttcaccatgttggccgggatggtctcctgacctcaactaattcacccgcctcggcctcccgaagtgctgggattacaggcgtgagcctgtaagttagtatctaaatcacacaggcgttgagactatttttttctggctcagtgccactgctttattaggctgacattttaatctatgtatttttgcacttaaactggcaagttggggcggggcgctcagcatttgggtcttattcttaggcagtaagttcgatgcagggcgaagcccgggccttgacgttctcttcagcaaggattccgcccgtcaagcgccagcagccgctcctaaggaactctgatccgcacactggctctgtaagtcagcctctggctcctgctttctatttcatctcttccggtaaaaagatttctgtcttttggccgcagtggcgcgtgcccacgctaggtcgctgaggaagacccttcgggccttctgagcagcgtagctgttactgtggcacgtcctaatggttcggtccaacttcaggagaccgcctgcccttaggatgaccaacagctagttcaactcaggatagccaagctgctctcggcaatgcaaccaataggggaagtctttccagagctctttctcaggagcgttgattggcttattctcacgccaatcaaggttttctgcacaactggcttttctgtcaccagatggggtgcaaaccgctcactccctcggtagagagggcataaagcagagacgaccgggaaataccacagaggagcaaatcacctccggaagtggcgttttgggtcgctttctaccatgcagtccaatgaactctttcttttggcaacaaattccgtcttcgagcccgcccaaggtgaagaacattttgattggttgtttagtcgggggacacagagactcacgggagcttcgtccaagcccttgcaggtattgctcagttggcctgtcaatcatctcgctcgctagaaggggcggaaactggcagcccttttggcaccgcctcttcctgggctgctgtgcggggacgcagcgaggccaccccggctgggaacagccgcgtgggcggggccgcattgcactctctggacagttcctgggccgcgaggcgcggggagtggccctaagcgcggggctgtacggggagggccgaggcgtggggcgaacgccggggcggggtcggggcggggccgggggaggcggaagcggcgcgtgaacctaagtcggagtcgcgttgaagccagcgtccggccggcagagcggcgtcggcggggttggccggggcggtgtggcgctagagcctgggcgggccgggggcaaggagtcaaggcttgggggcgggtgacgggcgggcggagggcttgcccccgtgtggtcctcggagcggcccgaggtccagcctcccagcggtcccggaggaggatgcga

SEQ ID NO: 29220 - DNA, 2300 bp, Homo sapien
catgcctttctcctgcctcaacctcccgagtagctgggactacaggtgcccgccagcacacccagctaatttttttctgtttttagtagagacggggtttcaccatgttagccaggatggtctcgatcttctgaccttgtgatccgcccacctcagcctcccaaagtgctgggattacaggcgtgagccatcatgcccggccttttttttttttgagatggagttttgctcttgttgcccaagctggagtgcaatggtgtaatcttggctcactgcaacctctgccttccaggttcaagtgattctcctgcctcagcctcctgagtttttgggattacaggcacccgccaccatgcccagctaattttttgtatattttttttcagtagagatggggtttcaccatgttggccaggctggtcttgaactcctgacctcaggagatccacccacctcggcctcccaaagtgctgggattacaggtgtgagccaccgcgcccggccatgagggataaatttctttttttttcctttttttttttttgagagagtctcactctgttgccaggcgggagtgcagtggcacaatctcggctcactgcaacctccacctcctgggttcaagtgattctcctgcctcagcctcctgagtagctgggattacagacgtgcacctctatgcccaggtttttttgtttttttgtgtgtgtgtgtgtttttagtagagacagggttttaccattttggccaggctggtctcgaactcctaaccatgtgatccacacgcctcagcctcccaaagtgttggattacaggtgtgagccaccatgcctggccatgagggataaatttctaatcattgcttcatttattctaaattatggaaaaagagacaataaatgatgtctgtatctacaagactgaaggcctcctggcaatgtttttttttaaatttatgatattggttaagaggagtggactaaagtttttgactgattatgaggtaataaaggtattaacatcagttatctatattggggttttttaattgtttaattttttttttttgagacagagtcttgctctgttgccaggctggagtgcagtggtgcgatctcggctcactgcaacctcctcctcctgggttcaagtgatgcccctgcctcagcctcctgagtagctgggactataggtgcccgccatcatgcctggttaatttttttgtattttagtagagacggggtttcaccatattggccagaatggtctcgacctcctaacctcgtgatctgcctgccttggcctcccaaagtgctgggattacaggcatgagccactgcacccagcctattttttaatttattaaggcacaaggttgtttgttagaagactggctttgaaatcttttataaataaaactatattctatgagtgcatataagacttttatttatttttattgtctatagaggcatatgtaaggaaaaaattaagaggtaagagtctcatgatggtagagaagtcttgatttgtgatcttgggaaagttgtccatgtctaggatgttgtctgttttcagagaaagttttttttttttttttttttttttttttctggttggttttttgtttttgttagttttaggtctctaatgggtatatagttttaagagtctgggccaggcgtggtggctcatgcctgtaatcccagcactttgggaggctgatgtgggtggatcacctgaggtcaggagttcgagaccagcctgaccaacatggagaaaccctgtcactactaaaaatacaaaattagccggatgtggtggcacatgcctgtaatcccagctacttgggagactgaggcaggataagtgcttgaacccaggaggtggaggttgcagtgagctgagctcgtgccattgtgtaaacgcaccaatcagcaccctgtcaaaatggaccaatcagtgccctatcaaaacagaccatgcggctctctgtaaaatggaccaatcagcaggatgtgggtggggccagataagagaagaaaagcaggctgcctgagccagcagtggcaacccgctcgggtccccttccacactgtggaagctttgttctttagctctttgcaataaatcttgctgctgctcactctttgggtccacactgcctttacgagctgtaacactcaccgcgaaggtctgcagcttcactcctgaagccagtgagaccacgaacccaccaggaggaacaaacaactccagatgtgctgccttaagagctgtaacactcaccgcgaaggtct

SEQ ID NO: 29221 - DNA, 2300 bp, Homo sapien
gagtccaggtttggagcaggtaatgtataaaatgagcctgagaattattgactgaaagcaaggaaactattcatgtttgagggtcaaaaagaataatgctacaatgaattaaaatacatcaaattttaaagtgaaattcatgagtttatattgatactttaaaaactggccaactttgaagattattggttattcccaaaattggttaataaagagaaagaatcaaagctcatagactacctatcctattttcaggataaccaaatatttgatgagataaagtacttttagaaggattccagctagtaaattcagaagaaattattgacttacaaaattatttttggccaggtgtggtggctcatgcctgtaatcccagcactttgggaagccaaggagggcaggtcacttgaggtcaggaggtcgagaccagcctggccaacatggtgaaaccccatatctactaaaaatacaaaagttagctggctggtggcagacgcctgtaattctagctactcaggaggctggggcgggagaatggcgtgaacccgggaggtagaggttgcagtgagccaagattgcagcactgcactccagcctgggagacagagtgagactccatctccaaacaaaaaatatgtatatatatttcttaggcagtgtgtggtagctcacacctgtaatcctagcactttgggaagccaaggtaagaggatcacttgagcctggaagttcgagaccagcctgggcaacatagtgatgcctcgtctctacaaaaaaattgtttttaattagccaggttttcttacctgggttggtggctcacagtggcatgcctatggtcccagctattcagcaggctgaggtaggagaatcacctgagcctgggaatttgaggctgcagtgtgctgtgatcatgccactgcattccagcctgggtgactaagcaagagcctgtctccaaaaaatatatatatatattatatatatacacacacacacatatatatatatatatttggcctcattgaaacaatggatatatgaagtgattttcagtagccaccaacatcgttaggtaaaaagatgttgcggcagggtatataatggaggagttagactaacaacatctgaacctactgaccaatcttaacatcactgaaggtgggacaactagacaaaagttttcttgcctggcttggtggctcacgcctgtaaacccaacactttgggaggctaaggcaggaggattgcttaagcccaggagttggagaccagcctaagcaacataataagaaactgttgctacaaaaaaattttaaaaattagccaggcgtgatggcatgtgcctgtagtcccagctacttggggggctgaagtgggaggatcacttgagctcaggaggtagagactgcagtgagccacaatcataccactgcacttcagcctaagtgacagagcaagatcctgtctccaaaaaataaaaattaaaagttttcttttctaaagcaattgaacctaaatctaatccagtcttcagtttaactgtcagtttaaaggaagttcagagaatagagaagcatgttaaattgtaccttaagggtatattctgtcaaattcagaatgtaggaaattctatgaggaaaactgccaaatttctttagtaaagaaatggcatgaagaaagaggaagaggaggttatcaactgttaaagagtctcaagaatctaatcaacttggctgggtgtggtggctcacgcctgtaatcccagcactctgggaagctgaggcaggcaaatcacctgaggtcaggagttcaagaccagcctggccatagtgaaaccccgtctctagtaaaaatacaaaaaatcagccgggtgtggtggtgcgcctctgtaatcgcagctactcgggaggctgaggcaagagaatcacttgaacctaggaggcagaggttgcagtgagctgagattgagccattgcactccagcctgggcaacaagagcgaaactccttctcaaaaaaaaaaaaaaagaatctaatcaacttgaaaaagaacaaaattggagtacttacactctcaattttaaaacgtattacaaagctatgatagtaaagacaacatggtactgtcataaaggtagacttaatagatcaatgaaatagaatccaaaaataaccctcacatttataggcaattgattatcacagttttttgtggggaagaagagtatttttaataaatgtgatgctaggacaactgggtttccacatgaaaaacaatgaagttgaacccctacc

SEQ ID NO: 29222 - DNA, 2300 bp, Homo sapien
aaaacaaatcaaaactccttggtaaccactgggcccaattcttgatgctaaaatttaaagagaactatattaagaatctgttctgctttttctataaaactgtatttcaggataatcagaataggtctagttgataaagttattctctacagaagaattctaccccatggaaggagtggtatgattagataatcaccatttttaactcatattaaaataactgattcaacaacaatcagtgactgaaacctttggttaaaagattgatagtctgggcatggtggctcatgcctataatcccaacactttgggaggccagtagatcacttgagcccaggagttccagactggcctggacaacatggcgaaaccccgtctccacaaaaattagctgggtgtgtaggtacacacctgtagtcccacctactcaggaggcttaagttgggaggatcaattgagcctgggaggtggagactgcaatgagccatgatcacaccactacactccagccttggcgacaaagtgaaaccctgtctcagaaaaaaaagggggatgatttatggagaagtttacaatggtgggattagattgtcactacctaaatccagtggtcgtttttatcatccctaaaagccatttaagcctcctggcatgaaaccatagaaatacatactgaagtatataaagaggaaatgacatatatgggatttgctagaaatacttcagataaaagggaagaggggacaaagatgacgtaagaatggtaaaatcttaaaaactgttaaatctgggtgatgggaatataagggttcattatactggtctcacttttgtgtatttttattatacaaagttttaagatagcaccagtgttttgggaatgacaaaattgaaaagaagattacttaatgtcttttttctttgtcttttttacagcaaacatgatggttatatctgtgtttcatcatataaagttgttatccccatacttgtgagagtcaccctataaagttatagaactaataccatgtccttttgacagatctttccctagatcattctgacctagttgcagagttgttgaaggagctgtctaaccataatgagcgtgtagaagaaagaaaaattgccctctatgaacttatgaaactgacacaggaagaatcttttagtgtttgggatgaacacttcaaaacaatattgcttttattgcttgaaacgcttggagataaagaggtaaatggcaaaatatgtaaacagtagcctttccttcctgtctcttttacattgcctgttaatctaatgctacacggatttagcaattgggagaatgaatctcttctgctgctgctttctgcatgaacttttcactgtgaagtactttttcttctaaaccaagtagctcaacaattttgaacaattaacaggaaaaatgaaaggtcgcaggctgaattcttatagaaaagtacatgttacttgttttacatatttagattagttgttcaggagcaacttttatttatttatttatttatttatttattttgaggaataatctcactcattctcaagcccaggctggaatgcagtggtgtgatctcagctcactgcaacctccatctcccaggctccagtgattctcctgcctcagcctcctgagtagctgggattataagcacgtgccaccacccccggctaattttgtgtttttggtagagatggggtttcaccatgttggccaggctggtcttgaactcctgaactcaagtgatccacccacctcagccttccaaagagctgggattactggcatgagccaccgtgcccagctccaaaacttctttttatagtctgaatgtagttcttgatttcttgcaaataaaataagtataatataaattttcaattagagataagaaaacttaattacatagtataccgcatactttatgcagttatctacaactcctcccccaatattaagacccttaagttacaaaaattgaaaatgttaaagattatctacaacccaaaatattaaaaacatttaaatgtttcttcttagcctacaatcagggctttggcattaaaggttttaagagaaatcctaaggcatcaaccagcaagatttaaaaactatgcagaattgactgtcatgaaaacattggaagcacataaagatcctcataaggaggtaagttacctggccggtaaagtattattccattattttatttcatgaaacatgtaaccattgtgtaaaatgtagccttattaatgattttcttgaacatttgcct

SEQ ID NO: 29223 - DNA, 2300 bp, Homo sapien
actgtctgggaaaaactcacagactagagcaggggattggcatgatggcaaagtccaaagctgggacatgggcctcactaacttttctctttttaggctagtgaaatagactcattatcaacttttaaaaaattctctacttagtacattaggtgaagtctttatctcacatctggtttaatttcctagtctgttttagttgaaaacaagcttgatatatacgtctgtactatgaattctgtcttcttaaagaaaatgttttctaggaattataaaaatcatttcttctaatatactaagttttcctctgttctttgcttgtgctttcatcaaagaggatacttctgacaagctggatggtaagaacttcctttcctaattctactaaagatttttatggaacctggattctatataatatccttgttcattcttctcttaatttctaaaaatatattattaatacttatttagtgataatgttaatgtgaaaatggctacataattctctgaatgaatttggggttagggatatctattgggcataccatatcccagtctgctcaaatactaggtaactattttgttttaacttataaaatgtttgcctgagctcttagaagttcgcctctgaatattctcgattcgttaagtcttaataaaaaatattggattcagaagaatggaaagaaatctcctaagtcatttcattcacctctttagtctattaagtgatatgacaaatgacatatttcgtaagttcatatgattgtttttgaaaatgaaatgcaagttacagaggccgactttttaagagtgcgttgtaaactaacatttagtcaaaattgaactttaaactttgcccttttaatttcaatattcaattgattacagtttatctgtagtggcttggttcagtaacaaccctgtatgatattttttgtctgatactagatagtatattatccacactttcccttcacttcagcagataccataatgttacctatgagcttgaccttttttaaataacttaagatactaaactaaatctgtatgtcacattatgagatctaggaaaaacagacactatatatttttctgtaaattattatgtaaatggaaaattgatctaatatatcttctgttttaatgagatagaacatttattaaaccttgggttaggtacatgactgctagttatattagtgtctgcttttctatatgattataataaaatattgaatgaaatgatagcccatcaagagatggtttctatgtatcaaaccccttagacatcctaatattgatattctggatcctttaaaaacgaacttttatcactttccagttcaaaatattttcctgtttgggtaggaaatctcaatctatttgagaagtcactactgttatatgatgtgttactcttactgatgttcaatcctatgtttaaaaaaaatacacagacgtatattattgcgctttagtagtagtgagttatgatgtttgtacttagtcattttttatagatttcattgacatcttaaggaatgcacataaatgttgaataaatagctaatgaattggattgataggtttttgctttgtagatgctttgataaaaatgggcaagtgaggcctaggtcatagattttattcctatgtttgtcagttagctttttctgattccttcatgggctaccttttgaaaatgcagagaaaacatttctactctggaaaggtctataaaatttcattttcaaagagtaattacagagttacatttttttgagtgatgagtttctctaattttttataccatttcaaattttaagaatgcaatatagcagacaaaaagtgtttcctatagaattttgttatttttatttgtctagtttccgtgtgctgtgaatcattggattacctcaaattttgtttttctcaaaatgaaccttcccgcagttaatttaaggctgtcagactaaaagttaattttttgtttttaccctttcattgtagtgttgggtggggactgtgaggtaggtcttaatatcaacattggcagaatttgttgaaatgttgttttatttttcttatttaggaacagcatctgaagatggtaagaactatacattttgttagtaacacaaatacatctacattactattttcattggtaggaattaaatattagaactaaaataggctaatttctttgcaactctttataatttgccagttgtagtaagttctacatttcatatttggttgtcttagtaatgtgtggatttttttttttt

SEQ ID NO: 29224 - DNA, 2300 bp, Homo sapien
ttgcatggaaaggccgtatgtgtatggtttacaaagcctaaaatatttgctgtgtggtcctttatagaaaaagaatgccatcccctcccctaggggagtgattcttaaactcaatcatgcatcagaatgactgggagggcttgtatgttaatacatagattactctagagtttctgattcagtaggtttgggttggggcccaggaatttgcatttttaacaaattgcccggtgatgctcagctgctggtataggggccacattttgaggactggtgccatagatattactatgcatctttgacttataatctaaaataaattattaatctaaaatctaattatatatagttataatctaaaataatctaaaataaattattgtgtttactacttcctcagtaaggctcaaatctttagaaacctttgactttgtttgcttaccttttagtagtaccattttataataacctcatactggaacagcccatgtcttgtcggtagtagaatggatattaataaattgtggtactttcacacagtagaaaactatcagcaatgaaaatgaatcttccaaacattatccttccaacattgagtaaaaagaagctagataccagaatacatattgtatgattcattttatataatgttcaaaaatgaacaaaaccaagtgttagaattcgagactagttagctttggtagtaaatgtagacttttaggagtctcgagggtacttacacgatgctggtaatctgtggatctggatactggttatactggcatgatcattttgtgaaaattaattagctgtgtacttatgatttgtatactttgctgtattttgataaaaactttaaaaattaatttcccagtagtttgagaaaagagttaattttttttttaatggtagggacatatttactcttttcaattcttgtgtgtgtgtaggaacagaatactgtttccatgggaacttctggctgctctgtgttttagtgcttaactttctgtagatttgtatgtctactctttcttagctgcattttttttaacataacagtagcaaagaagtttatttggaattgtattagtgtttttaacaaagccgtctatgtactgcataggttttaagcttattaatttatccaaactgactccctaatagtgttatgctaaaaaaataattttttaagagtagaagataattttttcctgcaagttgtattacttaaaaacactttctgaaatagaatgtgactttagagtgtctatttgattcttttttcttttaataaataagtcttaaaactttcttggcatattttaagatatatttaatagttaaatagttatatattaaaaatagttatttttctttaaaatatttaataatatctctttataggaattatttaattctaggtgattgggtgtttgtttaagtaaagaaagttcattgaaaggaaaagattctggcatattcatctgaagcgtgtggtaaagctgcttctctgcctcgcccatgttgtttgtcatggttgatttgtgcagggtcctagagaaaaccatctcttctcaggagagtaaaatacattgtgtgtgtgtgtgtgtgtgtgtgtgtgtgtgtgtgtgtgtgtgtgtatgctgggagatgtttcatttgcatataagtagatgatactagtgtggtcattcatattccgaaaggagccttgtagaatcatttatgaaaacaaattgttttgtttggtttctatggcttaaataaagagcagattttaagattacagagttaattatgcacagtaatgagcactgtggcagtctatgctttactgatgcaataagcatcccagcagaatgaatattgcataaaaccttattttctatttatataaattttcatgtcaaataagaaaaacagatttctaagcctttagttttgaatgcctttgaaattttgatatagaataaggattatagctaatagagaattttttagatgcatggagaatttttacctttcatctggcagtagctgccataagatgatgtcaccttgtagctgattggctgttacagcacctagggcagggaagagaaagaaaaatgccggcacaaacctcagtggtggttctgtggttgtttctgtctttttttgatagaatctttgattagtatcgaatttactgtatttggccatgtgaactattgggagcctcctagggtgagggaaattaagagctttcagaggaatgaggcgactgatttgcaaacggatctgtgattgtaagttgc

SEQ ID NO: 29225 - DNA, 2300 bp, Homo sapien
tcattttttttaattttttaattttttttttgagacagggtcttgctctgtcacccaggctggagtgaagtggcacaaacacagctcactgcagcctcgacctcctgggctcaagtgatcctcttgcctcagcctcccatgtagctgggaccacaggtgtgcaccaccatgcttggctaatttattgattttatttttggagagacaaggtctcactttgttgcccaggctggtcttgaactcctgggcttaagcgatccttccacctcagtctcccaaagtgccgggattacaagtgtgaaccactgcacttggcctaatgagaggataattattataggaattggctcacacggttaagggaggcaagaagtctcatgtctgctgtttgcaagctggagaaccaggaaacctggtggtgtaatacagtcctagtctggaggcctgagaattggaggactgatgatataagtttctgtctgaatactaaagtttgagaaccaggagcacccatctttgagagcaggaaaagatggatgtttccgatcgagcagagagagtgaatttggcctttctccacacttgtgttctgttcaggcctcaacgaattggatgatgtccactgacattgggaagggccatctgctttactcagctcaccaattcaaatgataatctcttccataaactctctcacagacacactcagaaataatgttttgccagctatttgggcatctcttgccccagtcaagttgacacataaaattaaccatcacacatagtttacttgattgaggcatagtctgagggaaattacaaccaattaaagatggaagaaactttacaaactcaatacaatgtgaaacacagaaatactgaaaaaagaacacagaaaacagtcaatttctttgaattttgagtttgtttattcttagttattgtgaatatttcaaatatcaatttttgttgaattcattcactcatttaacttaaattggccacccattatttgctaggcaccaccctaggaaaacacaaaggttcctggagctttctgtgtattagaagagaaagatattacataaataatcattttgttgtgattgggaataattgtcaagaagataaacacagtgtgcttttggaatgtattagacaactttacccccaccagaatggctaaaactaataaccctgaccatatcaaatattgtggagcaactggaactctcaagcattgctggtggggatttaatatgatccagtcactttggtaaacaatttggcaggttcttctaaagttaaacatacaacttacaagacctagtaatgccagtccttggtatttatttacccatgagagaagaaaatatatccacacaaaaacttgtgcactaaccgttgtagcagctttattcataattataaaaaataggaaacaacccaaatatctaccaacaagtgaatggatcgacaaatggtagtgattccacagaatggaaagcaataaaaaggaatggacttctgagacaccaacagcgctggatggaccccaaacgttatgctaaaagaaaccagactccaaagaagcacagactgtatgaagttcaggaacagggaaaactatgttaccatgctagaaatcaaattagaattgcctagggaagagcagataattgggaagtgtcctgggacttcctggggtgttggaaacgtgctgtaccctcactggggtggcggttccacgggtgaatacatttgccgaaactcatgaagtgtacgctgaaaatctgtgcgttttactttaggcaaacctaagttttgttttgttttgtttttttaagtattacacagtgactgtggtggtggctggaagcagaagtcaggagtgtattcttttttttttttttttttaaaccggcagtgggggcgggaaagggggatgccaagtactttcctaagtgttgaatacaagtggaggcaaacttggaaacgttccacatttcacagggcgagggcagggtgccctgacagcggctagcaaagaacggcccgcctcccagggggctcggcccaactcggaccccaagtctccctagaggtcctatcgctcccagcggtttccgcagccacctccaccacctccgcagcaaaacgctagccggactggagggccctcgccggcgtcgtgctgacgtcacgcgcgtgctgacgtcgcccgcggccgcggcctctgaagcgggctggggatcggggggcgccgagtttgactagtttgggggcggctgggcgcttgg

SEQ ID NO: 29226 - DNA, 2300 bp, Homo sapien
acattctaggtcacatgaggcaagaaagatcttggtgtgtttgagaaactaaaaagaccattgtgactcagtggtaacaaatgaggaacaagaggcaaaatatgaagttgcagagaaagatcatcatgttgtggcagggagtttggttttcattccaagccatcagatagtatcaccttaatcttcctttggtcaatgccacaaaactaaccacatctatgttaactttcttttctccgccatctgcctcaacaaatgtcatgtccctcatctttctgatggctaatcactccctttgtatcctccctcctctggttaccctttctcctcttttcatatactttgcttcttcgttatcttcccaatgggtcagtcctgtcaaccaacctacaagacaccacccatcccccaccctcttccatgggttatcaactggtaatgattctactaaccactcagatgttcaggccccaaaaccaggacctatcttgaccactctcttttctttactttcctatgcagttcattggtaaattcttcagttttaaactcaaagatattatcagtttggttcactcttgctaatgttagctttcctgatttcgtcttgatttctgaaatggtctcatgatttgcctccttgcctccattctttccttcctctaattttttctttatgcatcagccaagggtggctacttattttaacatagaatagcttaattaaaataaacaaaaatttttataaattgtggtaaaataggccgggtgcagtggctcacgcctgtaatcccagcactttgggaggctaaagcgggtggatcacttgaggccaggagttcgagaccagccgggccaacatcgcgaaatccagtctctattaaaaatacaaaaattagccaggcatgtggtgtgcacctgtagtcccagctactcagaaggctgaggcaggagaatagcttgaacctgggaggtggaggttgcagtgggctgagattgtgccactgcactccagcctgggtgacagagtgagactctttctaaaaaaaaaaaaattgtggtaaaataaacttttactataatgaaagtagtctatgtgctgcaaaagttacaatgaaaaagataggcaaacacaaagaaaaaaatacacatttccacttccaaagattaccaatactaacaccttagggtataagcccactatttttttagttgtacataaatacatatatgtgcatttttaaaccaaaatgagatgctgtaacatactatttcgtgacttgctcttttcagttaatgatcttttccatggcaatacagttctattttatccaatactcagtccatctacattcatatttctttaatggtcctgaaaatgcattttatagacagtctgttcaaaccaggatccaattcaaactgttatgtcccttaaatttcttttcataaagcagttgcttttatcatgacaaattgttgaagagatgggccagttatcctgcagaatgtttcaccttctggatctgtctagttacttcctctggcatcatttagtttgttcatctatctgttgtattttttataaactgtgttagatgcaaaggcttgacagattcaagttaaatatttttgcctggaatataccatgatgatactgtatactacatcccatcaaaagacaaactatccgattgagctacaacgtggcctttaaaaaatgtaaattataagtgtatatagcttcctctgcatttattatacaatactaaacaaattcttcaacttggacaacaagtttctgaatgatttgatgcctgcttactcatccaactttattccatcccattctatttgtttttaaaggtcttgtcacatgtttcgtttctagtcctgaaacatggttaagtgcttgcctcctagggcctctgccgcaggcttttggtttggaggctctcctttgccactccacccctctccactcttctcctcttctgatatcaagcatcttctcaaattacaggtgtcgtttttaatttatttaaaattttgttctttctacaaaacagcaaccagagacacaggttcattttcagttaacctactcggagaaaacctactttatcttatttaaattagggtcctccaagcgatcttaacatctcctaagtcccaagcaccctgtttttttcctgatactttttccgtttaccttaaggtctgtgtcaacctgacagtaagctgcacgatggcaggggtcttgcctactaggttccctgtgcacagcagcccgtcaacag

SEQ ID NO: 29227 - DNA, 2300 bp, Homo sapien
ggtaaattcttcagttttaaactcaaagatattatcagtttggttcactcttgctaatgttagctttcctgatttcgtcttgatttctgaaatggtctcatgatttgcctccttgcctccattctttccttcctctaattttttctttatgcatcagccaagggtggctacttattttaacatagaatagcttaattaaaataaacaaaaatttttataaattgtggtaaaataggccgggtgcagtggctcacgcctgtaatcccagcactttgggaggctaaagcgggtggatcacttgaggccaggagttcgagaccagccgggccaacatcgcgaaatccagtctctattaaaaatacaaaaattagccaggcatgtggtgtgcacctgtagtcccagctactcagaaggctgaggcaggagaatagcttgaacctgggaggtggaggttgcagtgggctgagattgtgccactgcactccagcctgggtgacagagtgagactctttctaaaaaaaaaaaaattgtggtaaaataaacttttactataatgaaagtagtctatgtgctgcaaaagttacaatgaaaaagataggcaaacacaaagaaaaaaatacacatttccacttccaaagattaccaatactaacaccttagggtataagcccactatttttttagttgtacataaatacatatatgtgcatttttaaaccaaaatgagatgctgtaacatactatttcgtgacttgctcttttcagttaatgatcttttccatggcaatacagttctattttatccaatactcagtccatctacattcatatttctttaatggtcctgaaaatgcattttatagacagtctgttcaaaccaggatccaattcaaactgttatgtcccttaaatttcttttcataaagcagttgcttttatcatgacaaattgttgaagagatgggccagttatcctgcagaatgtttcaccttctggatctgtctagttacttcctctggcatcatttagtttgttcatctatctgttgtattttttataaactgtgttagatgcaaaggcttgacagattcaagttaaatatttttgcctggaatataccatgatgatactgtatactacatcccatcaaaagacaaactatccgattgagctacaacgtggcctttaaaaaatgtaaattataagtgtatatagcttcctctgcatttattatacaatactaaacaaattcttcaacttggacaacaagtttctgaatgatttgatgcctgcttactcatccaactttattccatcccattctatttgtttttaaaggtcttgtcacatgtttcgtttctagtcctgaaacatggttaagtgcttgcctcctagggcctctgccgcaggcttttggtttggaggctctcctttgccactccacccctctccactcttctcctcttctgatatcaagcatcttctcaaattacaggtgtcgtttttaatttatttaaaattttgttctttctacaaaacagcaaccagagacacaggttcattttcagttaacctactcggagaaaacctactttatcttatttaaattagggtcctccaagcgatcttaacatctcctaagtcccaagcaccctgtttttttcctgatactttttccgtttaccttaaggtctgtgtcaacctgacagtaagctgcacgatggcaggggtcttgcctactaggttccctgtgcacagcagcccgtcaacagtagttgaataaacatcataggtcacaataaccctgggactgcctcttggggaggtagccgcaaactctcgcaggtggcagtgacaccagtacttctccggggggttgttcgagtggaggaatactcttacgtgaaagtgctcagtacaccactgcggcaggaaggaggaagggaagaattccagatggggagaaagtaatattttgcagcacagtacagggtaaactgggtccaggtgggcgtagccgccgcgacaccttcacgtgaccgcggacagcttaaggaccccgcatccagtgcgcctgcgctggagctcccggaagttgccggacccggaacgcaggcggagcgcaagtctgtcagccagtcagtccgccagtccgccagcccagtacctctctctcctcggccctcgtaagctgtccgcggtctgtttggcccgaacggcggcggaggcgctgatcatggcgacattcatctcggtgcagctgaaaaagacctcagaggtggacctggccaagccgctgg

SEQ ID NO: 29228 - DNA, 2300 bp, Homo sapien
cagctgggattacaagtgtgtgccatcatgcccagctaatttttgtatttttagtagagacggggtttcatcatgttggccaggctggtcttgaactcctgacctcaggtaatctgcccacctcagcctcccaaagtgccgggattaacaggcgtgagccaccgcacccggccaactcatgacaccttttaatcccagactgatttatttctttttcttagtataatttgtttcatgaaagcaaagttattttagtattaacaaaatataattgagatgaaaaatctgatggggaacatttcactagtgagctctgaaggccagacagaaatcactggcaatgggtagtaatgctgttcctcagaggactaggtgtatgtactacctggggtgtcccctaactacggcatgtttaattatttgaaagatgaatttgtttgggaccaaagcaagagcattgcagtactaaaaatattttaatgtttatccccgcctctattctcatgttaattttgaggaagtatatctaaaaatagtttaatcagattgttccattagtttactttgtttttccttgtaatttacttttaatctttgttaaatctcttgttacgctatagagttttagaaagataaccttattgtctgtaggtcagatgttttagattggttttgcataatataaaaatttaaatatattaactgttcactgagttaacatttgaaatgacttttatatgtaacagtaggaaattaagtcttgctgagttcctataaagaaattctttttcccccctttagtttgctagtggtgcctttttacatattaaagagacggttttatctgccttaagtcgagagccgaccgtggacatatctccagatactgttgggaccctcagtcttattatgctggcacaggctcaagaagtattttttttaaaagccacaagaggtaactccaatttatctttttgttgcatgtgaaaaaaagtgataaggcttttaaattaagaaagtgattagaatataatatgttcaatgtcgagctgtccttcttgaacttgatacatgaattatggaaaattttcagctatccttttctgaatttgtggcacaaatttacatttaagaatgtaggctgtgtttgaagtcatgaaatagatctttagtaattgtctttaaacactccattctggaatagtatttatgtatgtttttaacatgtcagacatttattcgcaaatatttattggatacttactctgtgccagtcactgttctagtttctagataaacggagttagaaaacaacttaggttttggcgacgggagagatgataagcaagaattaagtagacaggataatttcataaataattgctataagatttcagaaataattgctataaaaaataagagaattatatgatagtggctggtggtatggttatgggatagggatataggggaagctgggctaattttagattcattagtcaagaaggctttctttcaggaggtcctctttaaagtagacctaaatgacaagaaggagtcatccaggcacagtccctagccctgggaatgagggaataagaataattcttataaggcatataagttagcatgagagattgaaaatgggctgaatatgtaatatgggctgaaactgaaaataagagataagtcatcatgtggaagaaataggaattggaatacttttttcttttaaaataacagcttatattgagatagaatttatatacactcaagttcaccctttctaagtatacaacataagatttttagtatattcatagagttttgattaccactatcttattttagaacattaccatcatcccagaaagaagccatgtacccattagcagtcactcctcactcccctttcccccactgctggcaaccactaatctattttgtctgttctaaattttgtgcagaaaatgtgatttcatcaagaaagatgttttcagatgcgtgtacaaacttgtgacctcagtgtttatactgagacatgtcagattagctcatatttattttaattataatggtcatattgtattccagataaaatgaaagatgccatcatagctaaattggctaatcaggctgcagattattttggtgatgctttcaaacagtgtcaatacaaagatactctccccaaggtcagttattgtttttataaacacttgcttactttgcatgtgaaatatttagacttttttgtgtataagaagcaagttgaaacttataaagaaatttgaagtttt

SEQ ID NO: 29229 - DNA, 2300 bp, Homo sapien
ctgattagtaaacgatttttgacatttattttagaaagtcctataatgtggaagaaacaaacagttgctaccaaagattcttcaaataaacatacaaataaatgtgtatatttaatgttttattgttagcttctccagaaaattgatgcaaattctggtaataattcttgcattttttccccataacctggttaaaataaatacgccattggcaatacttcataatgtaatggaattgtttggggaacacttactgtaccctctcatcctttttccaccttactgtgttaacttagtgacatttaatgcccaatatgtatgaatagatctaagccatttaattttttttccttaaagattggagtattttataattcaaggagcatacaaaacaatggttgggaacatatgccaattatggaataggctatgtatttaatattaatctctgccattaggatatctactcactgtataaacctcagtaaaaatagtgaagacatgcatcatggaatgagaaaatgagaaaggaatgagttgtctaacatcacagtgggatctgttttttgtgaggttcatttctgaacacattaggcatatgagcagatttccagtgaatctatttatgtttattttctgagtttcaacgctgaccttttcttgcattattgtttcattttaatgatagtgttacttgtcccactgttgttttcattgagtttggatttatattttaaatgttcgaatgaaagtatgattgtaaaagggagtgaattggtttaaaaatatatgtatattttaaactttgttgtgtgtaggaaacatgaaggcatgttaattcaatataaatgacctttgatttcatggaatattaaagttggtttaaagtccaatagttaaaccttagcaaaaatagctttttacttcatcagttgctaagatttaatactttggattcatcaaagtgtgacatgggcttgtttgacttctgtaagtggcatttaagttccacattcttattacttgaggtactttatactaacataagacagtgagagttagaggtattacaagttgctagtttataatgtcttactaatgcagaaacaaggaaaaaagcaaaattggcctgaatattctcttggggaaagagggcaccaaagaaaagggtaagtgcatctgagggccaaaagagatgtataagccttttagcccattccccatgctgggcctgctcacagagccacaggaagatcattcagaaactaggaaaggaggcccccacagctgatcctgccacagcacacctgactcactcggctctgttagtgtaaccttttaaatgtagcaacacaaaccctttccctcttgtcagttcactcatcctttggtttctttttaatcacctgtgtctgggcacagacaatcacaataaatgcagccctttattactgttaaggatcatactgttggtttggagttggaagggtactactctgtgattcaggtgtgttgtacccatatttataattaggctttattatcttcctaaatcaaggaaaggaaatcatccccagaccatttatgctgagctttggaatactattttaaactggattgtacttaaataatgaagctctgcatagaggaactagtcagaagtggggaaaacactgtctaatttttatcagtctggtataaagtattgatctaagagaactctccctgtgccccttggtctttattctcaattaagaaaaacagtcacatgtcacgacaaaccaatcaatctttatgagatattcctgtatccataccccagcttgtttgcaatttataaacctccccttcaaaactaaggagttgcagaaaaaaatggatttcacagagccttgtgtccctaaagttctgtcccagtcagcagtctttatagtccaaacagattataaaaaatgttttccatttgaactttacagtttgcaaaagtgcttttatacattttctaatttcagaaacaggataatttgttaagtgggtttcagtttgctaatagggattttttgtgttttgttttttaattttcagcatctcttgaagaatcttgctacagccaaatggcatctcactttttaaagacgtttgcaattattagttgattcacagtacagaacaaggtataaaggaaaaaaccctgctaggtagtgttataattgctagattaaaaatagactagaacaggttcattttaagatttacttggaagagcaaagaaggaaaaattatatttttaaagaaagaga

SEQ ID NO: 29230 - DNA, 2300 bp, Homo sapien
accagttaatttagagacataaggagcccaaagcggccagatggtagtctcaacttccagttcagtggtggttgtgtctcctagtggaagcatttccttttttggagctaaaacttatagaccagcagaactaaaaaacaggaatcaacaaatttcactattcagtctttaggggtatctgctagtggaggcaatctcatatccacttcttgcttgattcctggacccatgaatcctgactatgggagaaacagcacaatgtattagatgctgattcaaaggatatgcaacatactgatagacacagctccagccctgaactcttgccacatagttgactgtgtaattgactcttcaaaaggcgatcctgttatatcaagacagctgaagcagctgcttcagggtgatggaaacataataggaatagtgaattccctgagtatggattcattgctgcacttcatttgttgtgaagtgaattatttgattagaaacaatgctgtgtggaataccatgatgatggattaggcattctgtaatcccatggatgcaaattttggcagaagcattgcatgaaaaatctatattcagattgaatatctactctaacaagaaagaagagcttcccgttttatgatggaaatggtccaatgtaatcaactttccatcaaatagctagctatttctctaagaaatgatgccctattagtgactcattgttggcctctgctgttggcagatcggacactcaacagtggctgtagccaggcaaatcttggtaagtgaaagtccatgctgctgaacccatgcataatctccatccttgccaccatggttagtttgcttataaacttattaggcaatgatagaatggctggggtaaaaaactgagtgatatctttagtacaaatcatcatattcacttgattatcaaattcctcctatgttaaagtcacctgtagcaagcattgacataggatacaaatatctttgtattatttgccccttgatggatgtctttctgcatatctcttcctctgacctcctgggcaccaattttccaattgtgtttctcacaatttttttggccttccagtcaaaccattgaccacagccagtgaatcagcatagataggtacctctggccatttcttcttctagacaaaattaacagccagatatacttcttgaagttctgctcactgggtaggtttcccttttcctctgtccttcagggttgtcccagaaaaaggctctactgctacaactgtctgcttctaggtggtgcctgcgtactgtgcataaccatctgtaaataagttccaaattgtatctctcgtagtcaattggtaatagagaactcctcatgaggccataggtgcaggctgggagagataatgtaatttaccaggagcagggactatgtgcattaggccagttcctcatgtatcttacttgtgtcttcaggtactgcttgagcttttccatttggtaagggagtgctgctgtgcccacccaactttagcgtagggagtctcacgacaccctgttcatgatgtaacagctaagttcaaaagataacttgtctcatggttaagcatttgatctctactaaggaccaatagcaatttaaaagttgtttctcaaaatgagagtaattatccataaaagatagcgcacaaaaggaagaatatggtgcctgcagtgtccaagggggttcgctagatattgtgcctcttttggggtcagtaggggccagatgcaacaaccttaagaaaacatatcttaacacgtctccacatacctggaatcctagaaatttcactgaggtaaaagtttccttaaattttagtagtatttatttcccaacatctggcaaatattttttaccaacatttctagagtagttgctacatctttttcactaggtatagtccctcataggagcaaaagataatcaaggctcctgtgggctagattacgacatagggctgggaatttgatatacccctgagatgggagaatcaaaatgtattgatggcctttccatgcccatgatggtctttaaaacaaatatcgatttttaaaaagcattttccaggccgggcgcggtggctcacgcctgtaatcccagcactttgggaggccgaggcgggcggatcacgaggtcaggagatcgagaccatcccggctaaaacggtgaaaccccgtctctactaaaactacaaaaaatagccgggcgtagtggcgggcgcctgtagtcctagctacttgggaggctgaggcaggagaatggcgtg

SEQ ID NO: 29231 - DNA, 2300 bp, Homo sapien
ggcctaggtttatgttctggtgctctcccttagaaactatgtgacttggatgggttctttatcctttacatacttcaactcctcctctttaaaattgagatagttttcatctgagttttttgggtaatgatggggattaaaatggaagaatttagataaaatatgtggaacagtatttggcacacagtgaccactgagcaagtgctggcaatcactcttaggaaattttataagaaagaaaatggaaggtttagaagatgaagtgacagttagctcaaggtcatgcagtgatggagattttaaaatgagtctagcacacttttatgctggggcttatacaatttaactttgaggtggcaggatggattcactatcttttcaagagcatgagagacatctgattctgtcatttacttagcaaaagagagcagaactccaccttcattttcaaatgcattccttcttgtgaatatgaaaataaacagcaaaaaataatgtggcaattatttatgtgaaaatcatcttatttaatattaatagtgtttttcttggcttctctgcttcagttttatgactgcatacaaaagaaatctaaacattttacaatgtttttgctatgtacattgaaagagtcagggattttcacgatcagggcacaaaaccatgtcttgcttttatttcatcttccctaatagttcccttggccactgctcctgtagttcaggaaatattggtcaccatgatggtctacaactggtgttgcatagtctgtatcttagggtttccttgttatcaattcctgaccaaagtgtctagatatcacagttgttctaccctaatatccacacctacccccagcaacattatccctgggtaccgggcttctgggattttccccagcctctaagttccaaattactttctcagccagatatatttcctgtctgaaactgtgcttctgatcttaacttaactttggttctgatcttgccttgaagactgagacttccccttgctttctaccagctcttacccaggacagacataaatctcatttcctccttgctttatgtgccacactgcaagctaaggctgtctcttctatatccaagatcagtcttaaataacctattcttggacataggtgagcactcacaaaatctatttgattcaatttgatccaattcaatttaattcaatacaattcaagtactctgggcattttctttaagattagtcctacattcagcactatttgtccattgaccaaacaggataaaaatgcataataaggataaaatatcacatatcaatataaatattctgtctttctgttcctctcaactttaaataaactccacttatctattttatttcccttcccctggaacaagctatcaggctttttaagagtccttgtcacataaatgcaagtatctggtttgaggtatcaccagagatctgacaactgctttggaaacagagtaatagcacgtttttcccatgggagccatgggcaatttgattcatttcacatatttgtgagagagtgtgtatggatggggtgtttgcctctaaaatgcagctgacaatgagtatttgcaaaaattaaactgtctctatcagtgcacaccaaatgtcatgtcaaatttcacctcttaaaccttgctcctgctttgtgggcagtggatgtaagaagtggcatatgcacatatccatacccatctgcccacactcccaagctcacacatttggaatttgctcacaggttgcacgctggtaaatacaaggcacatctgccaaatgtctgcaccagtgacatctgatattcttgtgccagtcacttccccagagatgagatttacatagcaacagacccagcagggtccattaaatttctccttatcctttcctaggtgcagtgagtgcctgttaagaaaccccaacggctctgtatgcttttctgagtcatcacttgctctttcagctggctgcctcaccagtactccctcatgcttggtctctctctctccctcaggactggtatgcatggccacgcattgttaaacattccacactcacaatgaggttggtgtgacagctggggaccaggcggagatccgtactgtggtggcactcatgcacctgttgttggtagtgaacttctggctgccattcagtcagcagctgttaactactaaggtgccaggacaaaatgaaatgcaaccaagaagtcatgccccatcacaaaggtatggtcctagtcaaataccttatacttaaactgatatgatttggtg

SEQ ID NO: 29232 - DNA, 2300 bp, Homo sapien
ttttttgtagagactttgtgttatgatcaatctgctaaggtttcctgttaatagattacctgtccaaccattcaggagatgccgagatgtagttctgtccagaagagaaatcaaatacgccaactttcttcctatgcagtctcaatttccctcaaagaaaaataggtttttcagaatgacttgagatgaagggaagggtagtaaattagaaatgctttcataattttcctttaaattttatatgtttggaaggaaggagaaaatacttgtaaaaaagcacttctggagatgactacgtggaaatgatcaggatgtagatcaaagtaacagttttgaattatttgggtttggtttgcctgaaacctcatacagcagattcattcttattctagtgagagctgaacaccaagggagacaatttcgaatagttggaaaataattacctactcatcaagggtcggtacaacctcattccatttttacagtagtttctagaagtacatgtatcatttatttgagatttataatcaatatcttagcgtatatgaacacagccatagctgtagaaatcacatttctataataatgcaaaggcatttatgttaataaatctgtttgtaatctctgtcattatggttgggtgtcaataagtgaaactaaaaggatgtggaaaatttcataacatgttttatgctagttatttgtttgttgtctattcatggggttactaattacaactggtaaaagttgattttctcctcttcagtttattgtgggatggggcgttcatttcgccagatacacagttattcagtgtctacatttcagaagctgaattgctggatatagtcaaaatgagctttggcaattccatgtgtgagtgtacaactataattttgctgcacattaataacaaccttgcaaagaagcccagaatcaaatgccttgctctcagctgggagcagaaagctagagtggtatatcttggctggtgacctataatgttggaaaagtaggctctacattcactcagaaggagtaggtggaattccggaaatttattcactctccttcactacgccttttcctttttttttttttttccttccttgtagtgtgttagtgagtgctccgagacaatgaaaaaaaacaatgaattacagacaataaaaatagtgcatctctagaacaagcggtaaaatcaaggcttttatttcttcaggtgtcaactctgttccttccccaggtcctaccctgcccaggtttctgtggcacctctgtgattccaaatcagcgatcaggtgggcagcggtctgggcagtcacccacagggagtacacttggtgctgcacgttcggactttcagtcttgctcaaagcaaagaatctccaagagcgctgaggctacggattcattcgggtggggcgaggtgttattattgtgggattgtctctgcagagttggcctggagagtgagcggtggagggagtggaacaaggcttcgtcaagagtccccaggagtccaggggcgcccccgagacgggtacgctggagggcctgggcacgggggacaagagagaatacatgcctgctcgctgggagcagggaggcggtgtggcggggcagggggcaacgtgccagttttctttctgattaatgatgctcacgctgctgcgcgtggctcatgcgctttgtctccagccttagggctggcggagaacggcccagggaatgagtggtaccgcgggcgcccggcgcacccagcaggtgccatcactctggatgggccagttctggatgctcccagtggcgcagaggcggcgacactggcaggcgtccggctgccgccacctcccgggtgtggcgggtctggggcccggggtctccggccagagcagctgtggagccacgtgcaacacgcgcgttgccctcagcccgggcggggaccggacgcatccggagctgcggggaggagccgggcgccgcccccggcggcagtgccagccgcgtgggagggcacggaccggcggaggggcagacgacggaggcggccaagctggaggaacgggaccgagggatcgaccgaggctggctggctaggggtgggactggcagagctacggacaggtgggagcagtcagacagcctgagagagggagaccagaacgcaaagagagcgagagcattaagtaggcagggagaggcacacagaaagatagacagcaacactcgcgtgctccctccctccacacgccctcctcttaccgagcgaagcggccaggggcacagagtgggagagg

SEQ ID NO: 29233 - DNA, 2300 bp, Homo sapien
gtgttattattgtgggattgtctctgcagagttggcctggagagtgagcggtggagggagtggaacaaggcttcgtcaagagtccccaggagtccaggggcgcccccgagacgggtacgctggagggcctgggcacgggggacaagagagaatacatgcctgctcgctgggagcagggaggcggtgtggcggggcagggggcaacgtgccagttttctttctgattaatgatgctcacgctgctgcgcgtggctcatgcgctttgtctccagccttagggctggcggagaacggcccagggaatgagtggtaccgcgggcgcccggcgcacccagcaggtgccatcactctggatgggccagttctggatgctcccagtggcgcagaggcggcgacactggcaggcgtccggctgccgccacctcccgggtgtggcgggtctggggcccggggtctccggccagagcagctgtggagccacgtgcaacacgcgcgttgccctcagcccgggcggggaccggacgcatccggagctgcggggaggagccgggcgccgcccccggcggcagtgccagccgcgtgggagggcacggaccggcggaggggcagacgacggaggcggccaagctggaggaacgggaccgagggatcgaccgaggctggctggctaggggtgggactggcagagctacggacaggtgggagcagtcagacagcctgagagagggagaccagaacgcaaagagagcgagagcattaagtaggcagggagaggcacacagaaagatagacagcaacactcgcgtgctccctccctccacacgccctcctcttaccgagcgaagcggccaggggcacagagtgggagaggactgtgggcacagaagaccggaagagggacgctgcattgctggtgggacggagggattcggacggacggacagaccagcgcacagactggcagcctgcgagagtggcagctttgagagcagagcgcagcaaagcgagaatcccgcgccgagctgctagtcggacccacagacggtcggactgacagacgtgcagacggacagaagagcagacaggaggcgggggcgcgttcactcccggcggccagccggccagagaaggcggcggtggcaccttctgagcgcgtccggagcagagaccagcagcagcaggggcagcggggacacaagccgcgaccgagccgccgccgcagccctggctgccacagctgtgtgggatcccagccgacactgcagaaagctccttttactagcagttaaataaatcgaccaaaaacaaaacaaacaaacaaacccaacaacaacaacaacaacaaaagccaagccaaaagccaaaacaaacaaatccagccaaatcaatcattgagaaacaataatattaataaaatccaaaactaaatcaaaccaatcaaggcaccaagacgcaggggggatatccacagttcgatcaaggtaataatcaaggtcttccgacgtgaacattgcacgccttttgtggatttttagaattccttctttctttctgccatatatctgtctgtttcttttgaattttttcttgtctgtatttcttcttcgtgtttgtagaaagctgatgttgttatacatgtattgtgttttttatgtttcgtcaaggagggatggacgctccttcccccagaaaagacagaaatggaaagctggaagttggcaatgattttcatcagagaagtctacagtgatttgtataggctttatggtagaaagtttgcaatgctctttttgaaagagacctattgaagaggtagaaagttatactctgtttgttgtcctggaaggattggggtcctaggtcccaaagggctcaaggggaagaatagaaaagatgttcagttttatttttacatgcatgaaatctgtgcttcattgcaatcgccaatttactcttttctgtctcaggttgtagatatggtggtagaattgagttgaattaggcaggtgtttagaaagtttcttaggaataggaattaactcattcaatgtttatgcatagaaatatagctgaggtggatgtggttgctgtcagctattcaggtttgctacctgatcacctcctgaagatgtagggtaaggacagaatccaagcctaaaagaaaaaacaaggagagaattgaaagttataggggtgggcagttatatttcttaaaaggctggtagaaatcattttcctaagaatgtgtttagagtacagatattcattttaatctttgatttctttaagttttttgatgt

SEQ ID NO: 29234 - DNA, 2300 bp, Homo sapien
caacaaaagccaagccaaaagccaaaacaaacaaatccagccaaatcaatcattgagaaacaataatattaataaaatccaaaactaaatcaaaccaatcaaggcaccaagacgcaggggggatatccacagttcgatcaaggtaataatcaaggtcttccgacgtgaacattgcacgccttttgtggatttttagaattccttctttctttctgccatatatctgtctgtttcttttgaattttttcttgtctgtatttcttcttcgtgtttgtagaaagctgatgttgttatacatgtattgtgttttttatgtttcgtcaaggagggatggacgctccttcccccagaaaagacagaaatggaaagctggaagttggcaatgattttcatcagagaagtctacagtgatttgtataggctttatggtagaaagtttgcaatgctctttttgaaagagacctattgaagaggtagaaagttatactctgtttgttgtcctggaaggattggggtcctaggtcccaaagggctcaaggggaagaatagaaaagatgttcagttttatttttacatgcatgaaatctgtgcttcattgcaatcgccaatttactcttttctgtctcaggttgtagatatggtggtagaattgagttgaattaggcaggtgtttagaaagtttcttaggaataggaattaactcattcaatgtttatgcatagaaatatagctgaggtggatgtggttgctgtcagctattcaggtttgctacctgatcacctcctgaagatgtagggtaaggacagaatccaagcctaaaagaaaaaacaaggagagaattgaaagttataggggtgggcagttatatttcttaaaaggctggtagaaatcattttcctaagaatgtgtttagagtacagatattcattttaatctttgatttctttaagttttttgatgtttgattttctaccagtatgacactcagcctctcaaaacaagaaggacattccccaaagttgaaatgaatctgtataagatttcattcaaatgcagaataaattcaaatgattcctaacccctcctcatctactttggagataaaaactgctatgattgttttaagtaaacagagaagtggagatgacaggaaatcatttttcatttgttaaaaatcagaaaacctttgacacacttttagataaatacacctactcctttgatcctttgtgtatgtattaccacagggcttaaatatcttaagattttagttaatgtcattttcatgaaagacagtcatttggaagccaagagctctatctatgttttgttcaaatagccgagtaatctactatcttggcagtaattacttctgctgcatttctaatgtgaattgcatgtgagagcttatgaatacactcttttcaagtgtatgtgggttttcaaggtatgtatttgtgtttgatcctatatttcctttgttataacattctgcttttcatcactttgacagaatatttgtaaattttctggagagtgagtttgggtatatgctttgaggaatatgcttcctcattacaaaagatatggaaacataattgattactacacttgcttatcaatagtattttgattttgtttaaatgaaatgtttaagatacgtggattgctatgcattcatgttttagatttatcctctccaggcatgatttatgccattcaataattaaaataactaagttactttagaaaaagtgcctattaaacagagtactttgtttagaggacgtatatttaaataaacttatacagctaaagaaactgactttcacttcctcagtgacttaatttcactacatgctgatttgtcctttgcagtatttagctcagaccaagacagaattgtatgtgctattagatttgcaaattgctgatctcccagtgactttccctcttagatcccagttgagtatggttaccttgagaactgtggtattagccatgttagagcatgctccactggggagttctgtgcagtctatttttaatgctatttaatgaaggagcgagcgcctcactcagcaataaaagaagcatgagggaagacagagcagtgcatggttatggatactggacaaggatatttggaaaggtaaaggctgaccattggatatggtaattttaattaagtcctaatatatcatatgaatggaaatatggatttttgttagagaattatacatgaatagttcaataggtgttttcgtaaacctcttcactagttcttagaaagaagactc

SEQ ID NO: 29235 - DNA, 2300 bp, Homo sapien
gttgattaatttcctgtagcttaatttgcaaactattgacaaccttctctaaatgctacccataaaattatgtttaaaatagtatttccactaaaaaaagatagtaacttttattttgtgcatttatatatagtctcttctttctccttccatccttcaaactgtaacagttgaaatttggccagaatatttattaaccaaatgttgaagaaaagatatttgttgaaaatagtttgggttatttacaaaaatgaaagaaattgaaacagatcaaaatgaaatggcagtggaagagtccggttagtctggtgagcagaaagctgaagtagggttgatttcctggcactgctttctcagcaaagagaacaattttaatcagttacaaaaatatttgtgatccatatgttcctctctgctcattcccatatgcccattttctcttttatcttggtagatgatgactttatgattcaggcatgcaagaataatacctcgctgactttagagctcggtgctatttcaaaacgtgtcctggtaattacgcatacacatatatccaggctgtccctgctttgagttagttatgtgaatatcagtttgttctttctctcttcctggaaagaattatatcttgcatcctcctactgaggctggaataatgcatctaagacttagttttggaaattacattgctgttcacctgctgagtgaactgtacaaatatgagggtcttaaagagaaatcaaaagagtttctgtgatccttgagaacttcattcaacttggaaaaagtacaacagaatccagaatgcttttcgtaaccatcactgacatttatgctaagacatattagataatgggcttcttagttaaatagtttctaatttttaagacacgatgatttctatttaatattgagtattatagtagctatggtgaaactgatcaaaattgaaaaactaaaattactattgattagcaatccacttttttcctaaatgcatgtctagctctcaaaagccatataatttccaaaaatggaagaaacatagtttaaagtctaatcatccatcttcataaaacatgaataaatccagaaactattgactgtactactgattgcattttcaacagttgctttccccttgcacaacaaatggctttgtaacccaatatgttattaatatagccacagtaaaatcctgtaaggaaccagctgtgctcatttaaacttgggagaagagggtagcaaggaggagggagagagggtttctaactctcaaactacgtaactgggatgcatttagtgttttcatagataggtatgtgttggaagaggtgtgcatgctgttggatttagccgttgtgcaccagaatagcgttatagggaaaaggaagagatgcagcctgatttgggcaaatattattaggagcccgtctctgtgtttgcattcaagctgtctttgccgctgctcctgtaggagttgtgagaaagagaaagtgcacattatagcgtggattgttttcaacaggcttgaagtttgcaaatctgctgaatccctctgtcagtgtttctttgctgtcaaacagaatgcccagctggcagtggcaatcccgatggggagggagggctatggatagattgtgttcaccctgcaacaagaatattaggaattcttcttcccaaactataagtagagagaaaagagctttctcagccatgccattataaaagttttcttcttcttttttttaacttttatagagaatgtttcattaaatcaaaacctttctgtacactttattcaggtagctttcataaagagagaaaccacataaacagcattaaaatgtataatgtaatctataattaagacaaaggctttggttagaaaaagaggcaagacttttgctcataggtgatcctgatcctcattgaggcaaacacacaagcttttttttttttttaatacaaagtgcgagatttcactaaaaaaggttaaaattgaagtgagtaatcttcggtgcataatgcaattgttaattttagctccttgcgtgggtgccgttctgacttgaacagccggctgtagccttcattagagaagaagcaggcagcttgagacaggtggagctggatcaagctgtgaacgtgatttgctggaagctggtcattagtgttagaaaccccgtcttatttatttcatccttcaccctaccatgattattgcaattattattatttatttttcatcttttttcaggttgacgatgtgtcacactgtgtaagggaatcgcatg

SEQ ID NO: 29236 - DNA, 2300 bp, Homo sapien
atagataggtatgtgttggaagaggtgtgcatgctgttggatttagccgttgtgcaccagaatagcgttatagggaaaaggaagagatgcagcctgatttgggcaaatattattaggagcccgtctctgtgtttgcattcaagctgtctttgccgctgctcctgtaggagttgtgagaaagagaaagtgcacattatagcgtggattgttttcaacaggcttgaagtttgcaaatctgctgaatccctctgtcagtgtttctttgctgtcaaacagaatgcccagctggcagtggcaatcccgatggggagggagggctatggatagattgtgttcaccctgcaacaagaatattaggaattcttcttcccaaactataagtagagagaaaagagctttctcagccatgccattataaaagttttcttcttcttttttttaacttttatagagaatgtttcattaaatcaaaacctttctgtacactttattcaggtagctttcataaagagagaaaccacataaacagcattaaaatgtataatgtaatctataattaagacaaaggctttggttagaaaaagaggcaagacttttgctcataggtgatcctgatcctcattgaggcaaacacacaagcttttttttttttttaatacaaagtgcgagatttcactaaaaaaggttaaaattgaagtgagtaatcttcggtgcataatgcaattgttaattttagctccttgcgtgggtgccgttctgacttgaacagccggctgtagccttcattagagaagaagcaggcagcttgagacaggtggagctggatcaagctgtgaacgtgatttgctggaagctggtcattagtgttagaaaccccgtcttatttatttcatccttcaccctaccatgattattgcaattattattatttatttttcatcttttttcaggttgacgatgtgtcacactgtgtaagggaatcgcatggagatgggcattccgaactgttaatggggacatgggactccagttgtctctgatcacttgtgtggattttcctggcgtagaacgacagaagccgctagtaagtcgccaagacctacagcaggaattctgcaccaaaggtaaaggtcttgttgtctggctgtcatctcatctgcattttagatttattattatataaatgtgcctgcttgcatccagcagttcactgaatgtaaccatgacaggatctgtatcagagactcatttggcttgtagtttggagaattagagctcaatttgttcactccattttaaatctggtcatgttctgttttttacttaaatactctaaaaaacaagttagggcaacagaagtcccctatccaatgcactgagaaacaagctgtttgccagtggaaaatggaactttttattttgttaaccacgcatactgagtgccactgaaatataagaaatccgtcagaatgcactggatgaaatatcctaaaacctcccaaaacctgaatgcattgcttactagtcactttacagactcaaactaccatccttttggaaaacctccttttgcattcccacaatcctttgctgaataagcctgtgtattttaaagatatcattagataccatctgttttgtcatggtagattttagcaaaatttctgtggtttgtatttttctcatacttcctattttcagttggaaataaagttactgaattagtaaatggtaattgaatactcccaaagaaacatattaaaactcttatttgtctagtaataattaccattgtaatgactgggaatgggacagttattgcttgggatttttttgaaaagaactaactttctaagctacagcgcctctctctgcttctccttctccttcttctttctttttactttcttcttctctctctccccctcttccttcctcctcctccctccttctctttcttctttttttttctttctatttttctcacagcttaaaaaagtgaggaggaagtaaatgctaaattattcatgagcctcatttgacagcacatcagaaggggaagtgtcaggggttttataaaggtagggagaaaaaaataataacagattttaactctgaaaagccatttccagtgtctatagactattgtgagcctggagaagtagcatttagttgggatagcttcactagagctgcctgccaaagacttccttccacaggatcttgtcgcaccagcaactgacaggagcttgggagctcgggagcttgggagagggcttatgtttttaataatgtagctg

SEQ ID NO: 29237 - DNA, 2300 bp, Homo sapien
cactaaattgcacccagaaatagtggtggccaccttctttacctaaaaggcacagtcacactggcttttacagaaagtctggattcctgccatggaggtgcagagttcatggctaaagagattattgaagcagaattagtaatgggaacaagggatcacccccatatggagagcatccatctcatgcatcctgtactctgaggctaagcaccactcccaaatcatcaagccaatgtttttctataataaatatttcaaattagctgcaaatgagattattgtcatatttctggtgcattcacagttgctaaacaatgattttgctagactttgtaaaacatagtttaacatactcatgattatatgggagaagaatgaagttgaatttggagatttaaagagaagacaatcagaaatggaatagcaagcccttgaaaaggctatttatttctccgctctatctcccaaggctttcttgaatgtcaaaggagtttaagaggtaaagccacctggtcattggtgaaggtctggcattcatacctacaacttggttttcatcaagtggttcttatttctaaaaccagccatccgtgtggtactgagaacagagagaatgtaaaatattaatagaggatggagggcactgagtattttcatctaatctttcactcgaaagcgctttttgttttgtgaatattctgtaccccttcctccctttgctttacaaagttcctgtcacaaatcagttatttcatttttatttcttggatccatttatcttcttatgtttggctgaaataaaagaaaaagtttagtgagtaaagttaaagcaacacttaaaattttctttgtactgtctgtacaattttgtcggtgagtatttcaatcacatagtgcacttcaaacatctcaacagtacattattgtctttaaaatatttttcaatgaagctaccaatcacatctgtgagatttgaatcaaggcttaaatatgtctcattgttaatatgagttaggtgttatatttactgaccaagatttatattccctttacttatttataatccattaaaccttaaggtattttacggatgcattatttttatcttcagaaaaagctttgaatttattaacaaagttatgctttagacagattggaaaccaatgaaaatgcaaatttcgtcaaatttctctataaaacacatgcaattttgcatatttcttagagatactctacagtcttcaaacttcacttctggctattggatctcttccaatacatttactcttttttctatttgaagtttgaacaaatgtgttctttcacctgaggagctttttttgttatttccattgttccccttggaaagttttgtgtcagtgtatagtgtttacactgttgttattttcaaaagtttttctacgtgaaaataattaaagggttctttcctctgaccatgaaggttaaactcagtgggcaaaattcttaccataggttaatagagtaatttctgtgatttctatcctatctgtcaaagccttggtgatttcagatgtgtatctcataaagctggaacatgaattaacagcttctctggatctatgtgcatttttccattgacaattattttgtgctaaagagagagaaaaagtcttctttggtgggagttacttttagaatcatttaagatcacaattacttctgaacattaattaattattgatttgagtcaggagaagttatccccctattctatttgcaagagaaattaacaattacattttatgacatgtctttctagttgtttctccttcaccgacagagggatcatgtaacatttctaggtttggtttttctgtttgtaacctatgtgttatatgtgatgtgtcatctgtctatacatcatcaaagtatttgtaacactgggaggcaactggtttaatgaaaagggttggcaggaagggtcttgtgtggatcaccttccaagaaaagccttgctctgtgcctaccaacaccatgcatgtaaggtaatcctgtccctgtgcatctttctggtggtcgtactccaggggcaacagagatggctcagggagaacatctgggagtcgacagagcagctcagaaaatgaactcaagtggtctgaccaccaaagggcctggagcagcacagactccgacagttccaaccgcaatctaaagcccgccatgaccaagacggcgagttttgggggcatcacggtgctgaccaggggtgacagcacttccagtactaggagtaccgggaagctgtccaaagcagg

SEQ ID NO: 29238 - DNA, 2300 bp, Homo sapien
ggcgtgatttagtttgggacaccatggctaattcctatggtaggtattatttatcagactaaggatttctgctgctggatcagggtggggtggaaaggaaggaggtactagcttctctaaatttccttcaagggacaacatttaaacatatactattggctaatactgttgctaacttgagctaagcacttactaaaagtaaggatgacatcttcaattcttaaaaaaagaaaatccaaaagaaaaaaaggatgaaaaatttattgttctaagccatgacatgcttgctcaccaagactggaattgccagtagaccctgggagttttgtttcctaagaaaaccctcgtctggccccatgctagctcaggcttcatttgtacacactcatcaaagtcttgtactttcccttatcatagtttttttttaaatgtgtgtgtgatttaattaattgctgtctctcccactagacttaaattccaggaaaacagacttaatctgtgttttctctctgctgtatcattagtttctggcacaattctgatacagaatagatgcttgataaaaatgtgttgatatggctgctcctgtcattgtgtttgtgactttggctactagaattctgtctctatcgaacactcaggcattgtgttgtgagaaggaaaaagctgaagccatttgggctagccaatctggccccgtactgagggtcaccagaaaatttagagcattttgaaagctaaatgctgagtaagaggctgacacattgaacagtagctttcaattgacatctgggatggaaagagtaagagcaagtttattctaaaagacatgagctagggcatggatgcaggaccaaacacataatttgcagggtcaagtacaaaatgaaaatgtgatctcttgttaaatatttttaccgaatttcaagatggcagcatcagcgcggggccctgtgtgactgcacaggttgcacatccatgaagctgttcttgcaaacatctacagctaattttaaaaatctgaacagaagtttgcaattttgttttaaaaaattgagggtattttgtattaatgggggaaaagaggcttttaaatatctaggtgtgtttcttttccctgcacactgaggttgtcttcaaaagaaactggaccctctgtatctttattcagtggggctattcctatgtttccaaaagatttagtaaggcaggctggtttgcccctctgtgaacagtcctcaactcttgctatactgcaacatccaattgctcttcagccaagacctggcctagatttgaggctccacagtcggaaatgcatggattttgaagcccaaatgtgttcgaattccagtttcaccaattatagtttagtgacttaaagcaaattactcagtcttcctacagcctcaacttcctcatctataaaatggaagtgataatccctagacgcatagagtagctgggaggattaaataaggtaaaaagaaagggtttagtacaataagtgcacaacaaacgaggaacaggtgtccatatacacactgcattatctctctgctttagatcaaagctgaatggagaaaacgcagtgcccgtgagtcaggggacccccactccgacccctgctctctgtcactgaaccctataaatagcttagctaagtcactgtctcagtcactattcgttggggtgaggaatgagggagttgttgcaagtggctctttctggctatatcattcacagattttctattctttggggtttgggtctgaattttcagcatcctctctgaagaatcacccccacccagtgccggcgtgcgcccagccttcccccagccctttccagggcgctgccccctgcctgccctcactactccaggcgctggccgcgcagccccgccctggagctgcctccccgcctccttcctcctcctgcgggcgagcagaagcccgctcgcccgctgccgagtggcagtcacgactgtgaggtcgccggcgaggtggccgcgggcgcggcggggcggggcagggcgcactctcctccacgcccgcggaagtgccggggaggtgggcagggcggggagggagagggagcgaggctggaggagggcacgtcggcgcctcggcgaggatgggagtccccaggacccggagctgagcagcctggcgcgcggcgggcagggcgcgcaggacagaagcctcgctgttcctccgggagcccaacaccgttcccgcgcggccacgatgatccctccgagcagcccccgcgaggacggcgtggacgggctgcccaag

SEQ ID NO: 29239 - DNA, 2300 bp, Homo sapien
tcacctgttttactctggctgggtatagtcaattaggaaatacaaaagtcttgttttattcatgtacattctcattatttaagctctgaaccttggtttctttacattttttaaataagaagagggaaaaccatctggacaaggaagtttttacacctagattgaaaccttcttcaattttcctatactaactctaatgcaagtgaatctcagtcagagctttaagaaatacctaccacatcatgtgggtccatgagttcttgtgatgccagaagaagctgtgcacagtagacttctaccttattgatagattatactactaatacagtgaaattataatataaaatagatattaagatcacaaggacagtgttaataactagcaactattatgtccttactatgtgtcaggcactctcttaggtaagttgtaatttgatcatttattcttcacaaaaaccctgggagggaggtgtagcattcttactttataaatgaaaaaaaaaaaaaaaaaaaaagaaatgcaaataatttgtccaggttcacacaagcagtccatggccatgccaggatttaaatccagatctgtctcaaatcctgtgaccataacctcttcgcatactgctccaccttgagtgagttcaaagtcaagctgaaaaaaaatgttcttggcaaagagatgggtaagattgggtttttcaaaattctggaatgttcctgcctcttgttggtgtttcatgggcagcaaacctggcccttcaaagttctagaatgttcctgactcttgttggtgtttcatgggcagcaaaactggccctttttatctcagctgtagatccttgaaggtcagttcactttggggtagctggagttgtgtttacagagtcaggcctcaccgtgagagggctcctgtattagtcccttttcatgctgcttatagagacatacctgagactgggcaatttgcagagaaaggttttcttggacttacagttagttccacgtggctggggaagcctcacaatcatggcggaaggcaaggaagggcaagtcccatcttacatggatggcagcaggcaaagagagaatgaggaagatgcaaaagcggaaacccctgatgtaaccatcagatcttatgagatttattcactaccatggaacagtatgggggaaactgcccccatgattcaattatctcccactaggtttctcccacaatacatgggaattatgggagtacaattcaagatgagatttgggtggggacacagagccaaactgtatcagctcctgaggtgtggcccatcctgggggcccctgtgaggcctacaggaatcactgcaagcccaatgcttactctgttctgcactcctggtgtagaggagactgggaattagacctaagtataaaggctctgtcatttctaacagactctcaggaaccacacttataaactgtaatgctagagtcagtcatctttagtaaagttttggtgaaggctgagggctctctgaacccatcttaactaatactctgttgtccttttcttgttgcaggacagcaaggcctatgtgaccattctctaaaatatttaagctcgagaatcacagagcggaagctgcaaggctcctggctgcctgccagccgagggaatctggagaaaccattcctggggccgcgtggccccgtcgtgcccttgttctgccctcggaatggccttcactcagcacatcctgagaacagccctctgaagcccagggtcgtgaccgtagtgaagctgggtgggcagcgcccccgaaagatcactctgctcctcaacaggcgatcagtgcagacgttcgagcagctcttagctgacatctcagaagccttgggctctcccagatggaagaatgaccgtgtgaggaaactgtttaacctcaagggcagggaaatcaggagcgtctctgatttcttcagggaaggggatgctttcatagctatgggcaaagaaccactgacactgaagagcattcaggtggctgtagaagaactgtaccccaacaaagcccgggccctgacactggcccagcacagccgtgccccttctccaaggctgaggagcaggctgtttagcaaggctctgaaaggagaccaccgctgtggggagaccgagacccccaagagctgcagcgaagttgcaggatgcaaggcagccatgaggcaccaggggaagatccccgaggagctttcactagatgacagagcgaggacccagaagaagtgggggagggggaaatgggagccagaacccagtagca

SEQ ID NO: 29240 - DNA, 2300 bp, Homo sapien
gcagttgagaataggagctcagtagaagcaagggatgtggcatgttctcactcataagtggctgttgaacaatgaaaacacatggacaaagggagggcacgtcacacaccagggcctgtcaggaggtggggggttagcggagggatagcattaggagaaatacctaatgtaggtgacaggttgatgggtgcagcaaaccaccatgacacgtgtatacctatgtaacaaacctgcacgttctgcacatgtatcccagaacttaaagtattaaaaaaaaaaaaaagaagcaagggatgtagaaagtgtcctcacactgactgtgtcaggtatgatgttaggtgggtgttagggtttcagttctcatgccctgtcctcatgccaggacagtgggaatggtgggaactatgctcctgtggtggggagctggagaggaggcgggggtgaggcccccagacagggtgcttgaaggagctgggctttcactttgtggctactggcagaagcctttgcctcccagaatgggtgctggtaggaggatcttggaagttaggtaaacattagctcttcccttgcaactgaataactgaagcattccttctctcgtcaggcgagccaggctgtgcctgctcacattgcgcttcccttctctcctctcccagccttgcctgatggtcttcaggagagccaggagaggccagttgtcacgtgcctgaaacatgaggacttcgagttggctttccttctcttgaccaagggcgcagacccccgtgctatttctctcacggaaggtgatactcctttgcatgcagcactccacatctttctagagattaaaggtaagcccttgttttttaagcagccgtctccttgaggaggaagctggatattagaactgatgctatgttttctggtctttccttttgtgtaaaccagtgatctgaaaaaggcccatttcttggccaggcctgcccatgtcacctggcccctcacttgtagcataatgggaagaagtgaccaccatggtgagtggtcagggagggttgatggaggattctaaagttccagagttggctgttggtagctgaaaaatactttccatttatttatatcattttcaagggtctgcgtatgaaggatcttgctagaatcttgtatggtcatttcaggaactaccatgacatttgggctgggtagttctttgttgtaaggcactgttctgtgcgttgtaggatatttagcagcatccctggcttccacctgctagctgccagtgacactcccctagctgtgacaataaaaaatgtctctatacattgccaaatgtcccttggggagtaaatcaccattggttgagaaccactgagctctttaatggatttcagattttttgggggagttcagcattctgagatgcccctggctggcatcactctcaaaccccagggtctgctgtcccctaagaagagtggctcagtgctcacagggttttgtttgtgtctttcagctgacattggttttagcttcctcagccatctgttggatctgttttggtccaaccccactgaattcgactacctcaaccccaatgtccaggacagcaatgggaacacgctgatgcacatcctcttccagaagggcatgctaaagcgcgtgaagaagctgttagacctgctggtgaagtttgacatcaacttcaatctgaagaacaaagagggcaaagatgcacggcaccggattaagaagaacgactctctgctcttggcctggaacaaagctctgatggagaacaggaggaggagccggcaggactctgctgcccacctggggaagctctcaaagtccactgcccctggtcacacatctcagctcaagtcccagggttcattcaagtcagtgccatgtggtgccactgccagaacactgcctgaaggaagtgcagtccctgacagctgggagactctcccaggtacccaggtgaccaggaaggagcctggagctctcaggccctgctcgctgagagactgccttatgcaggacatcacagttttgattcagcaggttgaagtggatccgtctttcccagaggactgtcttcagagctctgagcctctggaggcaggagctggcaaagaaggaaagaaagatgacaagccgactctgggtgcaggggcccctgactgtagtgaggtgggggaaggacatgctcaggtgggccttggggccttgcagcttgtgcctgatgataacagggggaaggagggcaatgatgatcaggatgactggagcacgcaggagattga

SEQ ID NO: 29241 - DNA, 2300 bp, Homo sapien
tctgtaccatcatcccccatctcagcacctgggaccagcggaagaaacagcttctgggctgcctgatagacagtggaggtgagagtgactggatgctaagcgttggagacttgtccacattctccacgtgatggagtccaggccactgcctgcctttcccttgcttttggaggcaccatgaagttcaccctcattgcctaccctgtatattcttgttttgaaacagtgatggaggttactgccctgtgagtgagttgcccttgaggatctctgcatttttgtgaattccagttactacctttctcttttgtatgggaaacatcaggtgttctcttttgtatgggaaacatcaggtgtgtgaagggtccttggctctggtttagcctacagcagtcatttcctcctgacctctggctagactttgacttgcagtggatatactgtgtggatccttatctactcctgtgacattcttttctgatcaacagattgggattcaagatgcttgtttttaaagaaacggtcaagtaattggtgggtggaagcatctgctgctttaatgagaactatcatgcgtggctgggtgtgtgtctggagtgtgcagacatcttgctgaattggcttttatttccaagctgatttagaaacaccaacctcctcctacctctgtccctcacacctccactaatgccagtactaactgtgtggcattggacatgccatttatgacttcatttcctcattggtaaaatgggaataaataggcccccttttatagggttgttttggatattaaataagttaatgtgtgcaggcttttagaagagtaccttggctatgtagttctctgcttgcttcgtgctgtatgaggaattgtcttttacgagaaaaaacattatgtgttatcaataacacataatatgtaagatataacagtgacacacaagacattgtgtgttatcaataacacataatatgtaagatataacagtaacacacaagacattgtgtgttatcaatagcacattgatccttagccctcaaagtgccacacaccttgcagagcctttaggtgttggctccatccacagctttcaggaggtaggtggggtggcttctataatttatttttttaaactccttccttaagtggagtgttactttctttgcctggaaaccacagctgtcatggaattcctgttttatttcttgattcggcaagcacttatagagcacatctcaggatcaggtgctaggaaccaagcccacagaggtgagtgcgcagctgctggaagtgtgtggaggagactgcagatctatagtgggtgggtctgccttctggtggaggttggggaactttgatgcagaggagctgtgtggactgaactaaaaagaaggtgatttcgggtggagagatgtcagggaagatggcagttgagaataggagctcagtagaagcaagggatgtggcatgttctcactcataagtggctgttgaacaatgaaaacacatggacaaagggagggcacgtcacacaccagggcctgtcaggaggtggggggttagcggagggatagcattaggagaaatacctaatgtaggtgacaggttgatgggtgcagcaaaccaccatgacacgtgtatacctatgtaacaaacctgcacgttctgcacatgtatcccagaacttaaagtattaaaaaaaaaaaaaagaagcaagggatgtagaaagtgtcctcacactgactgtgtcaggtatgatgttaggtgggtgttagggtttcagttctcatgccctgtcctcatgccaggacagtgggaatggtgggaactatgctcctgtggtggggagctggagaggaggcgggggtgaggcccccagacagggtgcttgaaggagctgggctttcactttgtggctactggcagaagcctttgcctcccagaatgggtgctggtaggaggatcttggaagttaggtaaacattagctcttcccttgcaactgaataactgaagcattccttctctcgtcaggcgagccaggctgtgcctgctcacattgcgcttcccttctctcctctcccagccttgcctgatggtcttcaggagagccaggagaggccagttgtcacgtgcctgaaacatgaggacttcgagttggctttccttctcttgaccaagggcgcagacccccgtgctatttctctcacggaaggtgatactcctttgcatgcagcactccacatctttctagagattaaaggtaagcccttgttttttaagcagccgtctccttg

SEQ ID NO: 29242 - DNA, 2300 bp, Homo sapien
aatatgaaaaagccttttcacagatttggttactatcaaacaaggatgccaccttacaggcaacccctttgataattgggtaggattcagcagacaatccagcataaaactgccccaagtctttgattctgtattcattccaaagattagtgtttgcctgaagttttgttagctccaccctcactgaaataggtgcatattcaggtttaaagttaaatggatttgaaaaaagttctaagtcctttttaatgaacctgaggtccttaaaatgtctctcaaattctttttggagacgacagatcaccatttgatacctatcaggatcaaatattttttcatcttccttattttgctgttttagctcatcaacaacttctctgagggcaggaaagtctgttagatttttttcctcaatatgtctttgaaataaattcagcttaacttcgaaagtacaaatatggtcaaaggcagcagcagcaaagactttactaactcgtaattcttcactgagttctcgaaggtgttccataatgtccaccaagaagccaaagtcacaaagccattgtttgtctgagaagtggactgttgttgcccctactgaaaccaagaacgcttccatttcttttcttagagagaatattagttttaaagttttccctctcctaagccaattgttcagacatcgtccattaaccctttcaccatgctctgattcagattccgttagtaaagtctgaaattcaggtcgcctaacgcctctggtcttaatcaaaactatccattcggatatggtatttatgatctgattaacatctacatcataggagctcaacagttccaagtgaagaaatcctgaataatgaatgacattccaacagttggggcttacggccttttctctcatgtatgagacgagtcctgagttctcaccaatcatcctcaaagtatgggtcgtggtcagtccaaccattctctgcaagctaagccctgctgtctgcagggactctaggattgccgacatgagcgcaccaacactgaaatgatgagtcaggttgattatggtcagaagatcttcttgcacctccaactcagggcctacaccgcggataaagaccaggaggtagttctcataggccacaaaagcctggtcgtccaaggcaagagaataggctttaaagtccctggctcggttaaaaagctggttgcgtagattcctgtcaatgctcaggatcctctgccttgtgatatctggagataagtcaacgccttgcaggacgcttacatgctcgggcagtacctctctcagcaacacctccatgcactggtatacaaagtccccctcaccccagccgcgacccttcaaggccaagaggcggcagagcccgaggcctgcacgagcagctctctcttcaggagtgaaggaggccacgggcaagtcgccctgacgcagacgctccaccagggccgcgcgctcgccgtccgccacataccgctcgtagtattcgtgctcagcctcgtagtggcgcctgacgtcgcgttcgcgggtagctacgatgaggcggcgacagaccaggcacagggccccatcgccctccggaggctccaccaccaaataacgctgggtccactcgggccggaaaactagagcctcgtcgacttccatcttgcttcttttgggcgtcatccacattctgcgggaggccacaagagcagggccaacgttagaaaggccgcaaggggagaggaggagcctgagaagcgccaagcacctcctccgctctgcgccagatcacctcagcagaggcacacaagcccggttccggcatctctgctcctattggctggatatttcgtattccccgagctcctaaaaacgaaccaataggaagagcggacagcgatctctaacgcgcaagcgcatatccttctaggtagcgggcagtagccgcttcagggagggacgaagagacccagcaacccacagagttgagaaatttgactggcattcaagctgtccaatcaatagctgccgctgaagggtggggctggatggcgtaagctacagctgaaggaagaacgtgagcacgaggcactgaggtgattggctgaaggcacttccgttgagcatctagacgtttccttggctcttctggcgccaaaatgtcgttcgtggcaggggttattcggcggctggacgagacagtggtgaaccgcatcgcggcgggggaagttatccagcggccagctaatgctatcaaagagatgattgagaactggtacggagggagtcgagccgggct

SEQ ID NO: 29243 - DNA, 2300 bp, Homo sapien
ggagacgacagatcaccatttgatacctatcaggatcaaatattttttcatcttccttattttgctgttttagctcatcaacaacttctctgagggcaggaaagtctgttagatttttttcctcaatatgtctttgaaataaattcagcttaacttcgaaagtacaaatatggtcaaaggcagcagcagcaaagactttactaactcgtaattcttcactgagttctcgaaggtgttccataatgtccaccaagaagccaaagtcacaaagccattgtttgtctgagaagtggactgttgttgcccctactgaaaccaagaacgcttccatttcttttcttagagagaatattagttttaaagttttccctctcctaagccaattgttcagacatcgtccattaaccctttcaccatgctctgattcagattccgttagtaaagtctgaaattcaggtcgcctaacgcctctggtcttaatcaaaactatccattcggatatggtatttatgatctgattaacatctacatcataggagctcaacagttccaagtgaagaaatcctgaataatgaatgacattccaacagttggggcttacggccttttctctcatgtatgagacgagtcctgagttctcaccaatcatcctcaaagtatgggtcgtggtcagtccaaccattctctgcaagctaagccctgctgtctgcagggactctaggattgccgacatgagcgcaccaacactgaaatgatgagtcaggttgattatggtcagaagatcttcttgcacctccaactcagggcctacaccgcggataaagaccaggaggtagttctcataggccacaaaagcctggtcgtccaaggcaagagaataggctttaaagtccctggctcggttaaaaagctggttgcgtagattcctgtcaatgctcaggatcctctgccttgtgatatctggagataagtcaacgccttgcaggacgcttacatgctcgggcagtacctctctcagcaacacctccatgcactggtatacaaagtccccctcaccccagccgcgacccttcaaggccaagaggcggcagagcccgaggcctgcacgagcagctctctcttcaggagtgaaggaggccacgggcaagtcgccctgacgcagacgctccaccagggccgcgcgctcgccgtccgccacataccgctcgtagtattcgtgctcagcctcgtagtggcgcctgacgtcgcgttcgcgggtagctacgatgaggcggcgacagaccaggcacagggccccatcgccctccggaggctccaccaccaaataacgctgggtccactcgggccggaaaactagagcctcgtcgacttccatcttgcttcttttgggcgtcatccacattctgcgggaggccacaagagcagggccaacgttagaaaggccgcaaggggagaggaggagcctgagaagcgccaagcacctcctccgctctgcgccagatcacctcagcagaggcacacaagcccggttccggcatctctgctcctattggctggatatttcgtattccccgagctcctaaaaacgaaccaataggaagagcggacagcgatctctaacgcgcaagcgcatatccttctaggtagcgggcagtagccgcttcagggagggacgaagagacccagcaacccacagagttgagaaatttgactggcattcaagctgtccaatcaatagctgccgctgaagggtggggctggatggcgtaagctacagctgaaggaagaacgtgagcacgaggcactgaggtgattggctgaaggcacttccgttgagcatctagacgtttccttggctcttctggcgccaaaatgtcgttcgtggcaggggttattcggcggctggacgagacagtggtgaaccgcatcgcggcgggggaagttatccagcggccagctaatgctatcaaagagatgattgagaactggtacggagggagtcgagccgggctcacttaagggctacgacttaacgggccgcgtcactcaatggcgcggacacgcctctttgcccgggcagaggcatgtacagcgcatgcccacaacggcggaggccgccgggttccctgacgtgccagtcaggccttctccttttccgcagaccgtgtgtttctttaccgctctcccccgagaccttttaagggttgtttggagtgtaagtggaggaatatacgtagtgttgtcttaatggtaccgttaactaagtaaggaagccacttaatttaaaattatgtatgcag

SEQ ID NO: 29244 - DNA, 2300 bp, Homo sapien
cagagtaagacttcatcttaaaaaaaaaagaaagaagacaataagttacttaaatattacagacatttctcatgagcccctgtattgaagttgtattagtcatctcaacttatatattaaaaagagtataactggactccatataaaaatctccacttgagccgggcgcggtggctcatgcttgtaatcccagcactttgggaggccaaagcgggcagatcacctgaggtcaggaaatcgagaccatcctggctaacatggtgaaaccctgtctctattaaaaatacaaaaaactgcagggcgcggtggctcacgcctgtaatcccagcactttggaaggctgaggcaggcggttcacctgagatcgagagttttgacaccagcctgaccaacatggagaaatcccatctctactaaaaatacaaaattagccaggtgtggtggcacatgcctatagtcctagctactcgggaggctgaggcaggagaatctcccttgaacctgtgaggaggaggttgcagtcagctgagatcgcgccactgcactccagcctgggtgacaaagtgagactccgtctaaaaaaaaaataaaaaaaaaataaaaatctccacttaagtaattaattacaagccaccaagctagtatgtttagttttgttttacagtattctggcacagtacaataataggcccagttgtcctgtcaattcattctaacacagtagaaacaaaagccagtctgccattgcttctgttactactattacaagtgaaaaggaaaaaacatccccaggttcttgctccttctttcatctaccttccaattctcttcctttccttcagtggtcctttctacccactgttctctcagtcccattgccctgaatagtttatactttcacaataaatccctctagaaacctaccactccaaactgaagcattcttttttctattaacgtacggacgtcactaacaactgattttaacaaaataatctgacataacgtttaggtgtattttgggcttgtctttttggaagtttatagtctgcactcacttttccttccacatgtttcaaatctcttcccttcacattttttgtcacagttataagcttcaaaatccaaggatgacccataaaatctggtatcttcgaagtgcgtcctccgaaataaaggacaggaaaacactaagaggggtcactaatttaacaatagggtaatcagaagtcaagcccaaagtgcatcagcctgtcctaaaactacaaacgatttgttttgaaagaaactcaaaatgaattgtgcctttggatgtgaacagatgatttctggaatgaatgaaaagcaagaaaacagtaacacagtaccctctgaaaaaaggtttttctccccatcttaagcttttatacatcttttaacttcgcatgttctgcatacataattttaaattaagtggcttccttacttagttaacggtaccattaagacaacactacgtatattcctccacttacactccaaacaacccttaaaaggtctcgggggagagcggtaaagaaacacacggtctgcggaaaaggagaaggcctgactggcacgtcagggaacccggcggcctccgccgttgtgggcatgcgctgtacatgcctctgcccgggcaaagaggcgtgtccgcgccattgagtgacgcggcccgttaagtcgtagcccttaagtgagcccggctcgactccctccgtaccagttctcaatcatctctttgatagcattagctggccgctggataacttcccccgccgcgatgcggttcaccactgtctcgtccagccgccgaataacccctgccacgaacgacattttggcgccagaagagccaaggaaacgtctagatgctcaacggaagtgccttcagccaatcacctcagtgcctcgtgctcacgttcttccttcagctgtagcttacgccatccagccccacccttcagcggcagctattgattggacagcttgaatgccagtcaaatttctcaactctgtgggttgctgggtctcttcgtccctccctgaagcggctactgcccgctacctagaaggatatgcgcttgcgcgttagagatcgctgtccgctcttcctattggttcgtttttaggagctcggggaatacgaaatatccagccaataggagcagagatgccggaaccgggcttgtgtgcctctgctgaggtgatctggcgcagagcggaggaggtgcttggcgcttctcaggctcctcctctccccttgcggcctttctaacgtt

SEQ ID NO: 29245 - DNA, 2300 bp, Homo sapien
agccgagatcgcgccactgcactctagcctgggcgacagagcgagactccatctcaaaaaaaaaaaaagaaaaacctctcacattgaagactgtataagtaattgtaaccttggtcatgtggaaatgtagaaaagttcttaagttagataatctgaatatttcctgtggtatgttagatttggtttatcttttgcaaatcttattactgtaatcatgccagagactgatttttgctaaacttggattcttggagggattttaaaagtcccctgccatcatttctaaacttttcattttaagtgatttacttcctaggtcagatgttcatctagtaacttatagctctacccataacacattatcacattactgaacagcatttattccaacatatatttatttaggcatacactgtgtgcacttggctaggtacataggtagatttaggaaggccaagacagggcccctcttcttgcttacacatacgatgtttaaaaagcatgacaaatgtcataaaaatgcaaataaaatacagcaagggaaggacttataattaaggggagtcatgaaagaggtgaaaattgagcttggccttgaagcaagtcagaggtgggagaaaaggacccttacagtattggacagcagaagcaaaacctgggagatgggaaggcatggggccgcgttcagggaactagagggcccagtcccgtgggcagggaggctccacaaggttacacacagggttggtaggggctgctgctgaattggcagggctcctttctcaagccctgctcacacatatcatagggtaaagaattttcttctaactcttgctgcaagggatactgtagtaacatatatgctagagcatcttgtagtatatacagtccagaacctgggctgctgaagatgctgtggttgttgtgtgtgcatttgtattttgtaatttttttttggcagggggacggagtatcgctctgttgccaggctggagtgcagtggcgcgatcttagctcactgcaacctctgcctcccgggttcaagtgattctcctgcctcagcttcccgagtagctgggactacaggcctgtgccaccacgcccagctaatttttatatttttagtagagacagggtttcaccatgttggccaggatggtcgcctctatctcttgacctcatgatccacccacctcggcctcccaaaatgctgggattacaggcgtgagtcaccgcgcccagccctgtattttgtaatcttaagactgcatggtcctctctgtgccacagaggtactgcctgatggctcatactgtcatctctgacaggtgaagataattcattgtcttcttctgttctaggagatgccaatagacaaattagcgaatacaaatttaagctttcaaaagcagaacaggatataactaccttggagcaaagtgtaagtacttctatatggtactaagttatttaaatgtccttcctgcatctaagtggctaacaacccatgagtgcctgggttgcctttgcagttggatcaataatagttctgtattaaaatagaaaagccagcagagagcacttgttgggacattttagccttctgttttctctaaaaccataggaaactatagctatcagtttttgtagatatttcaggagaattcaagatcatcatttgtaataaaatcccttacgcattccaaaaagtgtaagaacttttccatttagtgtctcttcctatattgctttggcacttaaacaatatggtcataataaaacttagcatgggaaattggccctaaaatgactctacagctgtaatcctctctggggacattacttgatttataaatagcaactgagttctgagaggacttatgagtcacccttaggggacttgttagtagattacttggcatttataatgacattgtatttccatcctggctaccaaaaagtggtgacttctagtgcccagtactagaggcctatgttctcatacttacagattagccggcttgagggacaggttctgagatataaaactgctgctgagaatgctgagaaagttgaagatgaattgaaagcagaaaaacggaagctacaacgagaggtacttcttttaatatgtttcttggagaatacattcctaaaaagaaaaaatcttctggaaataattcttagctgtgtaagaaatttgatacttaaggaaacagcagtggagtcacttaactaatttgtgttggtttttgacctgcatagtgactgccatttacttttatgttttggtcaattag

SEQ ID NO: 29246 - DNA, 2300 bp, Homo sapien
agcttgtatgagtgccttaatattttaaactgataatcttggaccagccatagaaacccctcagatgtctcagtttaaaatataaattatttggcttttaattggaaaatattttattttagtattctttttttgagatggaatctctctctctccccaaggctggagtatagtggcacgatctcagctcactgcaacctcctgggttcaagcaattctcctgcctcagcctcctgagtagctgggactacaggtgtgcaccaccacgtccggctaatttttgtatttttagtagagatggggtttcaccatgttggccaggctggtctcgaactcctgacctcaagtgatccacccacctcggccttccaaagtggtggtactacaggcatgagccactgtgcccggccagaattttagatttacatgcagttgtaagaaattaaacagggctgggcatggtggcttatgcctttaatcccagcactttgggaggccaaagagggtggatcccttgaggtcaagagttcgagaccagcctgaccaacatggtaaaacgctgtctctactaaaaatacaaaaattagccaggcatggtggtgcacacctgtaatcccagctacttgggaggctgaggcatgagaatcacttgaatccgggaggccaaggttgcagtgagctgagatcatgtcactgcagtccagcctgggcaacagaccaaaaccctgtttcaaaaaaaaaaaaaaaaagaggaaatttaacagagatcctatatattctttgctcaatcttccccaaatgtaacatcttacaaaactatagtacaatatcacaaccaggatattgcccttgatatggtgaagatacagaacatttccatcaatataagggatttctcctcctcttgcctttttatagtcatagccttaatctccccttcccctcccaagccctaagaaccactaatcttttcttcatttgtgtagttttgctcttttaagaatgttataaaaatggaattatatagtatatgttaaccttttggaattatcccttttcactctgtataagtccctcaagattcttccaagttattgaatcacgagttgactcttttttaatttgaaaaattgtgctaaagtacaaataacataaaatttaccattttaactatttttaagtgtacagttcagtggcattgagtacattcatgttgttgtgctactgtcaccaccatagaactttttagtcttccccagctgaaatctgtacccattaaacaactccccattcagtcccttctcccaaacccctggtggaatggcaactaccattccaccttctgtctctgtgaatttgactgctctaggtacttcatgtaagtggaatcatacagtatctgatttatttcacttggcattatgccctcaaggttcattttgcagcatatgtcagaatgtccatcccttttaaggctgaatcatattccattgtatgtatataccacattcttctgttgatatatcaacacatctaccttttggccattgtgaataatgctgctgtgaacatgggtattcaaataactcttcaagactctgccttcagttgttttcggtatgtacccagaagtggaattgctggatcatatggtaattctgtgtttaatttttttgagtaacagttatactgtgttctgtagcagatgtaccattttacattcccaccactagtgaacaagggttccaatttctccatgtccttgccaacatttgttatcattataatacaagggcagtggtcctcccttgacttttaagacacattttcagtatggtcagtaactacttgtctctagcttcatttttaagatttacatttagtaacttaatgaagaaatatgtccattattcccaggttaaagttcagttcattagtggtcttgcctctagctccactgcggttctaaacaccaggagcccatgtatagaataggtgcgtatgaagaacttgcgtatctctatagcccagcataaactcacttccattctgaccaaagatatttgttccccagtacaattatgtggagaattaaccccttgcccaaaagttcagcccattatacacatccttttggcttccgggtggtaggatttgaggttaggtcagggataaagagttattttgaactctacaagcgtgtactttttaccctaaaaaaaatctactgtaggagctattgttgcacacaaacacaagggtagtggttatatggtcaggtaatacagagggttttagat

SEQ ID NO: 29247 - DNA, 2300 bp, Homo sapien
gtcgaaaggtatgtagttttgcagatactgctgtagtctcctttgtaagcattataccatttgcattctcaccaaaatgtatgagggcctatttctttccccatagttctgttctggaatatgttgtcaagtttttgaacttttgctagtattttgtttgtttccgtttctcttagtatgagtatcttttcatattcagagctatttctatttctttttctgtaaactgtccgtttccgtagcttattattctatgcagttagtgttttctttctttctagtttttgtttgtttgttttttaagacagagtttcgctcctgttgcccaggctggagtgcaatggcgcaatctcggctcaccacaatctccgcctcccaggttcaagcaattctcctgcctcagcctcccgagtagctgggattacaggcatgcaccaccacgcctgactaattttgtatttttagtagagacagggtttctctatgttggtcaggctggtctcgaactcccgacctcaggtgatccgcccacctcggcctcccaaagtgctgggattacaggcgtgagccaccgtgcctggcctagttttagagattctctgccattcaaaagttttatttatttatgtatttattttttggagacagagtctcactccgtcgtcaggctggagtgcaatggcaccatcatggctcactatagccttgacctccccaggctcaggtggtcctcccacctcagcctccagagtacctgggactacaggcacacgccaccaaccctggctaatttttgaattttttttatagagatggggttttgccatgttgcccaggcagggtcttgaattcttcggctcaagggatctgcctgcttcagcctcccagagtgctgggattacaggcatgagctaccatgcccagcccaaaatttttatttttatgtagtctaatttattgtaccattacctcattgcttgtggatttttgagtcattttttcagtaaagattgccccactccttggttacttttattcctgtacagtttgttctcccttcccttccctcttcccccattcactccctggctttctttccttatgtaaatctctgattgatttggaatttgtcctggtgtgtggtatgaggtatagttccaattttatctttttccaaatggatatccagttatcccaacattactaatttaaaagtctttccttctcattgatttgagatgctcttatttttattgtttttaaatatatttgtatatttaagtgggtttttcctgaattctctattctgctcccttggtctatattcatgtgccataacaacattgttttaattatagaagctttataatatgttttaatacctaataaggccggctttcttctttttcagtatgtatttttctggctactttttcttgtgtttttctttcaaatcaacttgctctgatgatgataaaagaaaaacctgatggtatttttatttgtactacattaaatgtatagattaatttagggagaactggcatttttataatgttgtgagacttttaatccaagaagacggtatgcctttccatttattcaatcctatttctctgtcttttgggaatgctttatataattttcctcatataggtttttgatatattttgtaagtttacatgtatgttttttatttaatattgattttattttgatattgcatttattattccttctttgaattttatttgtatatgaatgtcattgaattgtatatgttcattttataacctgttactttactaaattatcttttgtttttaataattttgccattgattagttcaggttttcctgataattatacaagatggaattttaaaattttcttaacttttctatagaatacacaatttttctaagttactatgaatcaggagtttgggcatgtttctggaggtcatacttaacctctgtgttgtattgtgtatgttcaaatttcttgtgtgccatgacctgtgtaaatgatattatttgtttaataacaggagttagaaaggcagaaacatatgtgtagtgtgctgcagcataagatggaagaacttaaagaaggcctgcggcaaagagatgagcttattgaggtatgtacatgaactgtgggaatacttaattttgaaaaaaaatgagttgaatgggatgaggatgtgttgggagggaaggagagttaagatgcatcagagtttgtctctttatatttgactgtacactacaaattttcaaacataaaccagattatg

SEQ ID NO: 29248 - DNA, 2300 bp, Homo sapien
tggtcctggttcgaagagcctgggcaggaaccgtgggacccagagaagccacccgcccaaggccgcctccggcctccgccccgccagcagcccagggccccgccctaccggcagccgcgcctcgccgccctccctccagcttggccctaacggctcgcaatggcggaacagggagccaggggcatcgccgcttggggaacctcacccgccggcccagggctcagctcgccgtgtgacagccccgggtactttgcccagcggggtgcaagcccggaccgcggcaagcgccactcccgggcagtcgcggccacaactgcttccgggtgagtgggtcgtcgaccctgtggccccgcccatccttcgcctcctcagtcggccgctcaggctgcggctcctcccggggccggttcccgctgtctcagccgcggcgcagagggcacatcggcctgaccgactagccggctgccagtgccgggagccgccgcgtccatccccgcccgcctggccggggacccaggactgagtcgtccagctgcgcccctcgcccatagccccagcgggcgccgggcgggcgagcagctcttcggcccttcccggacagcgacgcagtcgcagcgcgcgccctaacacaggtaagggccgctcctcccgccagcccggtgggagcagggagcggggagttgggaacctttttcccggcctccgcagtcccgtgggatccgcgccgcctccgacctcggctagggggccgggcttccctggggactggccggcccgcggcgggctcccgggctggggtcgccccctgcctgcggcgttctcagacatcccgtctgatttctaacgctcacccttccaccgcgctggggaaaaggtacgtgttattcccactgtgggagaaattaaattgggcagctgtccctccgtttcgggtgccctaggcgccttctcttcctccttagacgccacactacggttctgtcccaggacgagcacccccagggaacggtgtcaggacggtgtagggcgtagcattttttgggaattttacttcttcctccttgacctgagctggatcgcgcgggtttaacaggcgctagctgggttaatacttgactaatacgaggcgttattgacacccagattgttaagttacagaactccagtcagccctgcctgtgagtaaccagcagcatgcaggaggacctaaggaaacccacttctttttctttcttagagggaaaaaagttcaagtgtttgctttacttttttcaccgtgggagatacaaatacaggctgctgagacatggctagataaatattgtatcctaaaccttaactgttagtagctggttttctttgagtttccatttagtgactcagcgtttctactataaacagaaaaattgtagagtggattgattgactaaaaatgatatgtaaggataaaggtgacttaatttttttatgttgtcataatgggaagagaatgtggatgtagtaatgaaacaagagagaaggagagcggggtatggatgtataagttcttaatcagtgtttaaaataatattttttcaagataacattttattttgaggataaatctatatgaaaaagtgcagttattggagaatgcagtgttgcaaatagaattagttggcagggactccacggttgttgtggtttgaatatcttgcagcactaaccctgtttaaccaacgtcatgctctgtttaacagatgcagagataatgacctagtattataatatgtagaataagaatttcagaaagtgtgattcatttcgaaggtagatcactcactttgtgaatcattgctatgaatctgaaaattgaaatagaggaaacctaagttcgtatctgcctaatgagatggcattctttactcattttataggaagtgttgtattatgttttgttaggtctgttgctggatatttatcatcgtgaagaatggtaatgaaataaaagttgaagtatttgcagaatgctggaatttagaatagtttgttggtttataagtgattgctttgattttactccttcccccccttttttttttgccagatgtgggaagataaatgaaggggtctagatgtaaatgtcagtggaaaggagagctaccatcactaaggtatgaaaatgttcactgaaagaatttgcactatacaaaatagtcttttgagtggaaagcatcacccatttttgtgattctgtctttaaaaatgtagaatgaaactacatgagttattaagttctgttctagaagaaagtgtgtatt

SEQ ID NO: 29249 - DNA, 2300 bp, Homo sapien
cagtgtgaaacacagtattaccgtgtttgtgaaagacaacttttgtgaaaaccacaaaaataagtatttgctcttaagaaaggaaaaaatttattgcttggcctcatcaaagaaaactgaagaatttgctatgaaaggaacaaaaatgtacaaattgtaccacctcaaccccccaaactgtataaacaactgcaaaattttccttcatctattgatacaaccccagagaagccagtcctcacagacctgggggcattcccatgtcagaatattccataaagatctaggaacacatacatttggcagaaataaatcaattaaggtgcagggaaagattgcccatgaaataatttatggtgatgcatttagtagggccagagagatctgagttcaaattttggctcttccagctactagttttgctaccttaggtatgtcacaatctctctgaatctcaatgtctttgttactaaagtgggtataatgatacccatatctcaaggttagtcctaatactggaagcacaatgctgtgtaaatagaaggtgattaagtgttagctacctcccagtcccttttcccagaaacacaatgcaaaatatttctgctggtttgcatgaatcaaaacaagtggctaaggagaaaaattaaaagggcaagagaatctaatgtattatccagacaatctattaattatgtcgttaatatttaatacgtgttgggtttttggtattattcaggtactgcatctgaatagatcctctcactttgtcttcaacaaatttggcaaaagatgtcattaatcattttattcagatcacaacatgccaacgtaaaaatcatagttttaatgtttactcatgactctgagaaatatagtgacatagaaacagtgaaaaggtaaagaatttgtctctcaaagctgatgggtataattctccctgtctctcgaacctcccccattagtgccacagtgccagcccccataaactgtaagggtgatcaagccttctgaaattgcaggggaagtgggcagcacagaaacagcccttagaaggctttagagacaggtgctcaacatggaattagtgggcttattcagggggttctggaatctgcagtccctgtatgtaaagtcgtggttaggtgtatttcgtgccttttttgtcaggaggctcctcaactatcacttcctcctagaggtcttttttagccatcctatccagccagaggcttcgtctacaaaatctttttcatcactctgtgtgtttcctgcaaagccatactacacctgtcattaccttgtttgtttgcttcagccagtctattccactaaggtaagcttttcaaatgcacgaccctggtccttccccagtgccttgaacctggtgggcctcgttagatatttccggaataaataacaagtccgtgtctatcagatttttaacagactctatactcctccctccatcccgctccccgcccccccccccacacctctcgcgcaagcattcttctccagaaataattttaaggtcatgcgtcttcatttttgaaacgaggcttgggcatttcgaccacacccaccctccctccctcgcatactcgtttcctaacagagcgctactccagcccacttgcccaagcccaccaggccgcagggtttggggcaaccaggggtggggcagccctgaaccggaacaagtgtcaattcacattacccgcactggtcctggttcgaagagcctgggcaggaaccgtgggacccagagaagccacccgcccaaggccgcctccggcctccgccccgccagcagcccagggccccgccctaccggcagccgcgcctcgccgccctccctccagcttggccctaacggctcgcaatggcggaacagggagccaggggcatcgccgcttggggaacctcacccgccggcccagggctcagctcgccgtgtgacagccccgggtactttgcccagcggggtgcaagcccggaccgcggcaagcgccactcccgggcagtcgcggccacaactgcttccgggtgagtgggtcgtcgaccctgtggccccgcccatccttcgcctcctcagtcggccgctcaggctgcggctcctcccggggccggttcccgctgtctcagccgcggcgcagagggcacatcggcctgaccgactagccggctgccagtgccgggagccgccgcgtccatccccgcccgcctggccggggacccaggactgagtcgtccagctgcgcccctcgcccatagccccagcgggcgccgggcgggcg

SEQ ID NO: 29250 - DNA, 2300 bp, Homo sapien
ctttctctaagtgatatcttggatcctttttatttattatttagaatagttggctttgatagggcccacatatatgtacaaacacagatatatgcatatatatgtatacatataaaattgacaaactttgatgcaaaattgtgaaaattggggggaagatgtatattgggcatctggagctgaaagcagttgaaggcctattgaacttccgtcagttgagagttaagtactctttttatttttattttgagatggagtctcactctgtctcccaggttggagggtagtggcacgacctcagctcactgcagcctccgcctcctgggttcaagcaattctcctgcctcaatctcccgattagcttggattacaggcatgtaccaccagacccagctaatttttgtatttttagtggagaccgggtttcaccacgatggccaggctggtctcgaactcctgacctcaaatgatctgtccgcctcggcctcctaaagtgctgggattacagatatgagccactgtacccggctgagagttaagtactcctgaaaaacaaaacaaaacaaaacaaaaaagcccagaaaaaactctcagtaactatataaggcagtggtccccaatcttttgggtgccagggacctgtttcatggaagacaattttttcctgggggtgggggctaggtggatggggaaggatggttttggacgattcaagtgcattatatttattgtgccctttatttctattattattgcattgtaatatataatgaaacaattacacaactcaccataatgtagaatcggtgggagccctgagcttattttcctgcaactagatggtcccatctgggggtgatgggagacagtgacagatcatcaggcattagattctcataaggagcataacctagatccctctcatgcctagttcacagtagttccagctcctatgagaatctcatgccacagctgatctgacaggaggtggagctcagacgataatgtgaaccatggggagcagctgtaaatacagattaagcttccctggcttgccagagattcacttcttgctgtgtagcccggttcctaacaggccatgggctggtacccgtttgtggcccgggggctggggacaccttacatacataaggtgttcactacgagatataagaggacttagcccaggtgttaaggcagtgttccaggccccactgtggctctaatacatttagggatcagaatatggactctcgagagcaggttgctcctattattgctggtaaacaaaatttgctagaacgtggagatcagcatatactgttagattctgataccggagacaatgtaagcagtttcagatgatatcaaaggtacagcatgcaaaagtgggttgctgaaatggacctgaggattcacaggcagccaaagttcagggttttagataaatgaggcacataaacattaagatcttgtaggatgattgcaggtgttaggagtaaatttggactaattaggaatctgtgtcttccactaggctgtaaattcttttaacatctccaaggcctgataaaggtttttgaatgaattcgtgaaatacacgatttcggtgaagaaaagaataaagcaggtgtccaaacacttgaggttttacagtattggcataaaacatttggacccctggcgcctggtatcagggacttcccgacgctggaagagttcagggaagggaagcgggcccctctggcaccgaagacacagaatcctagctacagctactaaagaaaagaacactatcaattagggcccgcgtcaggttctctggatctccccttctcccatccttgacgctcatccctgtgttctttgcggtgggcccgtcggccctgctgccatcgatagaagcagcactctccccgtctgatttcgcagggccaaagcccaggtgagagtcagggtagtgttcagactagcccacgctccggttctgagccgcgacggcggtctccgcacgcaacgaaatcaggcaggaccgaaccttgcgtcctccagtgcagcgagttcggaagcgaccggccgagcgcgcatgtgcgggacccgacattgtgcttgtcccatccggtgctccgtagttagcctctgtgagctccacgtaggccgcgcaagcgcccttggcgcacagttcacctgctgccgttgtcgtcgccgccgcggctcccggggctggatggggggccgaggccagccagtggcacccggaagaaagagacgcggcggcggcgacgccgacaccctcagga

SEQ ID NO: 29251 - DNA, 2300 bp, Homo sapien
tcgctctgtctcccaggctggagtgcagtggcacgatctcagttcattgcaacctctgcctcccagggtcaagcaattctcctgcctcagcctctggagtagccaggattacaggtgtgcgccaccacgccccactaatttttgtatttttagtagacctcaggtgatccgcccgccttggcctcccaaagtgctgggattacaggcatgagccacggtgccaggccagaaatgggattttgccatcttggccaggctggtcttgaactactgagttcaagcgattcaaagtgctgggattacaggcgtaaggccaccataccaggccacattttttgtttctaagatcacaacaattcacaagcaaggagaaaaatatatggcaggcagaaagaaaggttacaaaataattatcaaaagtagaccacgaatggccaggcgcagtggctcacacctgtaatcccagcattttgggaggccggggctggcggatcaccagaggtccggagttggagaccagcctggccaacatagtgaatatacatataatccaaaaggattattttaaacctttcgtacacaaagtgattttatttgatccagatgccctgtctcaccagaagcattaagctatagaaacagagctcttatatcttagtttgtgactagcttattattactaaaaacctctttgttaatgaacaaaaacaattcattttcacgaagaaaagctaaacactacaaataagaaaaagcacactcaataattcaccagcaccttaaagtatattcttcttaaactagttttactatgtgtgtatataaatacacttacatacagattctttttcccaaaactgggatcacattttacctgctgcttctgtcttttaacacaaatatccttctgtgttaatacttttctgaagactctaacactagctgcgtaacattaggcaagttacttcacctcttcgagcctcactccttcatctataaaagaggaattatagtattatctacctcacaggtttatgtgagattaaataatctgtgtaaatactaagcaaaatgtctggtacatactaatgacacagtaaatgttgactttttatggctgcataataacctatgaagcataactaattgcctgataaaatttaaccaattctctattgttggacatttttggctagtttttaacctattaaaacaacattgacgtgaaaatccatagagctaaatctttaatacaacctaaattttcttagaataaatttctagaaatggaatcctggctcaattacattttatacattcccaagtggaagtgccttacattcactaacatgcccatttcctcacattcctcatctctacctcacttttaaagtttatctttgtttcttaattaacagtgttttgtaaaattgtaaatgactgcaatagatggtatgaaaaggacaatctttaccatttaaattttaattaccatttgcacttgagaaaagaagcaacccttcagtgttgtgttctgatgtttttctcaagcactgttttactacacatgagctttacatttaaaaagaacaacttcaatttatagtttcagaataaacctaatgcaatcgttgtatgttaagaatttagaaatgcctccaagttagtcaaaactcagcttttcttgcaaccgcaagcaaagaccaaaaaccctaaaattaagggacagatctgctcagtctgttgaaattcaaaaaggctgggaagaaattaagcagaaaccgacgtcttcgctgttaagaccctgtgctgccagcatcgaaacatctccagtgaacgcttaggaaattgtttctttaaattaatactacttaacacgcctccttttccctggaaacgcatttcctaaagcaacagcattcctgaaaaacaagcataaccctgtccgcagagcagcaagacttaaaaagcagagcagagctccggacaggcagagtgtctgcccctccgcccgccagtcccggattaaccaagttatgcgaagtgactaactcgtgacagcctcgggcgctggacgccggccacgccgccacgtctttcaggtcccaccgctcctaccagcagcctgacccaggatggctctactccccagccttcaatccctggacctgggtttggaattaggagacttccgtcgagggtcaattgtgcgggatcctggccattccatacaaaatctcacgactggcaaaagagagggggacccctcgagcagaggtcagatatcacaagggacccgg

SEQ ID NO: 29252 - DNA, 2300 bp, Homo sapien
ctgatattctgtcatagcagcacagaacagactaagaaagccagtctgtcagtgttcaagttctggcttgaccatttgctcactaggcaagggaactaatctgtaagcctcatttttcccatctataaaatgggaataataatagcatctacctctaagcgtggctgtagattgaattactacttataaaatgcttagaatggtgtctgaaacacagtaagagctcaattaaaattgtctattgccagcctcttgttaatagcttataagattgaaattattaattattaactattaacatgcaagagtgccaggtaaaatgcaggttgaacaaaactaaagccaggcacttttgtggttggccacaataggcaagatgctaatgactatggtcaccaactgcccagaaccaacccctgccaatgccaggaagaccttacagagaagagcctaagccaaaagaggtgcccacgttcgcctggaggttggcaaagggaagactcattaaaaaagacaagcaaagactgcagggaggggcttcaccaatctggctgtcctttccagcccttgttgttttctcacacactgtcctgccttgagagcaggatttccttcctttccctctgacctcagaggcaccccactctaagtgggtctatttcatctctctgtgccctcatcctgcagggatccttgagatgctgtgtcaagctgaactctagtgtttgcaaagctaatgatcacttggagcagccagggcttctctggggcaggcccgaaggaaagctcaggagggggcccctgctttaaccttggctctaagtctgttggagaaaactcaggatttcctgagcctaaagccagaattgccatcaggttctctattagtcctatttgtgttctattagtctgttggtgaccaccttgctgcattaccctgggataatccaggcttgttttgctctaccctaggtctgtgaggtgaatggctgcccagtaatcctactgccagtattcaatgagaatacacatgctcactttgttcctgcctgtgtcaaccgtagcagcttcgcagtcttaaccactgggtctaaccttcttggccttttccttttacctcaactctgctcagtctcgaacttgcccttcattcctgacctttgattatattctctcagagttaaccctaattctggcctccagggctccgtaactattattcacaaccaacccttggacgaagcctgatcccagctgtcccaaggaatcatcctgtttggtccagacctgacccctggatcctgccccatcacaggctcttgaggctggttggggagggaatggaactggttcatggggcctggttgtatgcttgaggctgacactgtcatatataatgaacctaagcccacatggcactgtccaccccagccatggctgaatcagaggggaggccaagagtttgtgagtggagcaccagatgagtctgatagaaactttcagacccctgtaggtggggagctagacttgagcttcttacataaacccaggaggcactgaagactggtccatccattaaaccagaagtaaaaaaaacaaaaaccaaagaccaaaaccctctgctatccagtctgggaaagcagaagaagctgcactttgccccggtcagtggatagaagaagagttgcctgtgagcaattcgaggctgagcctgaactgtgtgcgtgtgtgaagttcagattcacaccacgtgagtgatgcaggaacataaagtcatgcaggaactccaggcaaggagtggaacataaacactgccctgaagccctcagaatcccagcataagctgatgagaagctaaaagatgcctgcatatcccagggtgctggaacttccatggagaatcaccctgctgaagacgagctagcgggaaagattccaagccatgagaagaaatgaattcgtgagagggagcagccacagacacacaaataagattgcatcccaagaaggagagatgataaaacaatctggaagaaaccttaacataggtacacagaagaaagtgctggtgtcatgagagccaagaggaggagcacctaactgatcattgagagagtgacacctggtcttaggcttagaagaggagtagaagagagccagtgaagtcagggaaggcttccaaggcaaaaggaccagcaaaaggtaagaaatagtccagtttgtgtgaatgtgagcccacagcaagtgagagctgctgacgaagtgtgaggcaagtgcgggaggcgaggctagaggcagat

SEQ ID NO: 29253 - DNA, 2300 bp, Homo sapien
acatctgctccattgatttactctgtattagacctttcttgaaagagttgcctgcactctctgtctccagactcttgccacctttctttctgaaccacttaagtcaggggttcaccccacaattacactaagacgactcttttccagatcaccagtgacctccatcttgccacatccactgattggttctcagtgttcatcttgctcaaactctcatcagcatgtgacagtttgccactccctcctcttgccttctgggtgttctttctcacctctccccactggccgctcctttcgcagtctcctttgctgccaacactcattccccaacctctgtaaagtgccctgaggatcactgctgaagcctctccccatactccctagacgaactcattcagtctcacggcttcagagaccactgaagggctgacaactcccagctatacatctccagctcagagttcgccaccaaactccagccgtgtctatgtaactgctgagttcacatctccacttgaatgtttttatcagtcagctcaagttgccataacaaaaaaaccacgactggatgaacaacagaaacttattttctcacagttctggaggctggaagtctgtgatcaggttttaggcagtcttgctttctcctgaggcctctttttctgacttgctcatggccacttccatgtgtctgcgtggccttttctttcatattggattaggaccccaccctcatgaccaatttttttttttttttgagacagactttagctctgtcgccctggctggactgcagtggcatgatataatcacaacttaatgcatccttgaactcctgggctcaagcgatcctcctgccttagtctcctgagtagtgaggactacaggtgcatgccaccacacccagttacattttaaattttttttgtagaaatagagtctctttatgttgcccaggctggtcttaaactcctggtataaagcaatcctcctgccttggtctcccaaagtgctgggattataggcatgagccactgtacttggccttaatttaatcttaattaccttgataaggccctatctccaaatacagtcacattgggagctaggacctcaacataaaaatttggtgagggcacaattccatctgaaacggatgtccagtgggcaccttgtcttcttggtgaatggcagttccctccttctaggtgctcaggctgaaatcctagacgcccctctttctcgcttgctgcacatttcaatccaccagcaaatcctgttgtctctgctttaaaaatgtacgtggattctaactgctgctttctgctttcactgccatcaccctgatccaaaccatcatcattttaaaactgtattaagaaaatggcctcttgcactgtctcctgtttctgcctttggcctttaaaatcttttatcaatgtgccagtaagagtaatccttctaaaacagaagtcaggccatgccactttctgttcaaccccctgccacaggagatcccatctcattcttttagtgaccagaaaagccctgtaggacacttctctgattgcctagcattttgcggcttgctcccactactcagccacactactctccttgcagtaccttgaggcacgttcttacctcagggcctttgcatttgctgttccctccagctgaaatgctcttgcactggatattatgtgttgtgtttccatcatctttgtcagatatctgctcaaatatgacattttcagccaggcgtggtgggtcatgcctgtaatccgagcactttgggaggccgaggcgggtggatcacctgaggtcaggagtttgagaccagcctggacgtggcaaaaccccgtctctactaaaaatacaaaaattagccaggcatggtggcaggcacctgcgatcccagctactcgggaggctaaggcagaagaatcgtttgaatccgggaggcagaagttgcagtgagctgagatcatgccactgtacaccagcctgggcaacagagcgagactccatctcaaaaaaaaaaaaaaaatgacattttcagagaggtgctctttgactatcttacaaaaaatagtgctcccactcttgctgtgcaaactcaatttcctgtatcctactctacgtattttcgaagcagtcatcgccatatggtatactctctctagattattttcttgggcatttgcctattgtcaccttttcttctcactagcatgtggctccatgagggcaaatacttaatctgttatgttcactggggcatctccagaacttgcctg

SEQ ID NO: 29254 - DNA, 2300 bp, Homo sapien
gtaaaagcagttctcctgcctcaacctcccaagtagctgagataacaggcgtgcggcatctcgtctggctaatcttcttatttttaatagagatggggtttcaccatgttgaccatggttggccaggctggtctcgaactcctgacctcaggtgatctgcccgctttggcctcccaaagtgctgggattaaaggcatgagccaccgtgcccagctattctttttctttcttttcttttttttttttttttcagatggagtcttgctcagtcacccaggttggaatgcagtggcgcactgtcggctcactgcaagctcgacccctcagcttcaagcgattctcctgcctcagcctcccaagtagctggaattacaggcatgtgccaccatgcttggctaattttttgtatttttagtagaaacaaggtttcactgtgttggccaggctggtcttgaactcctgacctcaatccacccacctcagcctccccaaagtgctgtgattacaggagtgagccactgcgcccagccagttcattctttcaacaatgtttaagcatctacctaagcctggcactgagctgggccttgggggctacaaagatatctaagacttttttctccttagagagctataccgtctatggagagggacagagagcccccaaaatgatgaacatgttctaagtgttgagatagaggcatgtgaacactctttggcagcccagaaaagaaaggggaagaggaaatggcacagaaagggtgaggcaagaactggcctggaagtctaggatggataggattttgccagttgaagaggggtaggcacatttcaggaagaaagaacagcgttggagaaggcacagatgtgtgtgaaaacccctgttggacacgttcaggggacagctagaagttgtgtgtggatacattgtagggtttgtgggaagtgagtcaggaaaggggcataaaatggggctggaaagagagatggagcctccatgtgaagttatgctaaggagatcgggctccatcctataggcaggagtaggtggtggggggcaacgggaagttttcaaccattatccaaactctgttgtagaattaaaaagtggaaagaagagaacacaggcagggaaaccataatagtgtggtcagacttcaacatgatagcagtcaattcagtaggaatcttgaatttgagtagtcaagttcatagagacagaaggtaggaaggtggttgccagaggctgggggtggggatgggggtagggttagggggaaagaggagttattgtttagggtataaagtttgttttccaagatgaagagttgtggagatggatggtggtgaaggttgcataacatgcatatacttaatcccccgaactgcacagttacaaatggttaagatggtaaactttctgttatgcatatttacaattacacacacacacacacacacacccttcagtgcacgcaaaccctgctggactccaaccttcagagcttccgatttagcagggctgagtgggacctgaggatttgcattttctgacaagttcccagatgacgttgatgctgctggtccggagaccacacttcgggaatcactggtgtacgagaccaagtgactagaatatggaggggtgctctgctcgcttccacgtggctactattgttatgaacaacaacagccggcgtttactgagcactgctcctacagcttatctcacaactgggtgaaggagcagaggatgcgcagggctagaacctggagtctaaactcgtccttcacccgggttgctctggatcttactggttgtgagacagggagggaaagagagacaaaggcagggagacaggcccagcagggccggcagagcctgtagtgacggaggggagcagccttatctccgggaacccgagcgccccgtgcgcggcggggagggggcagttcggggcgccccggcgggtcccaggggctgactcccgcccgggaagtgcgcgcagggctcacggcccgcagggggcgctgccgcgccgtccagccgccgccgcccgggccgcccacctcgcgggcgcgcccctccgcagaccagcgccgcccggcccgggacccgctcgcgcagacttctcgggcggactgaggacgccgccgctcggggccgcccctgtgctcgccttcagcgcccgctcagcccgccgtccgcgccccggtggcgggcccgacgcccgcattccgcccgtgtccaggcgcagagctcccgccccggggagcttcctggccgtcggcgggccccg

SEQ ID NO: 29255 - DNA, 2300 bp, Homo sapien
gctgatggactatttgggatgcttcatcgaccaggcagcagagatgctaatctttgtggttatgaccaaaaactgtagaaccatatccccaggccctccccactcagcaatctctggaagatccttctctgaccccttagaattcagaagtctttttcttttttatttttcttattttagaaaattgatttcaccaggtcccaggtcagccacaccctcataacaaatgtgaagagcattagaagttagaacaagggaaatgctagctgccatggggccctaatgtggtctgtattagggagtattgggagtccgtcccagtattgtggtctgtattgggaggattaagaagggcatgccctggagcctgggctattacactagggcttgccttcctgactaaaagggcacttcttcaactatcatggatctaccccatgaggtgattcactggggtcccaaaggtgcccttggaaaagcagctactcacacgtgagcacgccccaagggcaactggcacctggtcccgcccacacacacagagccagaatgccagtggaggtcctggatttggagcagaacgcccacctcttgcctaccaactaccttttacagcagctcccctggagtgcctttccacctgcctcggccgcagaagccctgtcccaggactgtctcccacacctggaccctcatggggctcctacaggtacagagaccaccgatgtctgcgggctgaccacaggccaaaggctcttccggaagtgtcctttaatactttggagaggctcgccggttcccccggtgagcacgggacctgactgcatcagctccaggatccaggagatgtggggaagtgagaaagatcctgtttggcctcgcctgctggaagccacagaagagctggacatgcccgcaaggcctgaagtgcgcgcgcaacctagcaggcggaggcaagcagctcttcgcctcaggccgcccactgaaccctgcccaccgacgtcgcgccctgtaggccctcccaggccctcctgattcgtggagagcgcgcgcgagcgctcctgccccacccccgagcccgccctcctgcggcactaccccgcccccccggcttacggggctgcagagtgtggcctgcaagttggaagcgcaggacgcgggcgtccaaaggccccgacgctcccaggctgaggaggcactttgtcgtctctcccacgctctggccgtcgtcctaggcctgacagtggccagctgccttgcacaagcacagtccctgccagacttggtctgccaccagcgccttccgctcttctgccctcgacggactcccccggtccccttgctgcacagcacccgaaaatgcccactgcccaggcccctctcagtcacgacaccctcacgtgcaggaggttggtccttcaggacccgccgcccctcacgcgggctctggggccgaatgctgacgcgagtcccgccagcatccgaacaacctgagcctctggcccggtccgcagactccctctctgcacagatcactcccgatcccgctcactcctgggacccctcaagctggggagcgcagccctgggcctctccgaaccttccccacgctccccggtctccatcacagcagcgccgcgcccgggcccctctgcgggccgtctgggtgtcactaccgctcctgggcagcccccacttctgcacaccgcttccctccgcactcacgtcccaggcccctcggttccctcgcctggacgcccctcgcccagcaccttcccgagacaccctcacagcacctccgccagcacttcccgcgcctcctcgcggtaaatatccctcctcgggcccccttcctcgctcctgcctccatgccatgccccctcggcccccgggctcccacactgcacccttccgaatccttccagtgccccccacgggcccccgcgaatccccccgctcccctcaccccacccatctgcctcagactcctccccacatctctcacaccccaggcctctcacctcactcattctgccaggcccccctgacacccctcacttctaaccccccgagcccctctgccgtccgctacaccccgagcccctcaccccactcaactgccccgggcccccgcgcgcgcggccgccccctcccgccctccactcaccctgtgtcggccccgctcccctctcccccaccaggcgagcaggcgagcgggcagagcccgcggcggaggccggtccccgggccgggacacacccacccgcccgcccttcttctttccctcccttcctttctcc

SEQ ID NO: 29256 - DNA, 2300 bp, Homo sapien
ccagaatgccagtggaggtcctggatttggagcagaacgcccacctcttgcctaccaactaccttttacagcagctcccctggagtgcctttccacctgcctcggccgcagaagccctgtcccaggactgtctcccacacctggaccctcatggggctcctacaggtacagagaccaccgatgtctgcgggctgaccacaggccaaaggctcttccggaagtgtcctttaatactttggagaggctcgccggttcccccggtgagcacgggacctgactgcatcagctccaggatccaggagatgtggggaagtgagaaagatcctgtttggcctcgcctgctggaagccacagaagagctggacatgcccgcaaggcctgaagtgcgcgcgcaacctagcaggcggaggcaagcagctcttcgcctcaggccgcccactgaaccctgcccaccgacgtcgcgccctgtaggccctcccaggccctcctgattcgtggagagcgcgcgcgagcgctcctgccccacccccgagcccgccctcctgcggcactaccccgcccccccggcttacggggctgcagagtgtggcctgcaagttggaagcgcaggacgcgggcgtccaaaggccccgacgctcccaggctgaggaggcactttgtcgtctctcccacgctctggccgtcgtcctaggcctgacagtggccagctgccttgcacaagcacagtccctgccagacttggtctgccaccagcgccttccgctcttctgccctcgacggactcccccggtccccttgctgcacagcacccgaaaatgcccactgcccaggcccctctcagtcacgacaccctcacgtgcaggaggttggtccttcaggacccgccgcccctcacgcgggctctggggccgaatgctgacgcgagtcccgccagcatccgaacaacctgagcctctggcccggtccgcagactccctctctgcacagatcactcccgatcccgctcactcctgggacccctcaagctggggagcgcagccctgggcctctccgaaccttccccacgctccccggtctccatcacagcagcgccgcgcccgggcccctctgcgggccgtctgggtgtcactaccgctcctgggcagcccccacttctgcacaccgcttccctccgcactcacgtcccaggcccctcggttccctcgcctggacgcccctcgcccagcaccttcccgagacaccctcacagcacctccgccagcacttcccgcgcctcctcgcggtaaatatccctcctcgggcccccttcctcgctcctgcctccatgccatgccccctcggcccccgggctcccacactgcacccttccgaatccttccagtgccccccacgggcccccgcgaatccccccgctcccctcaccccacccatctgcctcagactcctccccacatctctcacaccccaggcctctcacctcactcattctgccaggcccccctgacacccctcacttctaaccccccgagcccctctgccgtccgctacaccccgagcccctcaccccactcaactgccccgggcccccgcgcgcgcggccgccccctcccgccctccactcaccctgtgtcggccccgctcccctctcccccaccaggcgagcaggcgagcgggcagagcccgcggcggaggccggtccccgggccgggacacacccacccgcccgcccttcttctttccctcccttcctttctccttccctccctctctcccgccctcccgccctcccgccctcgctcgctccttccccctcgcccgcccgctcccgcttccagcggcgccgggcctcccgctccgcctccccgtgcgcggctctcccgggcgcggctccggggttcatggtgacgaggcggcggccgctcgagcccagcggcggcggcggcgggagctggggcgcgggcccgggccgcctctcccagagcgcggggccgggcggcgggcgcgcccaggcagcggctgcgagcgcccccccgcgccgcgcccccgcgccccccgcgccgcgcccccgcgcgcttggcttgcggggggccgggcctgcgggcggccgccgcgccgcgcacccatggacggcccggccatcatcacccaggtgaccaaccccaaggaggacgagggccggttgccgggcgcgggcgagaaaggtgaggaggggcgcaggcggccgcgggctgggggcgagcgcacaccccgcgccgctggagttcactgccgggcgccggcatgggcctgggggaggggtg

SEQ ID NO: 29257 - DNA, 2300 bp, Homo sapien
tctgcagacacatacaatgtttgtggtctacgaaactgcaaacaggttgacaaatgcccaacctgagggtacctgctggttccttccgtttttctgacgggcttgcccagtggcctctgcctgaggagaggcagaatattcccctcactcccacgcagatttctagcaggggctgcacacctcacccactggcacagcaaaggtgggagcccctagaaagaaatctgactcatccccaaagccggctgtggccagctccggcctggagaggggtcaggggtcctggtgggctgcacctgacctcagtccaggtgttcacgaggcgcaggacaggaagagaatgaggcaagctttagtcaccagaacaaaagaagccagattccttgacccttcaaaacagtctgtccaagtcccaacacactagaggcacagaaagttccaggcatgcaagagagggggacacgccaagtctctaagtgggaacacagacaccaagagaaaggacaaaaaggaaacagaatggggggctggggtcaaaatgtgccaaaatcaaatcaggcacagaagcacagtgctggctgagcccttggccagctctctgggaggggacactcctggcactataagggatccacaagtgccctttaaagctgggtcctaaaagggccctggaagggccaggccttgtaagtcctcccaacatgctggtggcccggagacagcaaagagtggagaagggagaaagcggggatggctccgaactgcctcttctcccccccagactccagcacttgcacaaccaactaaacacacccagacacatggcctcattgtctgatacacaggaaggcacacacatctgtacacacaggttcgtggttaggtgcactgatgcacacagcctcattgtatacaatttacacacacacacgccctcccagtagatgtatacaacacattcaatccgccagttgggtggtgtagtcacacaatcatacacactcacaaactctgtcaggagtgaacaggcatagaacctctccaggctcatgctcacgcacacacattccacaacccctcagtcaggcccatacaaacctctaatacacacaacacaaactcacagcctgtcaggaaaaaaagcactcacaacatctccgttaggtgcgcaaacccttacaatctcacaacctctctgtgaggtgcacacatatccttacaatcactctgtccgcgtgtgcacacacacatacaagtgcacacacttagaacctctgtgttaggtgcacacacaggctcacaacttctctgcgggcgtgcgcgcacacaaactcacaacctcccggttagatgcacacacactcgctcccagtctctccgccagcccctgcacactcacactggctcagtcggcacacgcactctggcagcctcgctctcctccgggcgcaccccacacccacgcaccctccgggccctgtgcacccctcccccaggcccatgccggcgcccggcagtgaactccagcggcgcggggtgtgcgctcgcccccagcccgcggccgcctgcgcccctcctcacctttctcgcccgcgcccggcaaccggccctcgtcctccttggggttggtcacctgggtgatgatggccgggccgtccatgggtgcgcggcgcggcggccgcccgcaggcccggccccccgcaagccaagcgcgcgggggcgcggcgcggggggcgcgggggcgcggcgcgggggggcgctcgcagccgctgcctgggcgcgcccgccgcccggccccgcgctctgggagaggcggcccgggcccgcgccccagctcccgccgccgccgccgctgggctcgagcggccgccgcctcgtcaccatgaaccccggagccgcgcccgggagagccgcgcacggggaggcggagcgggaggcccggcgccgctggaagcgggagcgggcgggcgagggggaaggagcgagcgagggcgggagggcgggagggcgggagagagggagggaaggagaaaggaagggagggaaagaagaagggcgggcgggtgggtgtgtcccggcccggggaccggcctccgccgcgggctctgcccgctcgcctgctcgcctggtgggggagaggggagcggggccgacacagggtgagtggagggcgggagggggcggccgcgcgcgcgggggcccggggcagttgagtggggtgaggggctcggggtgtagcggacggcagaggggctcggggggttagaagtgaggggtgtcaggggggcctggcagaatga

SEQ ID NO: 29258 - DNA, 2300 bp, Homo sapien
tgagtcaggtagttggtgggatttggatttctgatgatgccatcaagaatctgttcttctgtctttctgctcccctatccttggtatgtttgccttcatcctcatgcttgctatttatgatctcaaagtcgcaagcttcagatattgtttccacatttaaaggaagaagataggaaggggtggcactggccatgtcagtcccttttatggaaagtaaatgctttcacagaaaaacccaggagacttctgcttatgtcttattggcctgacacagtgcctggcagatttcttttacttactgccaaaatcatttctatctgatgacaggtatattcttggaaatagcatacagttgacttagtcaaaccaattgggtatagccatttgtcacatggctatccaatagcaacaggggaggaatttagcccagcatattcctgctctcaacaaaatcaggacaagggaggaatgactcataagtagatacactagtcagtatgggtttgtttatgcttcagtaacaacctcaaaacctcagaggtttaaacaataaaagtctatttttcactcatgctacttctttataatgggttggctgaggctgagccttttgttctgtggcactatccaacagaaatataatgcgagtcacatgtatcatttaattttttccagtagccacattaatgaaaatatttttaaaacaagtgaaattaattttaataacattttatttaatcactatatccaaaatattatctcaatatgtaatcaatagaaaaaatattagtgagacaatttatattctttttatcttactaatccttcaaaatctgatgtgtattttatacttacagcacatcttaatttggaccagccacattttgtgtgcttagtagccacatgtgactagtagctaccatactggacagtataaccatcttatcctcattcacgtgcctacgccccatctctttgcttccatgactgtcacagcagaacaaaggaaatgtgataaatcacattggctcttaaagttttcactcagaaaactcagaaaaacatgccttatttcaacttacattttattggctaaagtaagtcacatgactgcatctaagttcaagggaaatggaaatgtaatccacatattcagaaagaaaactggaattatttggtggacagtgctaatgacaattacagtaggtgacagtttctgacataacatatacagataaaggaaggtagaaaataaagaaatgggcaaaatatacaaggcagatcaagcagaaagcaagagtggcaatgttaatatcagataaagcagaattcaaattcagaagcattaaacaggataattaggggcactttatgacaaatggtctaatacatgaactgtatagtagcccataaatctttatatataaaatcaacaatgctgccaaagaagaaaactatacacgataaaaagctatcttctaaaaataaacagcaaccaacacaggaaaatcaatggtaggttctggctaatggaataagccaagaaaatgagacaattggtataaacatggaaaagatacaaagttagtcttatttgcagatgacatgactgtttacatagaaaacccaaaagactccaccaaagttgattcaaatcataacagattttgatttctcatgtttatgagaaatgtgtgtgctgtttctggatagaaaggcttaagttcttctgggacaaaaaatgtcaaagaaccgagacatttttagaaagaaaataaggaagacagcttggtatctttgtagatgaaatgatatgaggaaatggcatggcagccctggaagctttcctggagtactcagccgtatctatcaggaaatagaggcctttagaggcagttcctccagcagagctgagctcacttggagttactgttcattcatgaacttccttctattaacatttgtcaagatggctttttaaagaattatgttaactttgagttaatttaataatccaaagtggggtgatacgtcatttccataacacttgactagtcaatctgggagaccagacgccaaagaaagagccctgtcagagtagggcagcgaattcccagaggaggaccctctacctcttgcaccctgcttgctcaggacatttggaacacaaagcccaggcctattagatgtggaagcagattccaggcccatttctactgctgagtccttaagtatctatgcctctcagaattcagcatgccagaggaagaaggaaggccatggacagaatgggacagatg

SEQ ID NO: 29259 - DNA, 2300 bp, Homo sapien
ccaccagcctgacctctgagaacagaggccatcgggaggaggacatggccccagagctttccacctcaaacctccattacagctccctctcctggtgcagtgattctcagctctggctgaagctgtaccctagaattacctgaggggtctcaaacatacatccctcaagtccaccacagaccatttccaatctctgcatatggggacctgcgtcatgtttttaagtgccaagatgactggaaagggcagccagggctgagaccccctgctctgactggctacagaggaaaggcaagtcctccgaaactgttccaggcctgatgcccaggtgtggcaaaggagctgtggccagagctttggggaaaatgacgtgttgctttacctgaaagatcagccatatacatgttcattgctaaaaagttggaaaatccagaaaagtacagagaaaagcccacctgggcactgggagcctttcccaaggcaggggtgaggagggaggcctggtgagacccctgcctggctgacagcacctgctttcacacaggtggggagcagagtggagccccccactacacattggaaggatcacactgcccactaggcacggaccccagccttgcaccaccacccttccaacaggccagggctttcctgacccaagctgggtcctaatgggtgggcgtgctgctgggcaggaccacagtgggcaaggcagtgacacctctttgcaggggcccagggttggtgtttggtctgtcctctcacccagctgttcccgtggtgtcctcgggaggagtcacttccagcctatgcaagctccagtgaccattgccacagctccttccacatcctgcagcccagggcgggaccaccagatgtggggacacatgcgggcccatggctgctcccctccagcgcaaggagccagggcatctccaggagtgggctccaggacctgagtcaacagttctcactccccatccctgtctgccctcagagagggacgctcctcacagagcccggactccaccacgagaggcaacattctgcacctgcctgggaaagactggagaaggcctgggggatgaagcctgggataggatgcctgagcccagagaaactggggcggagcctggacttatcttggggccactccttcacctgggtcaatattgacatggagcgggctgggccttggagataagccaggcaggaacaaagtaggccccaagccctggaaacttgatgagtgagggggtggtagatgaagggaggctggggcaggaagagggcagggctttgctagcaaggcaaactctgcccagggcccttttgactcctggcaggcccccttgaagaggggtggaggtggggatggggatggggtggtgggacccctttcctgctagggggaggagggaggggaaggctaggcatcccaccctcccattcttgcagcacccagctgcctgtgagcctgccctgggcctcagtttcccctctgtgtgcctggggtgtgacagccatgagccggaggctgtccaggccagactcaaggcagtgctgctcatcttggccccaggccaggctctaaggccagactgccatctatcctgggcctgggatcacaggttacagagtaggtggttctggacagggcagttctctccaggtgacatcttctggtttgcagagacccagacaattccgagggttggggccttggagaagttctcatgccccccactaagctgctgacactggattgtgccagctggggtatctggcccacaaccaaagtggaaaggggtcaccccctcagcttctcagagaaggaggactgagcccagtaaagggtccagatacacacacacacacacacactgggtcaggcgcaggccacagaaacatgtcagcaaacgttttattaagcaactgcagtgcgccaggcaccgttctagacacaggtggacaacagcaaggccctgcccacagtgactcacagtccagctgggacacagacactaaccaaagatcccacttagcaaagagaccagcttcttggagcaccacgatgaggaaagtggtgatgtctgaggagggagactgctgtggctaaggagggcgggaagggccctctgtggggctgccattttggctgggacctaaatgcagtaaaggagcagctacgggaatatagagagtggggcttccaggcagagaagcctgcagtgcaaaggtctgcagacaacgacctgggcgtcttcaagggacacaaggaatcatattgccagaacaca

SEQ ID NO: 29260 - DNA, 2300 bp, Homo sapien
taccaaaaatacaaaattagccgggtgtggtggtgcatgcctgtaatcccagctactcaggggactgaggcaggagaatcacttgaacccgggaggcggaggctgcagtgagccaagatcatgccattgcactccagcctcggcaacaagagcaaaactctgtctcaaataaatacataaataaaaaggggatacaatggtaaattttaagtatattttactacaattttttaaatcttgtgaaaaaaagattttttatattttaccacaatttttttaaatcttaggaaaaaagatccctctggctactgtggtaggatggtcgtagcggccaggcagacccagagacacagagggaggctggctccggagcaggcaggaggcgtgagagggagggccaggcccaggatccaccatgaaccagctgccgacgggccagtggcttgcgggagagagaaatcagggcaactccaggtttggggcctaagcaccctctggatgttcacactgaacgtgttcctggggctcagagagggtagatctgggaggggcctgaggcgatgttaaatgtgagaccaaacgtgctgggagagatgtgacagacggaagatggagacttaggccggggcaaggttcgggggagttgggtcagggagacactggcgtttccatgctatttgcagccttcagactggaactgggaaggaaactggaaaacaaacaggagtgaaggcccaagctctgctcctgctgccatttagaggcctgaaggagacaggtggagtgagaggggaaggaacaatggtgactgaactgactgccgcttggttgacagcgggcattggtgacttaggaaagagccattgccagggaattcaagaacaaacagagcgggtgggctgaggggagatgggggaagagtcggtgggaagaagtgaggacacagagtcttcctgggcacagagacaaaaagggacagggaaacgggtatgcacaggtacagtggacacactgccactgtcacagacagggtccctgtcccaagtggggatcagacagacatgccaggatacaggcacacacatgaggtcggacaggcaatggcacacatggggacgagccaaatgcctgtgacacaggcatcccttcacacacagggaccctgcattgtgtctgttaaacacagtcacacactagctgtaggtcttgctggacacagactgcccccgagtccccaagtccccagacccctgtaacagagacctttgtggggtgaagactgaacacagggagagggtcttgggcagtgggcaggctttagcagcgtggctttgatgggatggcccacgctggctgggccttggctgggactgaggccctaagccgccaagaggaggttgtgcccctggagtttctggaaggctctgtttgcagcccctccaccccacagtgagagagagagagtggcagtggagtggcagctgaggtgagggagaggtgtcttcgctgcaagagctggactggcctctcccatgatgggtatcagggttccctgaggagggctgtgccaggcagtgagctcacatttgggtagggacagcagaaatatctagagggagccctgaccaccttcccctcctgaagtgagctgggtctcacagagcctgaccccacagcccccagccttggtcctacttcctcctaaagtttgctggagtggcctggccctcttggtccaggcggagcccaccactccgggtgagggatcaggggcccatctagtactccagagaaggaaatcccagtatcttccacaccccacctcttagcccagtccaggcctccatcccctgctctctctggccactggtacccaggcagtgagacctgggagacttaaccatagccctggggagggcgctggtcccgacggcttgctcgatatttgttgactggctgactaagtgaatgcctagcccgctgagcactgtgtggtggggtgtgtcctgcagggcaggagctaggattgagttacagtggtggggaccaggagtagggaggcagagactggccccgtgccaggcctagcactgcccacaggcagggcgaaggcgcgggagcagtttccagcaggtaggcctgggcagagagttggggggcgggggtttccagggaaccagtggggcagagtgggctattcaagtcaagggcatagagcatagggtcccagggctcagggccacagagcctccgcggcagaattgggaggcggcagcagcccagcaggtgaaaacactgat

SEQ ID NO: 29261 - DNA, 2300 bp, Homo sapien
ccgagtcccaactttttggctgccagtttgactttccagtcccccatgtgccctggttgacactgttctgaggccatccagtagtctttctggcactctgtcaccatgttgtactcttccatgagctacagctcacagtttctgtctgcacctctggtcactgcctgcctgggcctctggtaactgtcactggtcactatttctgcctattactcagtgtccttctacggggccaccactggtggacatcctgcttgtcacccaatgtcctcacgttttctgttgcttgagatcaccttttcatggccactatgtctgcctgtcactcatgtcattgtcacaccaacaggccatcaactgtggcaacagttcttggggcaattagggtgcacggacggctcccttctctattcattttcactcagtccagtcgcagggcagcacacttcactcattcaacaagtacttactgagtacctgctgggggccgggcagctgggatcccacagtaaacaacaagacaaacccctgccttcaggaatctgctgctctggtgagggagaccatagccaacaaccatcctatggtttccatagggtgtcgggaggagctgtgagctgtgacggacccagctctaaccccctagaaggacagcccactctgcccctgctcccctgccccacagcctcctccgctcccacatttctttggctacatgttgggtgttgccacagtgtactgtgaactcaccagggccaaaccaggggccctgacaaaggtgtaaggaatgtgagccactctatgacacctattgtgccacacctgattctgtaactctgtcccctcaccttgttctgcctggagccaagggtgttcctgctattgataagacacagtgggagtggagggggaggagggaaggactaacacaccagggtcaccctgagtgagagattcagaaagaagtgacttttggaccaaacctcacacacaggtttctgaaggagtggtgcagggaagcctcaggtaattgaatatgaagtgccaagacataacaaaatcgacagaagtgagggtcccttccttcccccaggtacttctcattccatgtcactgtcattcactgccctctcattctctccctctctgcacgcgcagaaccacagagcacagactcgagcaagctaaatcgctatttgcagagcctgtggctgtttgcagagcctgtgtttatacagagttcagctctgtttcaagaatttgtcagctgaagcgggaagatcacttgaacccagaaggtggaggttgcagtgaagtgtgttcgaatcatgcactgcaggctagggtggcagagcaagaccctgtctcgaaaaaactggaaaaaaaaattgtcaagtgtttatgcctaatctgcccaacccactcatatcagctgagcctgtcacttgctgcagaatctgagtcttcatagtctgtgtgctgacatttgtgtgtttacagagccctcctaataaaagtcatgttctataatgaagttgtacaggtagccaggtgtcggtctccagcctgagaactctggctgttgttccttgtgtcgtcccatattcctgcctggcctgcgatggacatcagcaagggcctcccaggcatgcagggaggcctccacatatggatctctgaggtgagaggcacgaccaaataggagagttggtgacatggaagagcgtggggttttccacactaggcttctcccgcccccaactcagagcgtcctcttccaccccaccccagcgggtgtcatgggtagaggcctcctgagttgttacagggaactctcctctcccagaaccggaagatggtgccggtacccgagggggcttacgggaacttttttgaggaacactgctatgtcatcctccacgtgagtcgcttggggaagtctgcctgagaggggtggcatggcccggcactggggagactgaggcacaggcataaactctgccctgggaagcggcaagttgagagccggagaatcacatcccacaagggggcggttaccgttgaggcttcttagtccttccctcccacttcctgatctccgcggaagcccctgcctagcgtctccccatggcccttggtacatcctccccttctccacccgcacctccgtcttccccgcaacacatatacacaaacacccggaccctaggtcccccagagcccgaaggccacgcagggggcgtccagcgacctgcactactgggtcgggaagcaggcgggtgcggaagcgcagggcgctg

SEQ ID NO: 29262 - DNA, 2300 bp, Homo sapien
gacatcagcaagggcctcccaggcatgcagggaggcctccacatatggatctctgaggtgagaggcacgaccaaataggagagttggtgacatggaagagcgtggggttttccacactaggcttctcccgcccccaactcagagcgtcctcttccaccccaccccagcgggtgtcatgggtagaggcctcctgagttgttacagggaactctcctctcccagaaccggaagatggtgccggtacccgagggggcttacgggaacttttttgaggaacactgctatgtcatcctccacgtgagtcgcttggggaagtctgcctgagaggggtggcatggcccggcactggggagactgaggcacaggcataaactctgccctgggaagcggcaagttgagagccggagaatcacatcccacaagggggcggttaccgttgaggcttcttagtccttccctcccacttcctgatctccgcggaagcccctgcctagcgtctccccatggcccttggtacatcctccccttctccacccgcacctccgtcttccccgcaacacatatacacaaacacccggaccctaggtcccccagagcccgaaggccacgcagggggcgtccagcgacctgcactactgggtcgggaagcaggcgggtgcggaagcgcagggcgctgcggaggccttccagcagcgcctacaggacgagctggggggccagaccgtgctgcaccgcgaggcgcagggccacgagtccgactgcttctgcagctacttccgcccgggaatcatgtgagtgcgggggcgaccggggcaggagggagccgtggaggcggtgccttggctggggcagtcttgggatggccatcgtccacatccctgaatggggcaagccgggaggggttgggtaacacctttattgagatacaactcatacgccatacgattcacccatttaaagtacatatacatgtcagtgatttttaacagttgtgtgcaaccatcaccacaattttagaacattttcatcaccctaaaaagaagccccatacccctttgccaccactccccatttccctccaacacccccatcccctgccctaggcaaccactcatctgctttgtctatacatttgcctcttccgggcatgtcatagaaatagaatcattcaacaaatggtcttccctgacgggatctttttgttttaacacactgttttcatggtttatccatgttgtagcatgtgttattacttctttttattaccaagtaatattgcattttatgaatatactacattttatttatccattcatcacttaatagacatttgagttgtttccactttttggctgctatgaatctgtttttatgaacatttgtatacaagtttttgtgtggacaaatgttttcatttcccttggtatatacctaggagcagacaccaatgttgttttgagtttgcttttatgttactgtgctggtaggaatatatctttcgctgtaaattgcttcacaggtgttttaaattaacactagcaatatatttggaaatataggaaattgctatttgatcatttccatttcatacagttgaacctatatatgcatatagcatatacatgaacacatgcacacaaacatatgcgcagatgcagaaacacacaccaccctcatgtatgtccacctatagatggacatgtgtgaatatccatgttcacctacacacatatatgctgttgcccaccttcatgcactcaccatctagacttacagggataaacaaatacacagtgtgcccccaaatgtatgtacatgtacacatatatgcatgtgtccacatgactacgcatggaagtgcactacacatggaaatgaatgcacactcatgccctatgtgtgcacccatgtacttatacatacatgtgttcacacagactccagtgcatgtatgaagcaggcacatacgtgcacgtgctcacatctgcagtcattcatgcacatggcagtctgtgttcttatatacacagaatgtatataccctcctgctattcccacctcagctacaggaagggaggcctagcatctgacctcaagcatgtggagaccaacttgttcaacatccagcgactgctgcacatcaaagggaggaagcacgtgtctgccactgaggtgaggctgccaggggagcctcttgacctctgaactcggctcagactgggtgtactgaggtataaggaggttggaaattggctggggttgtggggaacaaggagctgtcagcattcccagatggtctt

SEQ ID NO: 29263 - DNA, 2300 bp, Homo sapien
cagtctgcccctgggcttccaggcccatgctacacaggcacacactgatccacaccaatcttaactttttgtgccacagaccactttggcagtcaggtgaagcctgtagaccccttctcaggattatgtttttatttatttatttgtttatttatttatgagacagaatctcactgtcacccaggctggagtgcagtttgcgccatctcggcttaccgaaacctccacctcccgggttcaagggattgtcttgcctcagcctcccaagtagctgggattacaggtgccggccgccacgcccggctaatttttgtatttttagcagagacggggtgtctccatgttggccaggctggtctcgaactcctgaccttaagtgatcctcctaccttggcctcccaaagtgctgggattacaggtgtgagccactgcgcccggccaggatcatgtttttaaatacagaaaataaaatacataagaattcaaaggaagccaattattttgagatgttattctatctacaggttcttgaggggtctttggtctggttaagaacccctgcgcagtttctccataacacaggctccctttgcactctgcttcccctctccaaagaatagcttttccgtgttcatatttcagctcatctaccttgtccatctactcaccttgctcatgatttattctctctgatatgaccttaggcaagttactctgcgcttcagtttcttgttattactgctgtgcttgtctgtgccaataactggctttgccagtgactcactgtcaatgctggtgactggagctgcagtgaagcgaactgggggaactattcagaggctgagagtaagagtcaggcctctgggtggtgtcctgacattggcacacagtaggggctcaataaataattactgggtgaatgaaagggaagttgtgatgtacatgaaaggacccactgttcccgagcatattggcagcaaagttttgtgcaaagttacagtcgttctcatgtatttatgaaagccaccctgggttaatgggcttattttaagatcagaattttttcaagaatttcgtttgcatccgtcaccttggggattatcactttggtggtcaaaccgagagaagcaaacaggcccacctgaggttcacaaatgaggcaacagcaagctgagtcgcaatgaattagttgagcaattgaagtaaaatacttggggggggctcggtgtctggcccaggctccatccccggtcccgcctgatctcgccccactcaggtccccgctagactgccatccacctcccactgggactcccctcagcttttctccccagactcagcccttcggttctgcgccagcctcaaaggtggcgttagaattcgccgctccggctccttggtcagaccccgcccacactgcctcccggaccctggctccgcccccgcaccgcctccaaagccgagggaccgcccctccctgcctggacaccgcccttccagtgcgggatcctcccaggctcgcctcctgggccctggccccgcccccgggctgcttcctgggtatggctctgcctccacgtcgcctctggagcagaggctcccggcctgagctccgcctctgagcctggcccctccttcgccccgctgccttggctctggccccgcccccaggcttcgacacagatttgcttcctgggttatggatttgtcccactccgcctccgcggggcccggcacctcctcggccccgcctcctgggttctggatccacccccatccccacccacgcctcgacaccactctcgccccatctccaggggtcgttagtcccacccctcttggatggcccagccttttggggtctgactctgccctccttagcccagattttcttctcgtcccgcctcctgtattctgactccccccactcatttactttgcctcggtttcgctctcgcctcaccttcagggggcataggtcccgccgctcgtggactagctccgcctcctagcgtctgactaccccctcagcccagatttccctctcgtcccgcccctccgaagtgcgcccctcctctcgaactctagctcctccctcccattcctggactccgcccctgctcccctccaagggcgacagttccgccccccggaccagagcagagggtgttgtgagcataaaacactggaggcggcactgccccggacccggctccgcgcaggcaggggcactgtggagggccatgcagtgcctggggatccggagccggagccgctccagggagctctacctgcaggag

SEQ ID NO: 29264 - DNA, 2300 bp, Homo sapien
cacagacggccctgggagttgagggcagagggagtgaaggcaaagggaatggaatccagcaacttcgtgacttggtacaaagcctctttgcctcctctgagctccagcccctccacacaagttcactcataccacacaggcttacccctagcaggaaccagcagagcacctcccagcctgtgagagccaggaggggccgatagccaggggaagagaggagaggactggagtgagggctcacccacggctctgagcagccgccgggtttctctatgagcagggcggggcccagccctcatgtctggcagaacctggttgcatgtgccagctctgagtcagcagtgcccatcctgcccaagaaccctgggctagggaggaggctgcagctcctatgtctgtgccaggggccagaggagggattctgtgaggtgggtttggagcatgcaaaggaagagcctggctgcatccccaccatggtacatagacaaagggaaaggagaggctcccaggtaatgtcctggcttggggcctggggctcagagttgggagatgatgtgaatacataggaatgatgactgagatgaagccatgtccactcctggtgtcagagtttcactgtgacgctgcctaggaagaggaggggggcttgaggaggcctgatttgctgagtacaggggcttgcaggctccaggagtatcagaggtgcaagtggtaggctccaaggcctgaggaggcctccagagggcagagaaggggacccttcttccccactcatcccctgtatggaggtccagagtgatgcctgccagtatgaatttgctcatccctcagcaaacatggagtgtggccctgggcagaagggaaaccaaggaaggaactgacaggcctgcccagggcaggggtgttcgcactgcaggacaggattggagctgagtgccaggtaaggggtgaagccccgtctgtggagagggggcatgcagagcagggggctctccaaagcccagaagtcctgatccacttttaacccccagaaccagaagactgtccttcagctgtttcacatcccttattcaaggccacctagggcccagaagaggagggattggggtgagcccagccccctccccgcagagctggtccaactagctttgcctgactctcacattggccttatcagcccaggaggcctgggtggcttcctgggaggccctctgggggctctctgacaccaagagcccagttttcccaagggactctccaaaggggtggtgggcaacaggatctagggaccctcccagggtctgtggtgggaggggtctctgggcaacctataaagggggttttctgggtcccaagagttagggggtgggtctgcatagggaccttgcccagacagccccttgggaggccacctgaagaagggaccctggggatcctccccctcggctgcatggatcgctggggttttgggatatgagtggctcaaaagtgaaatccgtgcacctgcttgcttccccctcccacacccccaacactccaccaaaggcactcttggggttagaaacctcccagcgagagggaaggggaccctcctcccgacaaggtccaggtattgctctctgaagaccttctaatcgtgtccgtgcacccatttcgcagaagggaatgcgaacgctgggagctgcggctggaagcctggacgccgcgtctccctagcgcagcagcccggctgggcgtcggaccttacacgatcccttccccgggatgacgccggattctttccagcatcaccccgaccccagcgaggcgcccacaacagggcgtggggcccggccgcccgcggtaatgacagggcccgcggcccgtgggtggcggcggcggaggaagctggaggaatctggctatttctggtcggggcgcgcccgctggcccgggccagggttggccagtcctccgggcccccagctctgccctccctctcgcgtccccagaagggggcggggagagacgagggttggcgggctcagggggcgggggcgcagggcagcgggggcggggcggtgtcccgggaccacccccggcctcctcccaccgcggtccattcaggtccctgcaccgcactccgctcggaccccaggccgccggtgctgtcgctactcaagtgagtcccgcggtgcccctcccgccgcgccgcccgtcgggcatggactcgggccgggacttcctgaccctgcacggtgagtgcctggcccgcgcgagcgggagaccctgcaggggtggacccctggaaagctgttccg

SEQ ID NO: 29265 - DNA, 2300 bp, Homo sapien
gggaggggtcatgcaaagggagacctctcccaggctagtcagactctgtgactgtctctgaggctgtctagaggcagggtggagaagccaaaagtaatggcaagagtccattgtcctgtccttccctataacagggaagggggccagagagcctccacaagcggaactgctcctaaatgacaagaccacccaactggggctccatttgccacattagagcaatggaggcccccagactgttgcacccctcttcctacccacagctccttcctgcaccactgggggccttgcatgcttgtggaaaattggagaaatgcctgtttgccaaagctccctccacttccctcctcctccccccaccatagctacccttttaagtcagccctgggaggataaacttaaagaagaggcctgcataggccctggaatgaactcaggacatgtgggcacatacttttggggtcccatgtgcctggaggcgaggcacggggcacatcatcttggccctgtgatctcttactctgtgggaaagagtgcgggggacagccagagatgggcctctcaagcacacagtccagggcaggcggccctggcttctcagctctcaggacagaaaaggtcctggaaaggacaaaagagagagccaggcccaaccaagagaagtagaagtggaagtagcccaggtgtgtgggcaagcatgctagcactcatctctggaagtgggtttcaggatgtaaggcaagcaaactcagtgtggagtagaaagtggttggttgtatcacctgtgagcaaaagccatggtgtgcaaatgacaacagtcaatgtgatgttatgctgctgccctggacaaatgcagtcctcttttccatctcagtgatgctgtcatcacccccctgattgcacacacaggatacctgggagtcattcttggtgcctgtttcttacctcccattatccaccagcaagtcttatcaattctactttttggatctatctccaatccagttccctctctctcatccaatctcccttcatctctttcctaacttctgtgctagtttcctaactgaacttcctgatgcctcttgcctctcctgtctattctcatagcaatcagaatgatcttagtaaaacagagctgaccatgacatgccccagcttaagacccttgatgaacctcctactgccctcaaaataaagtccaaattccctattgtggcctaccaacccacttatgatctggccctaacctatcagtgtcattcctccaccctcacactctttaagttccactcctcctgaatttcattccgtccttcccacatttttaaatattttgtaaagatggggtctccctatgttgcccaggctggtctcaaactcctggcttcaagtgatcctcgtgcctcagcctcccaaagtgttgggattacaggtgtgagccaccacacacacgctcttatttaggtacttttttgttttttgtcattctactaactgtagtactgcattgtggttttaatttccacttctttgatgactaatgatgttcagtctactccttctttgaaatctctgcttggttttcatttgttccaagaagtaatcgctccttctacagactaagttcctgtcctcctttgtagttccatgacaaccaatatttatctccaccttggccttaacccactaaagtacagttgttttacttttacctccacacccaccgccatcatcacaaacacacacatacacgactgtgcacttcctgaaggcagaagcagcatcatacttctttggtatcttcagcaatcagcacagacctgaaacacaatctttacacaataaatatgatgagtgaatgaacagttgcttaacaaattaaagaatggatgaaggtaggtagttaggtacaaggttttgcagataggcctggctgtgtcaattaaacctttcttcatgggtcctcacacttagtaagctcacttttaaaaggacaatgctgaagacacaaatgtttacaatgaccacagcgatgacgggatccgagagaaaggcaaggcggaaggggtgaggccggaagccgaagtgccgcagggagttagcggcgtctcggttgccatggagaccaggagctccaaaacgcggaggtctttagcgtcccggaccaacgagtgccaggggacaatgtgggcgccaacttcgccaccagccgggtccagcagccccagccagcccacctggaagtcctccttgtattcctccctcgcctactctgaggccttccactacagcttcgc

SEQ ID NO: 29266 - DNA, 2300 bp, Homo sapien
accttgattcaatatagcacatgtttttgtgagcacagagttggggctaaagttacagattaacagcatctcaaagcagaaacaatttttctttgtacagatcaacatggagtttcttatgtcttccttttctacatacacacggtaacaatctgatctttcttttccccacaatcttcagtccagccctctattccacccctcaccttgaaatacagcaatatgatatggcaagagtcttatccagcggatgccacccctaggtcggcaatcactgttccacctctctggggtgacagcagggctcacaggaggatacctggggagatgtgcattttcagaaactcccatttcacttttaagggcagacaacctgcccatctgtgctgatttggaaaagctgggtgcatgggcaagtgagcgtgggaccctcagggacaggagctggtggatgaccaggacaagctgttgtatggctggctctccctgccccaaaccctgatgttccagagttgcaagtgagcctgccaagggctagtgtcccgaagaaagatctggaatgcctcatctctggttttcacagctatactttagtgcccagaacaccaccgcctggcactgaatgaaagtttgttgtccacaggaaatgtgctgcagcctggggccggggcaatcatggcccgaatcgcccagtttctgaggtaaacttttctagttctagccatgggttggccattttgacactttactgggcccaggccccaggaaactcagtgtgcaggttggggaggataaggttggacaccagaatgaggcaacgagagtccttggctccctgctcttgtggactcaacctctcccctactttgaagtgctgagccacgatacacaaaacctttgggactggagcagaagttctctgtagcttgatttttagccaaagccaggttgtcatttgccttttgtgagtgtggactctgtcctcatttgtcaggtgagtaatcaagtaagaatgctgaaaagtgactttcagcctttttactagttgagctgagaactccagtcatatcccactagcagagactttgggatagggcagaaccatggggaaggaggaccctcaggaggagacctggtcaactttcctttaagcgcctgcagggtaaagagtgcttaaattattttcatgtgtagatttaagaactgcttggctttgtacttctagatgcataaataaataaataggaacattagctagtgaaggaacaggaaaacaaccctctaggaactgggagaggtttagactgcccagcctgtagttcaaggccccctacaatctggctccagacttaccttccagcctcatctcctagctgcttactcaccttgacttttcttcgttcagccggctgtgggcctactgtcttccctgatatggtcattctgtctccttgaagtgctagccctacctcctctttctgccctagacagaaagacaaaccctgcctaaacacagtctcaccattttggcatgagttatccaggctctcaggctgaaattgagagccccttcctctccagcagtagccatatacttccttgtgatgtggtttgccctcttgccctattatttcagtctctgatagttgattcattttctgtgtgttggttgggcatcctctagggcacagtgttataagcatcgcagcatccctcaggtgatgccttgtggtaagtaggtatttagtgaacacttggtggattgagtgaaggaatggtaactacctgctagggagttaagggaccctggaagggtcaaacaggctgcacaggaggctatccccctgagagagtctctgcagagcctggcctgggcactagttcagaggttcccaactctggctacacaccagaatcaccaggatgcttccactccctcagattctgagtctgtgggtctgaggaggtctggaaatttccctagggctttgtactgttggccaaggcaggttacatcaggaggggaagccctactagcttccagggctaagaccagtatgagagtcttggggaacctaccagagcaatggatgttagaatatatgatgcccatcagagtgcttcgtctaggtgggatcaggctttcaagagtccatgggaacatgcagggttagctatatgattactggtaaggccgagtggtccctggcctcagactttaggcatttcttttgctctggtgctctgtcccagcagcagttccttttctctgttttttgggggaaacagagatacacagt

SEQ ID NO: 29267 - DNA, 2300 bp, Homo sapien
tttactgagataggagaaaaccgccttatggctgcaggtgagacatgctggcggcaatactgctctttactgcactgagatgtttgtgtaaagtcaaacataaatctggcctatgtgcacatccaggcacagcacctttccttaaacttacttatgacactgagtcctttgctcacattttttcctgttgaccccctccccaccattaccttatagtaatggtatataatgccacatccctcttgccaagatagtagagatagtgatcaataaatactgagggaactcagagaccagtgctggtgtaggtcctcaattgctgagcaccagtcccctgggcccacttttcttcctctatactttgtctctgtgtcatttcttttctcagtttctcgtctccaccttgcgagaaatacccacaggtgtggaggggcaggccctcttcaggcaaaacggggtgaacagggtgatggtggggagaaggtcagcaggaaaacatgtgagtaaaggaatctgcatcataaataagttcaagggaaggtactgtgctgagatgtgcatgtaggctagatttttgtttctctttacccagacatctcagtgtagcaaagagtaacagagcagtattgctgccagcatatttcgcttccagccacagggcggttttctcctatctcagtaaatagaaccaatagtcggctttacaccgagacattccgttcccagggatgtgcgggaaatagaggccttcctcttttactaatcctcctcagcacagaccctttacaggtgtcgggctgggggacagtaaggtctttcccttcccacgaggccatatctcaggctgtctcagtggggggaaaccttggacaaatacccaggctttcttgggcagaggtccctgcggctttccacagtgcatcatgtccctggttaatagagaatggagaatgacgatgacttttaccaagcatactgtctgcaaacatatgttgacaaggcacatcctgcacagccctaaatcccttaaaccttgattcaatatagcacatgtttttgtgagcacagagttggggctaaagttacagattaacagcatctcaaagcagaaacaatttttctttgtacagatcaacatggagtttcttatgtcttccttttctacatacacacggtaacaatctgatctttcttttccccacaatcttcagtccagccctctattccacccctcaccttgaaatacagcaatatgatatggcaagagtcttatccagcggatgccacccctaggtcggcaatcactgttccacctctctggggtgacagcagggctcacaggaggatacctggggagatgtgcattttcagaaactcccatttcacttttaagggcagacaacctgcccatctgtgctgatttggaaaagctgggtgcatgggcaagtgagcgtgggaccctcagggacaggagctggtggatgaccaggacaagctgttgtatggctggctctccctgccccaaaccctgatgttccagagttgcaagtgagcctgccaagggctagtgtcccgaagaaagatctggaatgcctcatctctggttttcacagctatactttagtgcccagaacaccaccgcctggcactgaatgaaagtttgttgtccacaggaaatgtgctgcagcctggggccggggcaatcatggcccgaatcgcccagtttctgaggtaaacttttctagttctagccatgggttggccattttgacactttactgggcccaggccccaggaaactcagtgtgcaggttggggaggataaggttggacaccagaatgaggcaacgagagtccttggctccctgctcttgtggactcaacctctcccctactttgaagtgctgagccacgatacacaaaacctttgggactggagcagaagttctctgtagcttgatttttagccaaagccaggttgtcatttgccttttgtgagtgtggactctgtcctcatttgtcaggtgagtaatcaagtaagaatgctgaaaagtgactttcagcctttttactagttgagctgagaactccagtcatatcccactagcagagactttgggatagggcagaaccatggggaaggaggaccctcaggaggagacctggtcaactttcctttaagcgcctgcagggtaaagagtgcttaaattattttcatgtgtagatttaagaactgcttggctttgtacttctagatgcataaataaataaataggaacattagctagtgaaggaacagg

SEQ ID NO: 29268 - DNA, 2300 bp, Homo sapien
cgaacggaagaacggggaaggcccagcgcagggcctgagtggttcgctcaccgacacagatgtcccccagctgttccggcctcagattcacgtccttgagaaccgcggtcatgactgccgagagaagctcgtcgggggtggtgtcctgcagcagaaagagcagccgcagtgacccccactcccccatgcccaccccagggagacaaagcgaccacagctgggtgcggagctgcctccggcgtccaggataaccaaacatacgaaccggaccccagcccgcgccggcgtcttcccacactcggcgcccagaccctcgggcctcaccttgaagccgccgcggcccgcccggcagatggccgtgcgccgcccgtgcaccaccaccacgtccgcggccgaggcctgcggggcaccgctcaggcaaggcgcggcctgcggcatccagccggaatcggccggacccctcaggtggcccagcactacctgcagcctctgcattgcgcaggtcaaccctgcagaccagccaccagtccgggaactgaccgcggagttaacagacagccgtccgcacacgcgcagaaccacatctcagcctccaaggcctcaactccgcccacagctctgcgaacagacgcgagcgaccctccaaaagtcccgtccacctccagcctcagccaaccacaaggagagtcggcctgggaacccgcccctccccgccaccgcctaccaagccctctataggagggcccacaggcaccgcccagccgagctttccactcaatgccccgcctaccttggcctaccgcagccaaccagaaggtgtatctttacgaatccccgcccagaaatgcagaccggaagtctttccaccttttgtagccaaacccgagacctgacccccaaatccctgtctcctgcccgcagccaaacggaaggctgggcagccaggaccgcttactgcttgggggctggagatggaagccgaggctctaattcctctacccacttcctaggaggctctgctatccctccggtcccagtacccgagctgggggacctaaatacttccgagacgcccgagtcctgctccgacgtggttgggctttcccattctttcgagaagacagggaatttgggcttccgggctggccgggagaacagattttacagacatgcggggtgtgacaagctctctaactggagaatgaacatttcacacttttaccagttttacacccaattggaatgattttattagtgcccatttcccgtgctaggctggggtctccaccaaggcagagaggtaccatgtatccggggagcctgcgacacccttgacacttagtagatgatcaataagtacttgtcgaatgagtaaatgaatgaaccagggctccccaggtcaggactgtgtccctaaacctaaagggcaaggccacgtgcccccttgactcccaatagcagggccatgtcttcacctgagaccctggagagtagtgctgggctttccacagacaccaaaggacagggtgccttgtgctccccaacctagtgtcatgacgtccccaaccatttcgagggcagggccacggcatgcctcaggctccagaaggcagctgtccgtttcccactcccacctcggggagcacagcaggggtcttcccatacccctactggcaggattgcgtgttccccagagacagtggagggcagagctggtgccttcccacttgtcccctcctcgccatcctcgagggcaggaccgtatgaacccctcagattcctccgtggaagaactgtggctccaccagatcccaaaaagcaaggcccgtttcctacaacccccgaaggagggtcgtcctcactccgccgccaacctactagcaccatcaccagaccctcgagggcggtgccgtggacctctccagatctcaaaaggcagattcctacttcttacgccccccacatcacccgcctcgagacctcaagggtagaggtgggcacccccgcctccgcacttttgctcggggctccagattgtagggcagggcggcgcttctcggaaagcgaaagccggcggggcggggcgggtgccgcaggagaaagaggaagcgctggcagacaatgcgacccgaccgcgctgaggctccaggaccgcccgccatggctgcaggaggtcccggcgcggggtctgcggccccggtctcctccacatcctcccttcccctggctgctctcaacatgcgagtgcggcgccgcctgtctctgttcttgaacgtgcggacacaggtggcggccgactg

SEQ ID NO: 29269 - DNA, 2300 bp, Homo sapien
cccccacagaagcctgattctgactcctggccctacctgaaagcctctgcctaagctgcttccttcccatctccgcctatccggacctttctccagtccttcttaataaccgcgaccggttattaagaaggaacgggacccgcatggttctccctctgcaggcttcttcgggcccccgaggcaggaaatggggtctctccatgggagacaggatgctgaggccgcggaaagtcagcctcctcaccccccaggtacgaggccaggaaggggacgtcctcaccaatgctgggtcccagctccagcagcacgtcgtcgcggcccagcttggtaagcagctcgagcagtcggcctacagaggcgccagggcgtccctgccaggcgtccagcagcctgccagtggggtccgcttgtgtctccagttgccggatctccaagtactcaaagtccatctcctccgccagcgcggtccagtcggccgccacctgtgtccgcacgttcaagaacagagacaggcggcgccgcactcgcatgttgagagcagccaggggaagggaggatgtggaggagaccggggccgcagaccccgcgccgggacctcctgcagccatggcgggcggtcctggagcctcagcgcggtcgggtcgcattgtctgccagcgcttcctctttctcctgcggcacccgccccgccccgccggctttcgctttccgagaagcgccgccctgccctacaatctggagccccgagcaaaagtgcggaggcgggggtgcccacctctacccttgaggtctcgaggcgggtgatgtggggggcgtaagaagtaggaatctgccttttgagatctggagaggtccacggcaccgccctcgagggtctggtgatggtgctagtaggttggcggcggagtgaggacgaccctccttcgggggttgtaggaaacgggccttgctttttgggatctggtggagccacagttcttccacggaggaatctgaggggttcatacggtcctgccctcgaggatggcgaggaggggacaagtgggaaggcaccagctctgccctccactgtctctggggaacacgcaatcctgccagtaggggtatgggaagacccctgctgtgctccccgaggtgggagtgggaaacggacagctgccttctggagcctgaggcatgccgtggccctgccctcgaaatggttggggacgtcatgacactaggttggggagcacaaggcaccctgtcctttggtgtctgtggaaagcccagcactactctccagggtctcaggtgaagacatggccctgctattgggagtcaagggggcacgtggccttgccctttaggtttagggacacagtcctgacctggggagccctggttcattcatttactcattcgacaagtacttattgatcatctactaagtgtcaagggtgtcgcaggctccccggatacatggtacctctctgccttggtggagaccccagcctagcacgggaaatgggcactaataaaatcattccaattgggtgtaaaactggtaaaagtgtgaaatgttcattctccagttagagagcttgtcacaccccgcatgtctgtaaaatctgttctcccggccagcccggaagcccaaattccctgtcttctcgaaagaatgggaaagcccaaccacgtcggagcaggactcgggcgtctcggaagtatttaggtcccccagctcgggtactgggaccggagggatagcagagcctcctaggaagtgggtagaggaattagagcctcggcttccatctccagcccccaagcagtaagcggtcctggctgcccagccttccgtttggctgcgggcaggagacagggatttgggggtcaggtctcgggtttggctacaaaaggtggaaagacttccggtctgcatttctgggcggggattcgtaaagatacaccttctggttggctgcggtaggccaaggtaggcggggcattgagtggaaagctcggctgggcggtgcctgtgggccctcctatagagggcttggtaggcggtggcggggaggggcgggttcccaggccgactctccttgtggttggctgaggctggaggtggacgggacttttggagggtcgctcgcgtctgttcgcagagctgtgggcggagttgaggccttggaggctgagatgtggttctgcgcgtgtgcggacggctgtctgttaactccgcggtcagttcccggactggtggctggtctgcagggttgacctgcgcaatgcagaggctgcaggtagtgctgggc

SEQ ID NO: 29270 - DNA, 2300 bp, Homo sapien
ccgcctaccttggcctaccgcagccaaccagaaggtgtatctttacgaatccccgcccagaaatgcagaccggaagtctttccaccttttgtagccaaacccgagacctgacccccaaatccctgtctcctgcccgcagccaaacggaaggctgggcagccaggaccgcttactgcttgggggctggagatggaagccgaggctctaattcctctacccacttcctaggaggctctgctatccctccggtcccagtacccgagctgggggacctaaatacttccgagacgcccgagtcctgctccgacgtggttgggctttcccattctttcgagaagacagggaatttgggcttccgggctggccgggagaacagattttacagacatgcggggtgtgacaagctctctaactggagaatgaacatttcacacttttaccagttttacacccaattggaatgattttattagtgcccatttcccgtgctaggctggggtctccaccaaggcagagaggtaccatgtatccggggagcctgcgacacccttgacacttagtagatgatcaataagtacttgtcgaatgagtaaatgaatgaaccagggctccccaggtcaggactgtgtccctaaacctaaagggcaaggccacgtgcccccttgactcccaatagcagggccatgtcttcacctgagaccctggagagtagtgctgggctttccacagacaccaaaggacagggtgccttgtgctccccaacctagtgtcatgacgtccccaaccatttcgagggcagggccacggcatgcctcaggctccagaaggcagctgtccgtttcccactcccacctcggggagcacagcaggggtcttcccatacccctactggcaggattgcgtgttccccagagacagtggagggcagagctggtgccttcccacttgtcccctcctcgccatcctcgagggcaggaccgtatgaacccctcagattcctccgtggaagaactgtggctccaccagatcccaaaaagcaaggcccgtttcctacaacccccgaaggagggtcgtcctcactccgccgccaacctactagcaccatcaccagaccctcgagggcggtgccgtggacctctccagatctcaaaaggcagattcctacttcttacgccccccacatcacccgcctcgagacctcaagggtagaggtgggcacccccgcctccgcacttttgctcggggctccagattgtagggcagggcggcgcttctcggaaagcgaaagccggcggggcggggcgggtgccgcaggagaaagaggaagcgctggcagacaatgcgacccgaccgcgctgaggctccaggaccgcccgccatggctgcaggaggtcccggcgcggggtctgcggccccggtctcctccacatcctcccttcccctggctgctctcaacatgcgagtgcggcgccgcctgtctctgttcttgaacgtgcggacacaggtggcggccgactggaccgcgctggcggaggagatggactttgagtacttggagatccggcaactggagacacaagcggaccccactggcaggctgctggacgcctggcagggacgccctggcgcctctgtaggccgactgctcgagctgcttaccaagctgggccgcgacgacgtgctgctggagctgggacccagcattggtgaggacgtccccttcctggcctcgtacctggggggtgaggaggctgactttccgcggcctcagcatcctgtctcccatggagagaccccatttcctgcctcgggggcccgaagaagcctgcagagggagaaccatgcgggtcccgttccttcttaataaccggtcgcggttattaagaaggactggagaaaggtccggataggcggagatgggaaggaagcagcttaggcagaggctttcaggtagggccaggagtcagaatcaggcttctgtgggggcatctgggctgtttcaagtagagcaacaggacaggtggggcgattgacagtggactgtcttagaaacctcaagtcctggggaaatgcagcccttctttctactcactggcacttacataatatacatgcataggcgttggatacagccgcccacagacaggcacaccttgctgagttggaatcactgcaccataaccagtgggtctcctgagcctttctggcatgcccagccccttgctcacatctgccctggatcccagaagaagcagacctaccttggtaccattcttaggatccctaggaagggacagaga

SEQ ID NO: 29271 - DNA, 2300 bp, Homo sapien
tcaagcttaatatatatataaatatacattatatataatacatatttcataaacttatgaaatacatactggggacctaaacttcctggcgtgagccaccgcgcccagccaagcattcttaaagataggggtaatttcggaaaagaagaagttacaggtaaagtcataaatcaatacacagaggttatacattggtttgacctaaaaaggggggacatctccaagcaggagcccacaggtcataggtggattcaaagattttctgatttgcgattgataaaagaggtgaagctttgtctaaaaatttcggatcagtagaaaagaatgttagctacagcttgtgggcatgaccttcttcaggaagaagaaacttagagaaaaaacaaaccaccagtcagagttcagtccttagctccccattctctgaggtctatgtgccagcagatccatttggtgggggtctgggtttctaaaaaacaactcagggacatgtgttgatgttatctttagtttttatagggaaccaaacatccagttattttagtttctttggctaatgtttaaagttattactgccctcttgcttatcaaggggttcattaacttttcaaggctagctaagtgccgggaatttctcttgaagtaactcaagattttcctttatttccatggttgagggcctgcaggccctaaaaggggtccctgctccgtctcagctgggcctaggtgaaggtctcttcctttttctgagacggtgtctccgtctgttgcccagactggagtgcagtggcatgctctcgggtcactgcaaccttcgcctcctgcttcagcctccctagtagctgggattacaggcgccagccaccacgcccagcgatttttctgtattttagtagagagggagtttcaccatgttggtcaggatggtctcgaactcctgacctcaggtggtccgcccgcctccgcctcccaaagtgttgggattacaggcgtgagccaccgcacccggcctaaggtctcttccttaaagactgccgttggactgaaaggtgtccaacctagaacagtttcgcacctagccctatccctgttggatgctcattattttttaaaatccaatttaccaagcgtgttcagtcttcagctcgctaatttctctaacggccgtacgtagtcaaactgagaaaactgttcagtgggggcgacaaaagccaacgcccgtgagacaacccccaaatccgtgggtcgatctcacttgtttaataccccaagccctgtccggggggaagaaagacaacctcccgagtccctcaaggcaggtgcttatttgagcttcagatctaaagctgcgaatggacagaacccgcccagtgcagggtggacccgcgagagacagcgccgcgacaagcgttagagagaacgtccgccttgaaaaaaatgtcaccaggcaaacttccagtttcactccgaccagtggcccaaggccttttatcctagttggcagtggtccacacccaaaggctaccccacccagccgctccctcagggtttctccacaccctgtagagcctttcgcacgtctcgagggtgtgacggttacgccgtgacgtcactccagaggaagtggtaagacgagcgcggtaacggagctcttgaagggctgcagccctaacacggagaagcgcgctaagagcctggaggcgggaccaatttatgactgacgtctacccacacccattgcttttctgattccttctcaaacaaaccaatgaatgcgacgacggagacagcagcgtgccccaggcgctagaagtggctctgccccttctactttgctgccctttggtcgccatgcttagtgtggctactgcctctgtgctacttgaggctctcctacggcttttcgatgccttcgatgaacctctacctaagcacttcttccctttcaccgcgaactcctaccttctcgggtttctagcttgctcactttacatccagccacactggagatggcggccggaggcgggcccgaggtggggcgtgaccagcgcagtgacgtcagcgcgctgcgtgtcggcaggtggaggaagaggggaaagtttggcccgtgcgtggggctggggtggagggcgggacagaggggctgggcccaggcaaagcttctgtcgctgctgctgcggaggccgaggacaggacgtgggctgggccgggcagtgccggactcggaggagcaggaggcgaggtccgccggagctctgagcccccgctgctctgccgcgcggtgaccccgcgccccggcg

SEQ ID NO: 29272 - DNA, 2300 bp, Homo sapien
ctttggcagtctttacaggatgtggtggggaggaagggaggataaagttaagaggagaaagaagtaaaccaaaacatcaggatttggggaatgtagagataatgtgagaccagtgacattcggtgcctcagttccaaggtttggggatcatagttcagctggagactgactctagggaggtctttgatcaggcctcactcttgtcaggagtctgctaatcattctgtctttctctattttagaattgtacaccaagaagtagaagaatctttagagaccatcctttacctagatggggcaattgagggccagagccaggaacagattctcagggtgaatcagtggcagagctcaagtttcctacctcctagctctagctctcttggttgcttggagccaaacaaagcaaaaattccttttctgactggaatgaggagatgatgagggcagaggacaaggcttatgtctccatctcagttcttccccataaggggaataccagactaggcagtggtgactggtagcagttgttttcttggcaattcaataaagacaatgctaagaataagaacactcaaggaagctaagtgaaggaaaaaagagctggggacagtggtgatcctggtgggagaggttggggtggggcaaagagcaaagcatgctccctgagcagcatgtcaggccttgcttctgccctccactgtctgccctgccttgacctgtactgcaggctgactgattaacaggcttccagcagctgtgccagtcaggtggccagggctgccctgcacaaccttgcttccttgcattcccttcagcaatgttcctctgctcatgccttaaaatagttcaaaattgagaacatgaaaatgctttcttatgcatacacaagcagacatgaatatgtgtatgcacctggtgtgtgtgtgggctgtggtggaggcatactttgtcttgtgttcattgtcactgacattgctcagggaggctggggtacgtgcatttgttttcatctttagagtgtgttaatggtttccttcttgattaaagtagagctcaaaatgcagctctgtcattgctctgtattcttggtttgtctttgatgttgaaaagacagtgcacttgtgcttttggtggggctcctggcctgcatgctgcttcctaggattggcaggtattgcatatcaccacataccagacacccacaggagagaaaaatcatcaggatcaagaggccagattgggctgctggcaaagtttatctgcaggctaagtgcttgttgctctcctgcttatccatgctgcctagtgtgggctgtccctagaagggaattctgtgtccctctgagtgctgcaactactctcagggttttactgtagtggttttacctcgcctattggttgacccatctacctgtctcatttgagttgagtgtgaattgtttaggatattgcaattagaggtggtgcgggctggctggttgctataagccatcttaacatttggctaagctcactcctgtgtgctgggcctgacaaggtcctcttggttcctcttgtgatgactgtatcttttacacagttaataaaacatcctcagatgttataagctggagtgaactatttatttttctattttttttattttactttaagttctgggatacatgtgctgaatgtgcaggtttgttacatagatatacatgtgccatggtggtttgctgcacctatcaacccatcatctaggttttaagcctcacatgcattagatatttgtcctaatgctctccctccccttgtcccccaccccctgacaggccctggtatgtgatgttcccctccctgtgtccatgtgttctcattgttcaactcccacttatgagtgagaacatgcggtgtttggttttctgttcctgtgttagtttgctgaggatgattgtttccaacttcatccatgtggactattttttcatcatattctacccttcccaagtcacacctagggggctgaggagtgacaggtggagcagggcaaggctggattaaacattaatgcagctatcaccactgcccagaggagcaagttcccagagccaagctacagagctaccctagtgtccccaggctgaggaggtagtgactggcatacatggctcagtttgtccaggtcctggctgaaataggtgactttggtcgcttccagatacagctattgatcctgctgtgtgttctcaacttcctgtctcccttctacttttttgcccatgtcttcatggtcctagatgagccccaccactgtg

SEQ ID NO: 29273 - DNA, 2300 bp, Homo sapien
ttcctttttgcatatataaaagacttatttgtatcttcttttttattttattttttacataatttcactaaagatttgtctatcttattaatctattcaaggaactaattttgaactttgttgattccctttcttatacttttgtttctagttccttaatttttgtcttaactttactacgttcttcctttactttctttagatttattcttttgtgttttttcccacttcttatgatggttgtttagttgattaattttcagtctttctgattttctgttataaagcacttaaagctataaacttgccacaagtaccactttttataccacccatatgttttgatatgttatggttcttactgtcacttatttgtaaatatttttaaactcccaccatgatttcttctttaacttgtattcacaagttttttttttaacttaaaaacatatggagttatctctatctctatcatctctatctctatcttcattctatcctcgtgggttagaagactcaatattgttgttaagatataaattcttctccactatagattcaatacaatctcaatgattgtatttatttaatacaatcaatatttgaatttgcttacatttttcccatttttaccactcattattacatctccagctgtcctccagagatcattttccttcttatctttcatttatttatttaaatatggaacactttacaaatttgtgtgtcatccttgtgcagaggtcatgctaatcttctctatatcgttccaattttagtatatgtgctaccgaagccagcacccttcttatcttttaaaagttcaatcaggccgggcgcggtggctcacgcctgtaatcctagcactttgggaggctgaggtgggcggatcatgaggtcaggagatcaagaccatcctggccaacacggtgaaaccccatctctactaaaaaaaatacaaaaaattagccgggcgtggtggcgggcacctgtagtcccacctacttgggaggctgaggcaggagaatggcgtgaacctgggaggcagagcttgcagtgagccgagatcacactactgcactccagcctggatgacagagcgagactctgtctcaaaaaaaaaaaaaaagttcaatcaaatcaggtctcttactgtgtgttctctcaatttcttgttatctctataattacctttattttaccctagttcttgacagacaattttgctgggtatacaattctatgtggtctataattttccatccacattttgaaaatattcttcgctctcctggtttccgtgttgcttaactttcatcttctttttttgagacagggtcttgctctgttacccaggctggagtgcggtggcgtgatcatggctcactgcagcctcgacctccctggctcaggtgatcctcccacctcagcctcccgagtagctgagactacaggcacatgccaccaagcctggctaaatttttttgaattttcttgtaaagacagggtttcactatgttgcctaggctggtcttgaacccctgggctcaagtgatctacctgcctgcacctgcttctaacaggagactgctgaggctcttcattagtcagtggcctgccttctctccagctgattttcaagatcttttctttgtcattggtgtcctgcagcttcattgcaatgtgtctagccatggttttcttttttatttatcgtgcctaagttacatttcctggatctaagaatttgttttaaaagttttagaaaacgtattgtttttatttcgtctccatttctccttgtgggcttccaatttgatacatgttaaatcttctatctaccaagtctctttacctctctctcacatttcagcaatttattccagttcactgattctttgtgtcaaatttgtttaactttcctcttagtgtttttatctcaacaacaacaacttgccgttcaacaagctttcatttttaaaagttcataatcttccttccaaaagtgtctgctttttcctgattgttgttttaagttcattttcgtaattacaacctttaaatccttaaaaagttcatacaatagctgttctaaattttgtatctgacagtttcaacatctgcagtctaaaagtctgtggtttctggattctgtcgacttgtagagtggcttgccttctcaagctataatctctttgcttgatgtacctctgtgagagtcttgcagaatcaacttgaagaaattttcctttagagaaggctcgcttctgcctctgctctgagccaaggggtgcccc

SEQ ID NO: 29274 - DNA, 2300 bp, Homo sapien
ctatatcgttccaattttagtatatgtgctaccgaagccagcacccttcttatcttttaaaagttcaatcaggccgggcgcggtggctcacgcctgtaatcctagcactttgggaggctgaggtgggcggatcatgaggtcaggagatcaagaccatcctggccaacacggtgaaaccccatctctactaaaaaaaatacaaaaaattagccgggcgtggtggcgggcacctgtagtcccacctacttgggaggctgaggcaggagaatggcgtgaacctgggaggcagagcttgcagtgagccgagatcacactactgcactccagcctggatgacagagcgagactctgtctcaaaaaaaaaaaaaaagttcaatcaaatcaggtctcttactgtgtgttctctcaatttcttgttatctctataattacctttattttaccctagttcttgacagacaattttgctgggtatacaattctatgtggtctataattttccatccacattttgaaaatattcttcgctctcctggtttccgtgttgcttaactttcatcttctttttttgagacagggtcttgctctgttacccaggctggagtgcggtggcgtgatcatggctcactgcagcctcgacctccctggctcaggtgatcctcccacctcagcctcccgagtagctgagactacaggcacatgccaccaagcctggctaaatttttttgaattttcttgtaaagacagggtttcactatgttgcctaggctggtcttgaacccctgggctcaagtgatctacctgcctgcacctgcttctaacaggagactgctgaggctcttcattagtcagtggcctgccttctctccagctgattttcaagatcttttctttgtcattggtgtcctgcagcttcattgcaatgtgtctagccatggttttcttttttatttatcgtgcctaagttacatttcctggatctaagaatttgttttaaaagttttagaaaacgtattgtttttatttcgtctccatttctccttgtgggcttccaatttgatacatgttaaatcttctatctaccaagtctctttacctctctctcacatttcagcaatttattccagttcactgattctttgtgtcaaatttgtttaactttcctcttagtgtttttatctcaacaacaacaacttgccgttcaacaagctttcatttttaaaagttcataatcttccttccaaaagtgtctgctttttcctgattgttgttttaagttcattttcgtaattacaacctttaaatccttaaaaagttcatacaatagctgttctaaattttgtatctgacagtttcaacatctgcagtctaaaagtctgtggtttctggattctgtcgacttgtagagtggcttgccttctcaagctataatctctttgcttgatgtacctctgtgagagtcttgcagaatcaacttgaagaaattttcctttagagaaggctcgcttctgcctctgctctgagccaaggggtgccccgcaccaggaactgttaccccttctgagagttttggctcaaaacagagttttaagcttagtttcccctccttgctgctgttgcaaggtaatatgctgacagtcagtactgctcaccttcctccttccccactcctgcctttccagtttggctccatgctgcactgcctcaccactgcaccagccttggtgccccatctctgtggcccaggcttccagcctcccaccttgggcccacctcctggctacagccgacgatgcagatctttgtttgtttttgaagaaaaggtccctagagacctctcctaccttttgcaagaccactggtgtctcagtgtgtgtgtaaacaaaaagcttgagttgtggggaagttgtaggagagttcctaagaacttagtccttcatgacaacagaagcacagcattttctaaaacattaaaaatctcaattacactaaaactccaggatggttgggccaggggggaataaatcatgttaactaagaaagcaagggagggaactactgagaacgtcaaggttggaatccatattgcttcaagccagaggccagttcctagtcggtggctcccatgctggtctctgatgtttaggaagtggtgtcagcagagactgagctgcaccctttctttggacagatggcaggagaggagaacttcaaggaagagctcagatcccaggatgcttccaggaacttgaaccagcatgaggtagcaggacatccacattcctggtctctggagatgc

SEQ ID NO: 29275 - DNA, 2300 bp, Homo sapien
ggcagtctagtcacaggcaagaaggagatttgttttgggaaagagctgttatcatctttgttttaaactataaagtaagttcctcccaaagttagttctgcctatgcccatgaataagcaatgacagcttggaggctagaagcaagatggaattggttaagtcagatctctttcactgtctcagttataattttgcaatggcagtttcattaggccacgttaactaacttctctacacctcagtttctcactctgtaaaatgaagatggtaagttatacgaagttcaaagtgagtttatactggtagacatcagaatagtgattgccttgggagtttaggaagggtcatgaaggaaacttctggagtggtggaaatgttctgttttgatctcagtgtttatatgggtatatacatacatttttaaaaagtcattggccaggcacggtgactcacgcctgtaatcccagcactttgggaggctgaggcaggtggatcacatgaggtcggagtttgagaccagcctgaccaacatggtgaaaccccatctctactaaaaatacaaaattagagccatacgcagtggctcacgcttgtaatcccagcactttgagaggatgaggcaggcggaacacctgaggtcgggagttcaagaccagcctaacaaacatggagaaacctcgtctctactaaaaatacaaaattagctgggcgtggtggcggatgcctgtaatctcagctactcgggaggctgaggcaggagaatcacttgaacccagaaggcagaggtttcaatgagctgaaatcacgccattgcactccagcctgggcaacaagagtgaaactccgtttcaaaaaaaaaaaaaaattagctgggtgcggtggtgtgcgcctgtaatcccagctacatgggaggctgaggcagaagaatcagttgaaccagggaggtggaggttgcagtgaccggagatcacgccactgcactccagcctgggtgacaggagtgaaactctgtcaaaaaaaaaaaaaaaagtcatcaagcagttaagattagattaaaatgcagtaatctaatcttaattagattagatacttagatacctttatttaaaattttttaaaagtggagataatagtacctacttcccagcatcattgtgacgattaaatgtgctcagcaggttgcataattgtttctgatctagctagtatccagtatttgtctattgtcacaggtggtgactgctggaggggctgagtccccaataagctgtgaatgtcttggaggacaagtatgttggccccttcttgttctagcagtgaagaggatcccatgtagactccaagcagctcaagttcagcaagggagacagaccattgcaagtgcatgaaaagggcactggtgggctgggaagttcgtaggaggagcctctcacatgctgggtttggggaggaattctggaaagcagttagtcttagggacgggaaggatgtagctggtgggacaggcgccctcagctccatgaataaaaggagtgggtctgactctggttctcattcccctttaccatgcctggcacacattagaccatcaataccaattgactccaggaaggagtgtctccccgtgggggcatcaggagccgctgagtttaaatacacaggtgggatgtgacacactgggaaccattcagatttgctggatctggatagggcttgtcaggactcagtgcttccaaccccagggcccatttccctgtggcccctgagtcaccaccatgggtggacagctgctccagtgccaagatacagccacagaggacggcaggcccagggcctccagaaggacaggcaggctccctctgaaagacaagccggcttatagctgaaacctctggcccaggcgtcctctaagggaagccaggcggtgtcagggcacggcccatgaagacataagatgaagatggggagaaccagagggggtgcgcttcgaaggaaagcgggctgcgtgggggcaccgtcgattgcacaggacgcggtcccggctcgcgtagccccgcaggcggcgccagagcgcaagcccgcctcgtgactccggtccacagtccggccgggcggagctaggggcgggcccctgcgtctctgggcgctggagcgcggcgactatcacgccgcgtggcggacggacggactgacggacgcgcagccttacccgaaaggccatggcggagcacgcccctcgccgctgctgcctgggctgggacttcagcacgcagcaggtacagtcgcctggccgcagggc

SEQ ID NO: 29276 - DNA, 2300 bp, Homo sapien
aaaaataatagtgtctctgttccacaggttcaaccttgtccccaggggtgattgtgattaggccagcttgggttacatgacctcgctggagtagaagttttggggatagggccaactctacttgggccacctgaaataacaatatgtgggtggggaaaataccccgatccctcacctggtggcttggtcagaacagtcaccgtgctgtgtgaagagcaagggttattcactcagggttgtccagtcctgatgtgggagaggccctccaggaaggcccagaagttactcacttctctatcctgtgggtgcagagccattgtttactgcctgagtatttgattactaaggacattttaaggattcaaaggccaagatcacattgttcagtagatatcaaacagatttaatgcttatttttaaaatatttaattattagaaacgaggtctcactgtgttgcccaggctggactcctgggctccagagttcctctcgcttcagcctcctgagtagctgggattacaagcgcacactactgtgcctggttggggcttacttttaaaagcttttatggtacctactcctatccagagcatgctacattaaactcactttgtggaggtaattgttcattctgtgtaggatttgggttcctaagaatttatattccttttccagcgttttacagggaaccaaattgcaaaaatttaccagcagaaccccgaggcctactcacatacggaggttggttaaatgttcctgtttgattgaaagtcacagttgaattcttttcataatatgttagaatagatacatcttacgtgcagtgactgaaaacattgataagcagacattaacaaatgatatatttgatttgcttttttctcattgtcaggacatttccaaagaggaggggaagaatggaatgtgggaaagagaagtcaggggttctcctgaccagaagggtgagggtgagggtccaggtgggagcactggggactgacgtgttcctgaggccacctgaatggaagatctgagtgtctgagcaggctgtgtctgctcactttcctatgtggttaacgcaggagggctaccaggcacatgattggcatagagtcagtgttttctttggaaatgtataggactgggcatttgtgtccccagctgtggcccttcagccagagcctctgtcacaggaacccaggttcattcctggctccacagttgctgaagccagcacttgttgctgcctgagaaacagccccacgccctggctagtgattttcatcttgtgataaggaaacgatcagctcacattaaaccaaagcacctttttaatcttagaaattaacatgtggtttattatttaatgatttgaggttccagattattctgcagcattagccattaatgtaggctttgggtagaggggtgaaaaccctccctaaattctgtgtgtggaacgaagtttgcctgacagaggacaggaggtgataacattctctccacagttccaaaggcccatgattctcatgtggaagtacagacccttagggtggcattgaaaatccatcatctatttctctggctagtgctcagggtctgtggcttctgaggagccagctttcctgacgccctgagagtgtcctggttggttctgaggccacacatccacttcccttgtaaccagaaggaaatgccaaggagatagaggaaggaaatcagggcacacattccccagcatgtggattccggatggaaatgcagcttccctaagccctttctcatagggcttttggtttttgtctcttttgaacttggcagttttatggcccatcagaaactgtagagaatgaatgctctcccgaggagtctgctcatggtattccagctgctcctatctgagatgcacagtctccaccattacttgggccttttgttcaaagtttccacttccctctccaattttttttcatgctttgtgtgtgtcagaagcattcagtagcgtagggtatgtggaagtgaggcacctctcactgtttctttcctttacagagaatttctttggtcagtagctttgctgcttccctgttccttggctcttactcccctattgactacagtgatggtgagcctcggggtatggggtgggtgcctgggcagtgtgcatgtggcatgtgggtgtgcaagcagtgggagccccacctaccccgagtgggtgccaatcttgtagccctgtcatctgttgccaggaaggaagtgtattcattatcttttaccacataacaaatgaccccaacac

SEQ ID NO: 29277 - DNA, 2300 bp, Homo sapien
caaggtaggcggattatgaggtcaggagatcgagatcatcctggcctagagggtgaaaccccgtctctactaaaatacaaaaaaaaaaagaaaatagctgggcatggtggcgcacgcctgtagtcccagctactcgggaggctgaggcaggggaatagcttgaacttgggaggcggaggttgcagtgagctgttgcagtgagccgagatcgcaccactgcactccagcctggcaacagagcaagactccatctcaaaacaaaaaacaaaaaaaaacaaacttcttcttctttctcctttatttctatgctgaggttttgttttgttttgtttaagacaaggtctctgttgtccagcctggagtgcagtggcgtagtcatggctcactgcagcctcgacctcctagactcaggtgatcttcccacccccacctcagcctcccggatagctgggactacaggcacacaccaccacacctggctaatttttgtagatatagggtttcgccatgttgcccaggctgaactcgaactcctgggctcaagtgatcccacccacttcaccctcccaaagtactaggattacaggcatgaatcctagtgctaggattaccgcacccaggctgtatggtagttttgttggaatatacaacctaaataaatattttaagagagaattcaataggtgatggttttgaggcctgacatgtccaacaaggcctttgtttcatcctcccaaatactggctgggtaaaagactctatgttcaaaatacttttcctgagaactgtgaagatactcttccataatcttctggccttcagggttgctgatgagaagtatggggtctgcttcataattcttttgtggaagtgggaaaggagtttccctttagggacttcactgccatcctgcactgtgttttgttttattctttttccctttctgtgcttgccaaagggtacctgggccactgccctgctctgccctccaaaaccaaagcccgagccaaatcttagctcaccagtccctacccagagggatactaaccacttcatttggagatatcttctccccatctgggtctggggatgactgtcttgtgtagccagtctgcgagtatgagtggagatggaaccagagtcttttgattagtttctctgctgtccaccccaccaccattccagtccctcatccattctgctctgagctgggattttctagcatttggttaggaaaactggtcctcacatcttcagagggcccttcttcactcctggtggtggtggtgtttgtatatctgacgctactacctaccttccctagaaattgctcattgtttcttgcccaccaatggcaaccttccccctgctactcatttgcttggtgagtaattattgagtgccccctgtatgccagatggtgtgctaggcaccatggttatagtggtgacccggagagacacagtatctggcctcgtggactttacagctcagcaaaagagggatcttaaaccaataatcactgaaatatatgggcacaagttgggaaaagtgctctgaggaaaagcagatggtgctgagcgctaaggagggcctcctgagcaagtgatggtcttaggtgcatcttagctgaggagaagggaacaggcatgtgaagagtggaaagaacattccatacagtgaaaaggctctgaggcagaatgagtggagagaagaccaggctgtccagaatgtggtgaacgaggggagagaggaggggcaggcagacccttccccatcatatgtcgaggttacccgacctattccatgaaaggcacaaccacaaagagaaagacaagctgggtcctgctggagacaagcctgcacttgccatttttttgttttgttttgtaattttattgaggtacaatctatatgacataaaaatcatccattttaagtgtccaattcattgatttttcataaatgtactgaattgtgcaaccatcactataatccagttttagaacagtttgccaccccagtgagatccttcgtggtgtttttggttaacgtcttcacttgcaacatgcactaatgtgaagtgacctttcccttctaggtcttgcaggtggaacagatgtgcccttttcagaggttgtgaagttagctccaaatcccagactagctgctaccccaagcccgggagcttctcaggtgagagaccatcggaatttgtttgtagcatttgcattatgaaagcccgctagggttttttcccccaccaaaaggtcacctacattgaacgtgatgtgctcaac

SEQ ID NO: 29278 - DNA, 2300 bp, Homo sapien
gcttagataataagtcacctgtagggattatagcaagcagggaccatcattttcacatagaatttcccaggactggaagggacttttaaagacccagaaatctttctgggcagtgcctccaaagtgtggcccctgaggtgttcctgctgctctggtgaccgggggtagttgaccctatttcaatgtcaatcagaacaatatacattcctttataaacttgttttttttttgagagagagtctcactctgtcacctaggatggagtgcagtggtgcaatctcagctcactgcaacctccgcctccctcctgtgttcaagcgattctcctgcctcagcctcctaccgagtagttggaattacaggtgtgtgtcaccatgcccagctaatttttgtattatttagtagagacaggtttttgccatgttggtcaggctggtctcgaactcctgacctcaagagcctcctgggcctctaaaagtgctggaattacaggtttgagccacctcgccctgcctatagtgaacatttacataatattttgtttgactaggtttctgccattaagaagatgcaaaaccctgagggagtgtacctcttcactttgcatatgggaaaactgaggctcagagaagtgaaatgactgagacctccaggtgccacctccctttcagctgctcctgccctgctccaagcaaggatgtgccaagtcaagagaagacagaggacaattaatgttatctgaggatctcggagcctcatccctgagctatgatggtctttccctccttagttgggagccccatcacgttcctccgaagctctagttgtgtgataaggagggtggaatctgagacagagaacgatggccctccaaggagggagttcggggtgaggaaaacagcaaaaccatgtgctagacaagatcttcaactgcagggctctggaggcaactgggaagttttgaaagtgcagattgaagctcagggccgctgtgggtggcgcaggaactgcagaagacaagataggattagggagggccagcaggttgccagaggcccttttccacctgctgggcttagaggggcgggactctgcccgctccctcacttggttgggtttaaatgaccactccccgccctagctgtgcctttgagtgtgtggcaagggattgcagacgggagactgcttgtcaattcagggaagtcagcctctttctgccacttaattcgcccatcagtagagatccgactttcccacggttcactgtcacccccattgcacaggtggggaatccaaggcacagaggcgtctgggccagagtcccgggactatccactcattccggggttgtagggcagcatgtgtcaggagcttgggctcgagcgtgcggggcactaattgcgagtgcagtggccacaggctcccgggcaaagtggtcaggagcccattcccgccacctccgtccgcgcgccccgccctgtcctccagcaagttggtgcacgcgcgtcctcccacagggcgcgggatgggggcggggcctccgtgttgttgtttctctggggccccgcccctcaggggggcgcggaccacgcggccggagggcccgcctcccctccccctccccgcccagcccgcccgcctctttgtatccaacatccgggtttccccgctggctcggctccgtggccgccgctcaggagccattttggactcggttcagctcccctcccccccacccctccccccgttcatggcccctccggactcggcccctgcgcccggggcccgggcccagccccgccgcgctatgcctgagtcgggcgcgccccggcccgtgccccgccgccgccccccggcccccgcgtcgccccggagcccgggccgcagcctgcgccgcccgcagcggccctgagcccggccccgccgaccggcccttggagcccgaacgctgctcggggacgaaggcgcaggaagcgcgcagggaacgagaccgaaggaaggagcgggaaggagagcgcagccgccgcctggccctgcgcgccccgggagcgccgtgcggccctgcccgcgggctccgggtgtgcgcggggcggcgccgcggaacatgacggcgccctgggtggccctcgccctcctctggggatcgctgtgcgccggtaagaactgggcgcggcgcggggacgccgagagggcgcgcggggctggcctctggcgccgcgcggtgtttaccaacaaagggcgggcccggggcctcgtcgccgcaccacctgtattcagccctcacctccgggggcgtgggc

SEQ ID NO: 29279 - DNA, 2300 bp, Homo sapien
aaatatactattgaagttcattccatctcatggaaagaatgtgtccccccaaaattcatacaatgaagttctgacccccagtgtaatggtatttggagacgggacctttgggaggtagtgagggttagattaagtcatgagggtggggccatcaggtaatgagaacaggattcacagtcttacaaaaagaggaaaacacccccttgccccaccccacccctgtcatttgagaatgcagtaagaaggcagatatctgcaagccaggaagagggtcctcaccagaacccaaccatgccagcaccctgcaccctgggctcagacttagagcttccagaactttgacaatataaatttctgctgtttaagccaccagtctacagtattttgttatggcagccccagctaagacacagctgtttcttcttccttttattaacacgactactagaaaacgttgttttatatctatccatagttcatacactatttctgtcacacagcactcttctagatgttccttctagcaggcattgtgtgctgcacagtatgggggttattccaaacagcaagccaggagcttgaaattaaagggcatccctgaagccaaagcaacaggacggtcaggtctgctccaaactgggcctggggcagctcttttcacagttctccacaggtcagggactggttgatgtgactacaagaaatacccagtgacccccaccttcctcccagggcaggaatacaggtccttatagtgtgactctgactgccccctggcagggtacactgctcagcactgcccaagctaggtgactgaagcagaggaaaaagaaaggacatacagtccttccaggggtctgatgccgccctgccctgcctaaggagggaggtgtgagactggtgtgatccccagatcccaggtctcaagctgtcctgtcttgggaggaagctctcctaaaggcctgggcttggaagagccccagcacttccagggatcaggcacccagcgggtctggaggcagtcaggtgggctgcggtctgcctatcaagtcagcttgctgccgccctccctctagcagaccaatgcctcccctttcactttcgagcactccttcttggggaaaaggcatcccaagggagcggggcaaaaaagagcagaaagtccaacacgaccaccacttcgcctccaagaagcggctccaggagagctgcaacgccctcttccatacggtactcaggtgccagctggtctttgcccttcggtttccggactcaggctgcgcgcgcgcgcgctactaccctacagaactcactcgctttcggtgtaaactaagcctcacgacgacgcacaggagaaggtagaaccagggtgggaatgggacgcagatcccaaatccccacccccgcagcagcgtggggactccggccccgcccctgcacgcccggccccgcccctcgagggtttcccagactccaggcggctgccaccgagggcggcgggggacccgcgctgcatgtgtaatgggggctgggaacaaagacgcgcaggacccggcggccgggtaccagccgccccgaccttctcgccagagcttcaatgcccagctccccacgtttcccaggactggccaggggacgtcccggcgcgcccgccggggttaggcgcaccccggcaccactgagagagggaaatcggtgcttggaccgtaggagaaacaagctttccaggcggaactccgcttgtttacgcccgcgcccacatacccccaaacacacatgcgctggccgaacacctccagccacacgcccgcagccgcgggcgagctgagcgctggtcacccaccccgccacgtgcctcctggaggcccgaaggaagagggacctgttgggttttccatcttacccaccccctcccctcccaagtgcccaaacaaagcggtcccgcgaagcgaccacactccgcatcccggggccaacggcagggaaagagggagcaggtgggagccagcaccaacagcccgccgggccggtaacgcgacgcagactggtggcaagagatgcaggggactttgggctgcgtgaagccgcccccttcgcttcgctacacttagtgactctgagggacatgcaaccctccccgcatgctgctgctgctgctgcacctacaatcctgccacccccaatgagatctgcccacccctcttggccgccttccccacgctcaggttttcctcactctttccctgggttccacgcgcccgcgtagcccgaactccgaccctgaggctccgcgtcccggc

SEQ ID NO: 29280 - DNA, 2300 bp, Homo sapien
taccctcccatcccttcctttaagtctcaggtatccctatggaacacctaggaaccttgattaaagtttacaaatcactggcccaattccaattttacaggtgggcaaacaggcccagagggagttttcctaccctgaggcaggcaacccttccagttcttgacctcttgggaccaaaagtggggttacacttgttcagaagtagaggatctggattaggaaaagccatctaatatttatctctctagtatttagcacagtgtctggcacttacaagggccttaagaaatacagtacctcagtgattgtgtatttagtaaattctggggaaagctgctgaagtagccttgaagcctacagataccagtgttgtctggttgtatttgttaggattcttggttgcaggtgacagaagccattagacaaaaaagggggtttcactgaaaggattctgggggaaatgactagccaagacttcagaaaggcaggatgtatgtgggcttcaggagcctgtgggagttggggtcataacattgcaggcctccacctgtgtcctggtatttcttccattattgctcagagcaagaccagatgcatctgctcctttgacttcttagcaggaaacaaggctgtagacagtgccagagcttttttttttttttttagacagagtcttgctctattgcccagattggagtgcagtggcacgatctcagctcactgcaacctccgtctcctgggttcaagcaattctgcctcagcctttcgagtagctgggattacaggcacgcgccaccacacctggttgatttttgtattgttagtagagacggggtttcaccatgttggccaggctggtctcaaattcctgacctcaggtgatcctccagtcttggcctcccgaagtgctgggattgcaggcatgagccactgcgcctgtgagttttacgtcacagctttgctacccagagagactactagatcgaaaatccctaggaaggactctggttgatgtagcttaaccagtcagggtccttcagaagaggtattcctggcaagggggtagcctcccatttgaggctgtcaaaataatgtgcacacttcagtaggttgttagaagtggcctcctggtcagtgaatcatcagtgggatcagatgaaagttattcctaccagttatctaagaaataggaaacttgaagtttctgctaagaactaagtccacacggaatgctagagatcatgctgcaaaatgaagactcatttgtttgtgagtggtagtccatgaaatctatcctttctttgccagcaggcgttcagcaatctggattttatattctatcaagacaaagagtagagatgactcaaacatttctaacatttatagagcacttagtgacatgcccctggtacttccctaaacattttacatgtgtcatctcctttaatcctcacaagaacgctatggtctaagtattattattccaatttaaaagagaaggttggggacagtgacacacacctggacttacagcactttgggaggccgaggcgggaagattgcttgaggccagaagttggataccagcctgggcaacataaggagacccccttctttaccgctcccccactcccgccaaaaatttagccgggcaatgtggcacgtgcctgtagtcccagctactcaggaggctgaggcaggaggatcgcttgagcccacgagttcgagatcgcagtaagctatgatcattccactgtactgcagcctgggtaacagagaccctgtcgctaaataaataaatagacctgagttggaatatcggctctggagaccttagtgtaaccatgcgcaagtgtttactcacctattaaatgagactaaaggtattttcttctcatgactatatatagcataccactaagccctctagacatcatattccccatccatcgccccgtccagtggaccagggatgaagcggggatgcgctaggcatcccggtttgtcaccagggggcgtgcgaggccctcagcttggcgggcggtgaggcgtggggtgacggggggatggcgggggccggcatgcgcgcgcatgcgccgtggtaaaaggccggtacctcgggcaagatggctatcaagagtatcgcttcccgcctccggggttcccgtcgttttctgagcggcttcgtggctggggctgtagtgggcgctgcgggagctgggctcgcggccctgcagttcttccggagtcagggcgctgagggagcgttgacagggaagcagccggatggtaagtctgtg

SEQ ID NO: 29281 - DNA, 2300 bp, Homo sapien
cctgggcttctctccccctgtttaaattcagggtgcatgtagacttaccaggctcagcccacctctcctgctggcaacatccagttgcccaatactaaacaggagagtgaaaaccccacttctgctacatatggacggaagggaggcaggtatccacccctactcccagcagcttctatcctagccttgtctcctgcttgacccaatgtcagtttgcaagtagaagcttcattctgaggccgagaagcccgtgatggaagttcttaggggaggtaggaccttcctgctactgtactctcctgcctggtaggtgtgactctgggaaggcggctgcacgtgggttgaaacgttgacactgcctgcacttccccttctggccgatagtgggagctgctagccaacctgaggctcgtcaggcgctaaaggctggcagccgacctgtgtggtccatccgtctgtaccccagacaccccactcaactcggggccggagaggcccatgtcctgaactttcctgtggactgactttcctactgatcccctcctgcaagcagagcagcccctccgtatgtacctaaggcgtccaacgaagccccacacccaggtcgcaaacggacgctgtcccccacccccctctttgccctcccacctcttcaagatccccatcatggaggagcaggtcccagcctctgggctcccaaacccagcacctctgtgccctctgagaccctggcacccatttggctctctaagagcggttcttgcttttgggagccctgaaaatgtggcagaaaagtgtaccatcccttccaatgactgtacttttttcgtgggcaaaagctgatggcctgttttttgttgttgttttgttttgtttttgtttttgtttttagaagcgcaagatttattgtgaagagggaaagaacaaagcttccacagcgtggaaggggacccaagcgggttgccctgatggcctgttttgtttaaacaagaagtgtgtccccataggtcctgggcatgggcatgggagcaactgtttgtcagcgtatgtctccgtgtgtgtgtgcctgtgaccatgtctctgagtgagaaacagtgggtgtgtaagtatgtgactccaggctctgcatgtgtcaaggtgaaggttgtatgtggctcaagagggtggaagtatatatataaagaggtatatacatgtatatatatgtatgtgtgtgtgtgtgtttgcgcgcgcgcgtgtgtgggtgtctctgtgttggttgcctgcttgcttctgggtctgggtgtgtgtttggttctgtcagcatgtgcgtccgtgtgttcaggtagatgtgtaccattgtgcagatttctgtggcatcactaagtgtgtctccaggaaagtgtggttcgagtgagtgtgtgtgtctctgtgtcagtgtgtcagtggatgtgtgtctaagtcatgtgggtgtctaagtttgtcagagtgtcttcctcagtgtcagtgtgtgtcaatgatgtgtctgtctgtgtctgtgtgggtgtgtgggggtgtgtatctgtctcagggtgcatgtgtgtgtctgtgtcagtgcaggtatgcctatggcagcgtgtgtctgtctcggcatgagtgtcagtgtatgcccgtgtccacgtgggtgggtgggtgtctggtagccttcccaagtcagcaaggttgcgtgtgtgtgtgtgtatactctggcgggtgctggtgtgtatgccagtgtttgttaatgtgagcctgtccgcgtccgcgtgggtggccatctgtggtgaagcgtcgccgggtcgccgtgtgtgtacccccgcctatgtctgtctgtccgcggccgcgtgtgcggctgtctgtggctgtgagcccccgggtcagtgtgggagtgtgcgccccggcgggcgctggtgtgtcccccctccgagcgggcggagcaccacgtgcggagccctgggcgcgtcgctctggggcggagccagcccggggccccaagccccaggccgaacccaggcggggcccgccccgaccccgcccccgaccccgcccccagcccgagcccgcgccgcctgcccagcccgggagcccgaacagagccgcggagccgagacggcggcggcgcccgtaggatgcagggatcgctcccccggggccgctgagcctgcgcccagtgccccgagccccgcgccgagccgagtccgcgccaagcagcagccgcccaccccggggcccggccgggggaccagcaggtgagcgagtgcccccgcgcccggcagccctggcccggccggagccccctccgcctg

SEQ ID NO: 29282 - DNA, 2300 bp, Homo sapien
catgagacactgaagtggagagatcaaatgaagatctgagccccatggacttctgagagctacagataaagactcagtcatctgcatataaatgagaagtgaagatatgggaatgatgagatgtttccaagagattgtggcaaacatacctgagtttaagtaccgttctgccactcattagtaatgtgatcttggaaattttaactttgctgctctggtatcttatttatatattagagataatacttcacaggtacagtgatagttaatgtaataatgcatgaaaattgcttaatccagagtctgaaatacagtggaatctcagtaaatgctagcgctgttgaagttgttactattgttattattctgaaaacaaaagatagagtgccattattcacaatcatgtatgggaaaagctgagaaaggagagactgagaaggagaagagagaaagttaggaaaaccaagagagtgtcatggtagccaaaatatacagtattttaaggaggaaattgtcaaaacagccaataggaccatcaagataagaactgagatgggcctggacaatatagtggtacactgcctacaaaaaaattttttcaaaactagccgagtgtggtgacatgtgcctatagcccagctattcgggaggctgaggtgggagaattgcttgagcccaggagacagaggttgcagtgagcagagattgcaccactgcactctagtccgggtgacagtgataccctgtctcaaaaaaaaaaaaagaaaaagaaaaagaaaaaaacaaaaaagacaagaactgagaagggccccctgactttagccacaaggcaatctcttgtatccctgcaaggaagcattttagtgagataggagggcaaaatccaagcttcaaagactgaaaagtgactggaaacagtgagtagaagtaagtcctttattaaaagccaatagagaacaggagagaggagggaagacctggatgggctctgcatcaagggaaagtttttaaagttggaggaaagttaagcatctttaaatgctgataggaaagagctggcagacaaggagagagaaaaaaatgaggtagatatgagataagatcctaagcagagggaaaggaatggtccttagaatgtaggaagatacctctcatgttgtaagagaagggaaggaggaaagaaggctgcagacacaggtgagttggaggtttgatggtatgaagttggcagagttctgtttttctccatgaactaggaaatatggtcattggcttactgcaagggaagacagggaatagtgagaaaagagtgtatttgaaacctcagactagaagaaactgctgactagggataccatatgattcccaggcaatactgaggttccccataacccctcagcagttcaggggaactgttctagattgacttagccttgggatttaggataagggtgagggagtggcaaaattgtggaccacaggtctaatctggttatggggaaaagtgttcagccacagactgaacctggaggtcccagagaaattggaggtcccaatgaaattctccaataatctggagttctccagtaacttggaggtccaaatgaaattcaaacaggtggagaaatgttgacaatgtcaataaataaaagattgtgataagaaagtagcatgagacttaagataaagtagactataaaccaaagtctttgatgaatatgggagagtgcctggaactcagtggtcctggaaatgaggagagagggcagcatggctaaatctggtggtggtggtaggatggtacaaagtggtgaagaagcaatgacatagaagcacatggggagcaaagacataaccctgaggcacctggaggagggttgaataaacagcctcccctgaatgccttgcaggggaatgggttcctgggaggagccaagtgtgagttcagggaggggccagatatgagggtgggagaagggctgttctgacaatcaagatgggacagatgagagggacagggccagtgggcaagctgtcacctctctgtggttatgtccactcttataagagtataaatacttcctgaagaagaatgagaagatggaattccccattggatccctcgaaactaacaacttccgtcgctttactccggagtcactggtggagatagagaagcaaattgctgccaagcagggaacaaagaaagccagagagaagcatagggagcagaaggaccaagaagagaagcctcggccccagctggacttgaaagcctgcaaccagctgcccaagttcta

SEQ ID NO: 29283 - DNA, 2300 bp, Homo sapien
cacctatcctatgcatagacatagccccactacttctctctgtagtagcatttgttctattttagtttcctgtctttgtcttttctactactccaggacagtgtaactgttggaccagggactgtgtttcttcaccgttagtgcctagcaccatgcctagaacagacacagggcatataattgttgaaggaacaaaccagtgatatgttgggtttcttactataatttcctggagtgggtgtaagagtcagccctagattagcatccagtaaataagaaagaaagaggatggctggcatggggaaataggcattcaacctgaatactactgcttcttttcagtgtctagtttgaaccctgtggctgtagagaaagtcctcaaagaagctattatcctatggtagagtaaccctattaacaaaccctttctgcttttgtgtccggaattggtgggttcttggtctcactgacttcaagaatgaagcctcggactctcgcggtgagtgttacggctcttaaggcagtgcgtctggagttgttcattcctcctggtgggctcgtggtcttgctggcttcaagagtgaagctgcagaccttcgtggtgagtgttacagctcataaaagcagtgtggacccaaagagtaagcagtagcaagatttattgcaaagagcaaaagaacaaagcttccacagtgtggaaggggaccccagcgggttgccactgctggctccagcagcctgattttattctcttatctggccccacccacattctgctgattggtagagcctagtggcctgttttgacagggtgctgattggtgcgtttacattccctgagctagatacaaaggttctccacgtccccatcagattagttagatacagagtatagacacaaaggttctccaaggccccaccagagcagctagatacagagtgtcgattggtgcactcacaaaccctgagctagacacagggtgctgattggtgtatttacaatccctgagctagatataaagactctccacgtccccaccagactcaggagctcagctggcttcacccagtggatcccgcaccggggccgcaggtggagctgcctgccagtcctgcgccatgcgctcgcactcctcagcccttgggcggtcgatgggactgggcgccgtggagcagagggcggtgcttgtcggggaggctccggccgcacaggagcccatggagggagtgggaggctcaggcatggcgggctgcaggtcccaagccctgccccgcgggaagtcagctaaggcccggtgagaaatcgagtgcagcgccagtgggccgactctgctgggggacccagtacaccctccgcagccactggcccgggtgccaagcccctcactgcccgggccggcagggccagccggctgctccgagtgcggcgcccgccaagcccacgcccacccggaactccagctggcccgcaagcgccgggtgcagccccggttcccgctcgcgcctctccctccacacctccctgcaagctgagggagccggctctggccttggccagcccagaaaggggcttccacagtgcagcggtgggctgaagggctcctcaagtgccgccaaattgggagcccaggcagaggaggcgcctagagcgagcgagggctgtgaggactgccagcacgctgtcacctctcactttcttagggtcgaagtcctagaagtgagagagccggcatgggggtcgcagttcatgcctatgtttatggctcttttgttcccatttcatcacattttaagaactttactgactggatgtgagaaaagacccatgcactttcagttttgcttttgcaatccataactatggcccagtcaattccctgttcctttttctcttgtttgggccatgtggccacttgcctgctacttgcagatcccacttcagcagttcagccggctcagccttattgtcttgcttaatgtctgggtctcagttttagagactgggcttcttctgctcacttgttcctgaactcaacttcccgccttttgccaggtcctccaggaatgatgccctgctttggttttgtctatgccaaaagttcctgctatacccacagtggtggtcatctcttctgatcttcacagccaatcagctcccaaggcccctgacctcagctcagcttttgtagatccttatgacaccatcctttaagactggaatcctagggcaggctgttttattcccgcctcctgaggcctttctgaggatctgtggcttgtctctgtcctgagggtgaaga

SEQ ID NO: 29284 - DNA, 2300 bp, Homo sapien
gagtcattcagaatctgaaaattttatcttcaaatttgttagcaggacttggaaaataattgcacttagctaatttaattctttgatcaattttctagcaatgcaatctattttctgcacagaaaattttcagaattaagtatttctgtacaaatttcaccataagggtttgagtcatttcaaattttaccaattacagcttgtgccatattgattttctattaatttatcaattttatctattttgtggatgcagccttgattttcacagtcgaattttcctgagtttacttattaaagaatacttgattcttccattaattgttttttcagttaataaggaaattttactgcatactgcatgtggttttattttgtcagatttatttgagttcataatttttattcagttttccttttcctgggtcaatttttgcagttttcaatattactttcattttttttgggacagagtctcattctgtggcccaagctcaagtgcagtagagtgatctcagctcactgcaaccactacctcctggttcaagcgattcttgtgcctcagcctcctgagtaggtgggattacaggcacacgccaccacacctagctaatttttcatttttagtagagatgggttttcaccatgttggccaggctggtctcaaacccctggtatcaagcaatctgtctgccttggcctcccagtgggtgtaagccactgcacctggcctcaatgttacttttcttttcttttctttttttgagacagagtctggctgggttacccaggctggagggcagtggcacaatcttggctcactgcaacctccgcctcctggattcaactgattctcctgctcagcctcccgagtggctgggattacaggtgcatgccaccattcccagccaatttttgtatttttagtagagacagggtttcaccatgttggccaggctggtctcaaactcctgacctcaggtaatccatctgccttagcctcccacagtgttaggattacagacatgagccactgtgcctggccaatgttacttttaagatgtggttctttaggtgtgtgtgtgtttttttgtttttttgtttgtttgtttgtttgtttttttatcatctataacaaattttactgtgtacagtttcaggggttgtcagttttattttgtgttatatttatttttagcaagtttctctttcttaagaacccaggcaaaatatctcccagagtcaaaatggcagggtgaaagtgtccagttgcttctttaatcgccccattaggatggcagcacctgccactggactccttgctgtaactgagcatagggtccaggttttaccatccagggtctttcacagcgcatccattttacaggattgactagcatccatattgtgttcactgcaaaagacttatgctctgaattaaatgtctttcttgagctctagagtcaaatgcagcagagtctcattatatgcccacttcattcatacaaattcaattacacatgttcatgaggagggggaaattgaaatagtgcggggaattccatcatccagacctatcaataatgagcttgactctggatgaatgtgggacagacagtgatgaatctacagtcctacattcagtttcagctgacatatggctctcacagtattatcattgcttgccctaatcatagtatacttgaaggatcatacattgcctttatcatggccctgaaacacaatccaactactttgtttggggctaacctgaagaaagagtgtctggttctggccctggaagaaaagctggttgtattgaactcgtttaagtaatgaattgggatgcctcttcagtatggtgccttcctgagggagtttcaagagaaattttggctacatttctttgctttcacgctgttttcagagcctgacatgtgtgaactatgatttccctatattcgagtgccttttggttctctccacttgcaggttccccaggcagcttcagcttcgtgtgttgcaaaccaaatttattccctcgcagtgccctccttttcttgcactctctgtctcagtgagtggccacactgtcctctcatctgctcaagccaggaatctcggtaaggaccatccctcaagtctctctcttcccattaatctcatgtcaaggctatttattaactctcaaatccatgcatgtcattagatcatcccctgtaatttgatttgctacaagagtttccaagctcacttctctgattttagcctcccctttatcttcctatctcaagcctttt

SEQ ID NO: 29285 - DNA, 2300 bp, Homo sapien
aaaattctgcccactgaaagaacttcactatttcaatatttttcaggtccaaagcaggactacaacatatcaatttctagcaagtaccagtatattgtccagagcaacatacctgtattgtattttgcacatcataggtgctcaatagacacttaagcaatttttaaaatacagacatattatttccctacctgtatttcaacagcttcccattggtctaaaagatcctgctgggtatggcctctgcatactcctttcacttctctgtactctaagccttgactctcagttcctgtaatgttccatgctctctcctgctacaagacctttgctcagactgttccctctccttgcctagttaactcttgactcaagatacttcctgtcttacaatcatctttcttcatagtacttatctctgtattaattcctgtctcatcctgggactctaagttctatgactatgtgcactcaccactgattccccaacacctaatatagtgcctggcatatatgatatgctaaataatattttgttaaatgaatgaatacatgaatcagtgaatgaataagcctgtaatgatgcagtaatttacctataagttatcactgccagttttgcttaagaagctttctgccatcacaatttttactcatctaattcacatttctttattaatttaagaagtatttgtcaagacaacttttctaagcattacttatatactagcactatgcaacagaaatttgtgaccacatatgtaattttaaatattctaatatccatgacaaaattaataaattttatttagcctaatatacccccaaacatcatttcaacatgaaatcaatacaaaaaattattaatgagatattttacattcttttcttcaaactagtctttgaaatttgggggtagtttacaattacatatctcaactggaactagctatatttcaagtgctcaagagccacaaatgactagcagatacatcatatgctatatcccacagtgtagttctataggattcactttcactagagagggtctgatcaccctcagctcttataattagtggtcaggaaaaccaccttaagtcaaacctaactgttccagtataagagatgatttaaactagaattgtctctgggaacaattttagctggtgtaccgttttcgccttcctataacatctttttgtcttgttttttttttttaaacttttaagttcaggggtacaagtgcaggtttgttatataggtaaacttgtgtcacgggtgtttgttgtacaggctattttgtcacccaggtattaagcctagtacccattagttatttttcctgatcctcgccctcctcccaccctccaccctccgaaaggccccagtgtgtgttgtccccctcttttgtgtccatgtgttctcatcatttagctcccacttataagtgagaacgtgcggtatttggttttctgttcctttgttagtttgcttaaggataagggcctccagctccatcatgtccctacaaaggacatgatctcgttcttttatggccccactttttatccttttaatttaaacggattctttgctccccctgaagatggaggccacctcctttgcaaggacttctatctctccccctttgaggccacgacataattctccgcatttttaggtacttaacagtaaatcacttggttcacttggttctcctgcctgcctaggaaaggtcaggagatggtccagcgccatgtctagcactgttaattctttcagtgctttcgttttgcttgggcctctcggggagggcgcggaaaagagcgcaagccagggtctaggaccacacaagtgaattcgtgttgctccctcagccctgaaaagtggctctctccccatcagcattatacttgcacagtggttttgtttttaggtgcatctacctcatcacatggctaccggccacacagcaactaacagcaccgaggaaacacaacagcctgtttaccttcagccccgccactaacccttggccaaagggaaaggggcaggacatcctcccgctctgagccacctccggaagtgacgtcggagtgtcaacatgcaagatggcggcccatcaccggcagaacacagcagggcggaggaaagtgcaggtatggaagcccggttcctcggtcttccggacgcggccggcagctccgggcccactccagctagaaggtgcccggcgccacgaccagctggggtagcggcatggggcgaacggggcggggcgcggccggccacgaggggtg

SEQ ID NO: 29286 - DNA, 2300 bp, Homo sapien
acagggtaaggaagagtaggcatctgtctggagggaagagtgtcagtatgagatactctgggtcagttctggggcacttttgtgttttgcttttttttttttttttttttttaacagttttgtaagtcgcctatagaagaaagtgtgacttcttggtacatcagtgatgcatggctctcccactgatgaattgtagtgaaattgtctcatacttgctcctgagcttgcctggctttcctgagcagtccttaggaaaagaaatatgaggagttaaggttatctgtgagcagacaacaaagcagaggaaggtcaggaaatgtgtccatggtttcaggagtaaggaagtggaagagtactctcctgaaagaagagggagcaggctgcttcatactccaaaccaccactgcctcagagcagccctaaccatcaggatctgccatgtgggtcaaagggttcttgaggaagtctttggaagccatccatatggacacctgctgaaagtgaaggctgtactgaaaaatggccagtcgacatgttcaacctcaccgatagtcacagaatttcacattaaaacaacagtgaagaagtttccaaaatttttttttttttttgagacggagtcttgctctgttgcccaggctggagtgcagtgatgcgatctcggctcactgcaagttccacctcccaggttaatgccattctcctgcctcagcctctggagtagctgggactataggcacccaccaccatgcccagctaatttttttttgtttttttagtagagatggggtttcaccgtgttagccaggatggtatcgatctcctgacctggtgatctgcccacctcggcctcccaaagtgctggtattacaggcgtgagccaccacacgtggccggaagtttccaagttttaaaatggaggcagaaaaatactactactcccttttctcagaaatcacctaaaaggaaaatgagaaacagaactgcagatacccattctctacgaaactaagtgacatctgaaacctcagactgttgtgtaggaggaagggctgaaaagaggaatggaggtcaaatgcgacggttgggaggatgtctgcagtctaagaattcagacaaaactggccaagtacggttctttaaaatagatggcatatcctaatggaccgaaccagtaatcctttagagaagcaaggagtcagagctgaattaataatcatacatatacaacatgtgtgcaggcagcaggctgatgtgatggggagacaaacttggaggagaaacactctgcattatgagttctgcagctgcctggatctcttgccgggatgttggctgtgggggaaagactgaaagaacttggcacaaacataattatatgttataaggaatatcatcttgaactgaggaggattgctgctagctaggagtcctgccctgttcccatcactgcaaacctgcggtttcctgatgtgggaagaatagtggatgaatgtagagtgattccgcttgtgtaatatatacatgcacataaacatattcttatatgtgcagtattttacatacagaagaatatacagtaagctattcccaggtgtcccgtccttaggcgagggttattttcacttttactatgttgttaggatgttttttacttcagacattttcaaagtaaaaagaaatttatttccttgttactatagaaacataaaaactggagtaacaagaagagaaaattatggaaagtctttatccttttgactgtatccattcaagtacctcaaattgaccacacttaaaattattggccactgttttaggtgagaaattaccccattacacttttatagggctatgaatttatttagcaaagaaaaagactctctcatttttctgtgcatccttagtttttcacacatgcccaggtatagtcaccacaattgttgaatgaaggagttgatattaataacatatctagtcctggcagttcagaagagttgacattccacaaagcaatatttttgtgctttgttttcagatggagcttgatagatcagctgatcctcctcctgcaatttgggttgcaacaactaagtctacagtaaataaatgggtaagtgagctattaacctggcaaaggtttataaacatgtattttgttatcacagacctgtagacgccagttgcaaatgctcagtgtggccctaactctagcatgcttttgggcaggggcaaaaacctgaaagccctgtgaatgtaggtagaatcctaaagatcatactaaaattaagataatagtc

SEQ ID NO: 29287 - DNA, 2300 bp, Homo sapien
gatgtattgaaggtgagtattttttttgggctaaatataggttgttagattgtataccccctttattttttattttttgtatgtgataagataatataaattaagatgtaattgcagtaatactttatggggtggtatatactttcttatatgaatattagataagatcataattcatctttttaagtaaataaactgtttaaatggaatcattttctctggttagtgtattgcagacaatcttatatgctgccttaccttaaaagtctcatccttgtagctattgacatcttaagccagataattatttggaggtggaggagggggcaggtagggggctattccatgcattgtaggatgtttagaacatctctagcctccacccagtagttgccagtaatacccctccctccccctaggtgtggcaaccacaagtgtctccacatgttgccagatgtttggagggaggaagaatggtgtaaaatcaccctagatgagacacactggagtgcacacaataaggttggctgtttcttaggatttatagacatcactatgagcattagttacaactctgggtcatgttacaataactccttctgggacagttgaaatgcatgaagctattcaatcacattccaaatagcagtgaagcatttgtaggcagattaaaaagttagtctgcttttatcattctcacaagtctctctcttagtgttgttggtatacttgttcatttgttcaacagatatttcctagatggaatgactgtcatgtgcaaagaaccatgcttgagggtcataaatgatgaaaaagtctttaccttgatcccctttggtaggagggacaagtggaatgggaaaaccttatagataaagaaggaacagatttcaggatagcttatggatgagggaagtcaggagagcttcgtggtggagaaatcatttgaacaaggacttaaaggtttccagtagatgcataatgggagtagaaggaagagcatttcaggaaaaggaaatgaatggcagaggcacaggaaaaggatggtatgtgcttatttggggcaaggtgagcagttttgtttatttggagaccagagtaaatataaggaagtaacaggggtgtaagattgaaaaatgacatttaggtcatttcccaaagagccttaagctgcaggacccaaagttggcctttcttttgtactcctagaagaaccttagataattttagagcaggaaaatctcatgttgagggcagtagttgttagtgtatgtaatgggaaactgaaagctggaagacgtcatgattggagatctaaaggaagagacatgagcaccataggaaaggttaaataaataaataaaaataaaggacgagacaggtgttgagcttattataaaggaagaattgaaaacagctggtattttggttaagctcctggttataaagaaaagagattcacttaatgaactaaagaataagacaggcaagtttcttgctaggaaaaagggactgtcactgaacagaaaccttggcttgactaccatttttgctccctgtgggacatctatgtgggaagtccattatgaaacagttgtttggtgagcattgcttcagaatgagaggctttagttctttgagtagaaagtttagttgcggcaagcttcaaaaatctgattagtttttctctacaatagagagatgcctgttgggggtgggggtagaaacacattgatttcagagagggttctcttggggactggcaggatccagaacagccctaagaaactcatcagcagaaattattgattcttcactttgatactctaccacaaatgtgtccctaactctgtcctgtggctggacttcgcctcatgctgcccaggacctaattgtctccagaatacccaagagaatctgatcaggccagctcctctttgagagttgacctatctgttttctgtatatgggtctgttgcccactcttggtctggttaactgaggcctgagtagaatcctgctgtctgaatgggaggtacttctacttagatggggccagcatacatcatgattggcatttctgtgtacctagcagcttcccatatctagaccttgaagttttgatatcaaatgatctggtgtaatagacgtggctaaacagtgtgggacagtcaggagttttttaggaacattggcttgggagttggacagagctgcattctaaccttggctgtgccaaatactcgccaagtgatctacggaatatgctagggaacatctctaaaatggtttcttcattc

SEQ ID NO: 29288 - DNA, 2300 bp, Homo sapien
taaggctgattttataatattcaaagtttatacaattaaaccacttaccaggtaccaactttggccgattacaggtgttcaaaaataaataaggccaggtacagtggctcacgcccataatcccaacactttgggagggtgaggtgggaggattaattgaggccaggagtttgagaccagcctgagcaacgtagtgagactcctgtctctacaaaagatttaagtaaaaaaattagctgggcatgggagcacacgcttgtagtccaagctagccaggaggctaaggcaggaggatcatcagaagtttgaggctgcagtgagcaaagatcatgctactgcactccagcttgggcaacagagagagaccctgtctctaagaaaaaaatgataaataaaacacacattttgtctgttgccttaattcacagtttaggacccaacctgtatataatagttgtttttatggatacttaaggaataatgagagtgagagaaataaatgagcttttggctggagcttcccagtaaggcttcttgaaggacgtggaatttgagttggacatgtaatgattggtagaacttcaaaagatagatattccaagtccaggacacagtgtgatcagggatgtggaagtgggagcatgcataagatagtggaaagtaacgtgaggacccatgcacctgcagcatgggatggaggggcagcagggggatattaggaggtaaattggaaaagcagttaaaggttttgttgatgttggatttgaatgccaagccatagagcgtgcagtgactaaacaccagaaacttttgagccaatgtgggatatggtccagggagacccaagagaagaattttagtagtgtagtaatgggatgctaaactatgaacaatatgtattctagcaaataaaataaaaaaaatttttaaacctttttattacagagatttccaaacttatatagaaagaagctagtgagcccccatcgtcccatcagatagcttcagtaattatcaataccttgctaaacattttgcttcacctatacctctacctgccctcccacccatctctgtctacacacacacacacacacacacacacacacaattattttaaagtgagtcctagacatcagttcagatagatttaacaactgaagttcaaatgattttcagagcgtaggccttagttttttggtataatagttattgactgttatcagagatacagaagtagggtgttgatgagtctagtttgggacatacagagtttgaggtgcctgtaggacatccaactgaagatacccaaccagctgttgggtttgtggtttagaagagaaggttgagactcaaggtctagactcaggcattgtctgctcacaggtgctagctgaaggcatggcagtggggaggagagcccagggaaaattgagcactaagagtgtcggaccctggtaagcactgggagctgcctgcctttccagaattatttagtttgcccaggttctgggaaagtattcaagggaataaaacccagaaggctactatgtatgtatatgtaaatgtttttgtttgtttttctgagatggagtctcactctgtcgcccaggctagagtgcagtggcgtatcttggctcactgcagcctctgcatcctgagtagctggaattacaggcgtgcaccaccatgcccagctaattttttgtattttagtagagacgggatttcaccatgttggttagccaggctggtcttgaactcctgatctgaagtgatccacctgccttggcctcccaaagtgctgagattataggcgtgagccaccacacctggcctgtatatgtcaagttttaagaacacatattaatctcatttagttgtacataaactgtgtcttagaaggacactgtagaaaatctttccgcagctctaaaaatggattaaggtaatgactaaaaacatttattggtttatttttcatctttaaaatgtttgcatcaaagaaaaataatatggaataaataatatctagtgatttccctgatgtcacaatatgccattgcttttttacagagatagactctctgctagtgacatgctccaagtccgaaaagttatggaacatgtttatgaaaaaattatcaacttggataatgagtctcaaaccactagctcttctaataatgaaaaaccaggagaacaggaaaaagaagaagatattgctgtgttggcagaggagaaaattgaacttttgtgccaggaccaggtaagtggacttgaggactacagccccaatt

SEQ ID NO: 29289 - DNA, 2300 bp, Homo sapien
tcgctgagggcagcgacttctccaaagtattgggcacgcagcgaggtgccaatatttctagaatgcagcacagctgttcttcagtgttgttaaaggtaagtaggtcatgtcactcctccatttaaaacctcctgatggttttacatctcagaataaaatcttaaatcttcaggacaacaggcaaggtcctacacggtctgctctggtctcctcctcacactggccacaccatccaagcacaccagcctcacctggcatttcctcaaacacacaagcacaacctacctcggggcctctgcacaagctggtccttctgcctggaatactactattcccctaaatatctgtattgtccactctttacttccttcagaagcatctgttcgaatgtgacttgagaagaggcccttcctgaccactctatcaaaaatagcacccactcaccattctgtatccccttaacctgctttatttttatcactggtaattaccacctaccatgtattttttcatttcccttctttccctaccatcatccaaatgtcagctccagaacagggaccatgtttgttctgttcactgctttatctctagagccttagaattctgcctgccagagtaggagctcaaaactttgtttttgtgactgacaacctctgatccctggtccctctccaatttgtccctctccatcaggcaggcccctcccgtcttcgaagctcccatcatcgccccacccctcctcttgccaatatcctgagttcctttgcctttaatcaaacctgttggaagacgctcctggctggatgcattccactgtccacgcttgctgtttggtgtctcaccataagaaagcccattcccaagcacaaatcctgtcaactctgggttctccaagccagcctggttttcacgttaagaaacttttagccctctcatgtggttagctggcaacagaccctaccttcaaaacacacaaaccgacaagcttgcctgtctccactcatctctgcatccagctgcctttcactagggaaagggggggtgcagggacgcctcttccccgcagcgctccggggtcagagacccccagcccctctcacctacattatagcccttccctcaccgcaggcacaaatctccatccggctgcgggaccctctcctcaccctcacagcacactccgttctaggaaccccactccgtctccactctccggaagcctgctcgcccagacctccatgtagcggcatctaaaggctgggaccctccccagctgcaaacgctctcctcgaggattctgcagcactctcccggccctcccgctccccactatcccgtggctggtttgcaccggtcctctaccctcggaagcccttacgaccctacgactggcaggacgcgcgccgacgggctcccccgcagctgcgtccactcggttaaccccggcccccgggactgtcctcggcgtggctgactctcttcccaggcccagcacggagagcggcccgcggcaggcgagcgtaaatgtgtgctaagtgcacgagtgcgtcccgactggtagtggtgcattcttcacccgggaggagcgccattcccggcggccggaccaggaaaacgctccgcttccggcactgctggcacttggggcgggcgctgggcccgaccgcggccgcggactagccagggtccgggagtcccgcgaggccgcctctcccaggaggctcccaccgggcagggggcacctcccgccacccaggcggaaacactcgggccgggaccccgccgcagtcgccagccagccggcgaccggacgcccgggcgcggggttgcgggcgcctcgccaaggtcaccggcgccgcggcggcaactcaccccgtggaggtggaagccctcggcgccgcctgcgggctgctcagcgctgacgcccaggcccatggcagcggctccgctcggcacccaggtccagtcccgctgcgcctacccggaccgacccgacgccagtagcaccgactcgctctctcggcgctcgattcctgcgccttgtgacgtgaggcgttttgttcctcccactccagacactggacgctcctagcaaccggctagcagctcggtttccaaggactgtaacgccttcaaccgcccgccgcgatagagtgcccacgaccctgcctcgggaatcccgctctgcaccgccccaccagacccggactcggagccgcgagcggcccgagatgagcagcaatgactcctcccttatggtgcgtggcccgggcgctgtccgagggctccctcgtgac

SEQ ID NO: 29290 - DNA, 2300 bp, Homo sapien
cccgaggtgcagagcagggatagtcagcgctctgaggtctcaaaagtcaactagatatggattacgtaggcctctgtggattcccgtgggaatccagccgctgagtgtgaaactgtttttatgggaccataactaggatacaagaaggcatccaggtggagccagagtgttagggcccagctagtgcctggggtcacaagaccaacactgccaagtccttaccttctttgaggactccataggctttaaagaacttcaacacagggtcattgctgaatttttccaggcccacagctgcagcctgctgcacatggtggaagtacttttcctggctatagtaaatgatcccagcctgtatgaaggaagacataactgcaatagcccagtcccttctctgtctctgttctgtcccagatgggatgagacctgctcccttccctatcccctgctcctcctcagttctgcaaagggaagagaaagaggaaacattcaggcctcatcctgtcctctaacagccctgggagcagctccatgcagttttcccaggaaagagtttggaggtgtttgtttgggggattaccaacagattctggttcaactatgatggggaattcaaccaaggctttgtcttaggaagggaataaggggggaaaaatgaggacaaataataagaaaaattatacgaattgtagttacaagttattgtgggcttcatatccactatcctgtgcatggtcctctcagtatctttcacagctaaggaagcttaagcccatggaaactacagcttgacaaaggggctgagattttaaagttaagtttcacttcctctaaggtttgtgggtgctaggttgggagcagatgtggttggactgtaaacatcctcatgggccatatgaaagagcccagacaccatcctaagggtaacagaaagcagaatggttttaaggcgagggatgttttcagatgtacatttttgcaacaaccactctggctgcttttgcatgtggggggtgtgtgccgtggtggcagcagggactactgatgctgaaaagagccacagcagagaaaccagatgggagggaggctgttgcaggctctcaggggggagagatggtgctggttctgggctagaagataaaaagataaaaagaaaacccaggagacatcaaggagctggcatttcttgtagacaggattagaagatgagtatagggaagaggtatgagttaaggctaggagattaaatggtgaagccatcaactggggtgggaggcgcaggcgagagtgagctgggtggaagaagggatgatgacaagaagggataatgatagtgattggatgagctggtttggggtagctcaagaaacggggatgctaatttggggctcagggtgcgcagaagccaccggagaagacgcccttgccagggggagtggggcaagaaaaggcaggaccgcctgatataactgaggacagcgaagggtggcaggagagtagcagggcagacggtctctgggtcaggggcggggagtcacgagggagccctcggacagcgcccgggccacgcaccataagggaggagtcattgctgctcatctcgggccgctcgcggctccgagtccgggtctggtggggcggtgcagagcgggattcccgaggcagggtcgtgggcactctatcgcggcgggcggttgaaggcgttacagtccttggaaaccgagctgctagccggttgctaggagcgtccagtgtctggagtgggaggaacaaaacgcctcacgtcacaaggcgcaggaatcgagcgccgagagagcgagtcggtgctactggcgtcgggtcggtccgggtaggcgcagcgggactggacctgggtgccgagcggagccgctgccatgggcctgggcgtcagcgctgagcagcccgcaggcggcgccgagggcttccacctccacggggtgagttgccgccgcggcgccggtgaccttggcgaggcgcccgcaaccccgcgcccgggcgtccggtcgccggctggctggcgactgcggcggggtcccggcccgagtgtttccgcctgggtggcgggaggtgccccctgcccggtgggagcctcctgggagaggcggcctcgcgggactcccggaccctggctagtccgcggccgcggtcgggcccagcgcccgccccaagtgccagcagtgccggaagcggagcgttttcctggtccggccgccgggaatggcgctcctcccgggtgaagaatgcaccactaccagtcgggacgcactcgtgcacttagc

SEQ ID NO: 29291 - DNA, 2300 bp, Homo sapien
tcaggcagggcattctcagctactgctcaagagccactgattacatttatccctccatgtcctcagacatttggccatgggctattctgccagtcctcagcctaggaccaccttctgaatgtcagcccatctgcacctgcatgggtctcactcctctccctgtacctgtaccatacccacctgtcctcacacctacctcttccccctcctttgcctgcattaccagttctcagcttccaggcctggaattacttcaagaatcatgcagctatctctccaaccactcattttacagagagggaacccgaggtgcagagcagggatagtcagcgctctgaggtctcaaaagtcaactagatatggattacgtaggcctctgtggattcccgtgggaatccagccgctgagtgtgaaactgtttttatgggaccataactaggatacaagaaggcatccaggtggagccagagtgttagggcccagctagtgcctggggtcacaagaccaacactgccaagtccttaccttctttgaggactccataggctttaaagaacttcaacacagggtcattgctgaatttttccaggcccacagctgcagcctgctgcacatggtggaagtacttttcctggctatagtaaatgatcccagcctgtatgaaggaagacataactgcaatagcccagtcccttctctgtctctgttctgtcccagatgggatgagacctgctcccttccctatcccctgctcctcctcagttctgcaaagggaagagaaagaggaaacattcaggcctcatcctgtcctctaacagccctgggagcagctccatgcagttttcccaggaaagagtttggaggtgtttgtttgggggattaccaacagattctggttcaactatgatggggaattcaaccaaggctttgtcttaggaagggaataaggggggaaaaatgaggacaaataataagaaaaattatacgaattgtagttacaagttattgtgggcttcatatccactatcctgtgcatggtcctctcagtatctttcacagctaaggaagcttaagcccatggaaactacagcttgacaaaggggctgagattttaaagttaagtttcacttcctctaaggtttgtgggtgctaggttgggagcagatgtggttggactgtaaacatcctcatgggccatatgaaagagcccagacaccatcctaagggtaacagaaagcagaatggttttaaggcgagggatgttttcagatgtacatttttgcaacaaccactctggctgcttttgcatgtggggggtgtgtgccgtggtggcagcagggactactgatgctgaaaagagccacagcagagaaaccagatgggagggaggctgttgcaggctctcaggggggagagatggtgctggttctgggctagaagataaaaagataaaaagaaaacccaggagacatcaaggagctggcatttcttgtagacaggattagaagatgagtatagggaagaggtatgagttaaggctaggagattaaatggtgaagccatcaactggggtgggaggcgcaggcgagagtgagctgggtggaagaagggatgatgacaagaagggataatgatagtgattggatgagctggtttggggtagctcaagaaacggggatgctaatttggggctcagggtgcgcagaagccaccggagaagacgcccttgccagggggagtggggcaagaaaaggcaggaccgcctgatataactgaggacagcgaagggtggcaggagagtagcagggcagacggtctctgggtcaggggcggggagtcacgagggagccctcggacagcgcccgggccacgcaccataagggaggagtcattgctgctcatctcgggccgctcgcggctccgagtccgggtctggtggggcggtgcagagcgggattcccgaggcagggtcgtgggcactctatcgcggcgggcggttgaaggcgttacagtccttggaaaccgagctgctagccggttgctaggagcgtccagtgtctggagtgggaggaacaaaacgcctcacgtcacaaggcgcaggaatcgagcgccgagagagcgagtcggtgctactggcgtcgggtcggtccgggtaggcgcagcgggactggacctgggtgccgagcggagccgctgccatgggcctgggcgtcagcgctgagcagcccgcaggcggcgccgagggcttccacctccacggggtgagttgccgccgcggcgccggtgaccttggcgaggcg

SEQ ID NO: 29292 - DNA, 2300 bp, Homo sapien
tagaattatatatattggcttggtttttctgacaagatcttggcaaagaagaagggtgtttccccaactcttgggatctggagcatgggcccctcccactgtcatgggctctgcctgcttccactcagttgggcccaggcatggagtcttctcccaggcctccagggggagaggagcagcagccacttctcactggttaacagcatctgcacagccaccagggcacatacctcctttggcagcccttgaggggctgtgttatctctggggcagggctttccttcccctggtgggtcaggcctggttgagcatggtggcactcaccaatgatttcacatcttttgtgagcataaatgagggccatggtggagcacagggacacgtctgggtgatgcctgatgctttccaggtcactgatggcatcctggatgtgctctgcaaagacagtccacatagttatactctcaagctccaggactagaggacatgagactctgtagctgacccaacagctcagcactactacctgctggactaactggtctgaaaggtccccagtgacccaagttccctgaagattggggctctttgaaagagttgctggtaacatggtccaggctgttaggggctggaaatcttggacttgaaaggttcaccctgtgagtacttgtggggatatgtgtgaggctgcaattattagctgcgtcagttctgaagaaggacctcaggcagggcattctcagctactgctcaagagccactgattacatttatccctccatgtcctcagacatttggccatgggctattctgccagtcctcagcctaggaccaccttctgaatgtcagcccatctgcacctgcatgggtctcactcctctccctgtacctgtaccatacccacctgtcctcacacctacctcttccccctcctttgcctgcattaccagttctcagcttccaggcctggaattacttcaagaatcatgcagctatctctccaaccactcattttacagagagggaacccgaggtgcagagcagggatagtcagcgctctgaggtctcaaaagtcaactagatatggattacgtaggcctctgtggattcccgtgggaatccagccgctgagtgtgaaactgtttttatgggaccataactaggatacaagaaggcatccaggtggagccagagtgttagggcccagctagtgcctggggtcacaagaccaacactgccaagtccttaccttctttgaggactccataggctttaaagaacttcaacacagggtcattgctgaatttttccaggcccacagctgcagcctgctgcacatggtggaagtacttttcctggctatagtaaatgatcccagcctgtatgaaggaagacataactgcaatagcccagtcccttctctgtctctgttctgtcccagatgggatgagacctgctcccttccctatcccctgctcctcctcagttctgcaaagggaagagaaagaggaaacattcaggcctcatcctgtcctctaacagccctgggagcagctccatgcagttttcccaggaaagagtttggaggtgtttgtttgggggattaccaacagattctggttcaactatgatggggaattcaaccaaggctttgtcttaggaagggaataaggggggaaaaatgaggacaaataataagaaaaattatacgaattgtagttacaagttattgtgggcttcatatccactatcctgtgcatggtcctctcagtatctttcacagctaaggaagcttaagcccatggaaactacagcttgacaaaggggctgagattttaaagttaagtttcacttcctctaaggtttgtgggtgctaggttgggagcagatgtggttggactgtaaacatcctcatgggccatatgaaagagcccagacaccatcctaagggtaacagaaagcagaatggttttaaggcgagggatgttttcagatgtacatttttgcaacaaccactctggctgcttttgcatgtggggggtgtgtgccgtggtggcagcagggactactgatgctgaaaagagccacagcagagaaaccagatgggagggaggctgttgcaggctctcaggggggagagatggtgctggttctgggctagaagataaaaagataaaaagaaaacccaggagacatcaaggagctggcatttcttgtagacaggattagaagatgagtatagggaagaggtatgagttaaggctaggagattaaatggtgaagccatcaactggggtggg

SEQ ID NO: 29293 - DNA, 2300 bp, Homo sapien
agcaaagaaatacctgtgcaagtagaatagcttgcttcaaacagatgagatttgtcctcccaacatcaaaacatatcacaaaactacagtaattaagtccctttgaggccagcactgactgggataagcaaatagataaatgggatgtaacaggccttatttcaaactaataggttgttcaccaactcctagttggataccctgctatccattatgaaaaagaaaaaaaggtaagttctcatcttacaccatacttaaatttcagatgaattaagtattaaacataaaaattaaatgaaacatgggtttccctggggattctaagcctaactccaaacttggaagctgcaaagtttggctttgtggctctacatggaaaaaaaaaatagaagctgcaaaggagaatattttacctatttgactacataaaagcttaaaattactacatgacaaggtactgtaaaaatagttaaaggataaatggcaaactaatagaaaacacttgcaacaaagggttaataaaacataaagagaaaaaaaatcaccccccccaaaaaaaccaggcaggctgtgaacagaatattcacagtagaaaggaaaaggctatattggaaatatgaacaggtgttcattctccctaatagttaaaaaaggtgttaaatgaaaactagttacttttcatgtttcagactggcaaaaattacagcacgtttgaggttatgaagaaaggatattttaaattcttgatagtaatataagttcaagtatctttgagggcaagttgaccttatctatcagtattttaaatatatgtgctctatgacccatcagctctccctcaggaatttgaacttatgtaaatgttcatcatagcattgtagtatttaaataccaaaaataaagtaaatgtgaaattagatgtccttcagtagggcaatagttaaataattagtagggcaataaattgttacatccacagtaaaacattgtgttgtcatcaaagaaaatggggtagatttgtatgaagagatgggaaaatatgactatcatatacaaattttaaaaagcagattgtggccaggcgcagtggctcatgcctgtaatcctagcactttgggaggctaaggtgagtggatcacctgaggtcaggagttagagaccagcctggccaacatggcaaaaccccgtttctactaaaaatacaaaaattagccgggcgtggtggccatgcctgtaatcccagctactcaggaggctgaggcaggagaattgcttgaacctgaggggcggaggttgcagtgagccaagatcgtgccacttcactccagcctgggcaaaagagcgaaactccgtctcaaaaaaaaaaaaaaagcagattgtagaatggtgtatgtgaaatttgattccctttgtgtatgtgtgtgtttttaaacccattggtatgctcatgtgtacatatatatgtctgaggtgtctatatagtagtaacgtattatacctcaaattgttcctagtggttatctctagagagagacattgttacagccagaacatgagctagggatgtttttctgtattgccttagggtttgaattcttgagcatgagcatgtatttctctttaagtttgtagaaatgttggaaaagatcccctacactgagacatcttccttccactgtcttatccatgccccttgacctgatgggctgctggctatgcttcagtgttagctgctcatcattgttttgtcccatttacagggatcatcttgtgtcatatcttagaaggccacctggaggaagctgagtaccggctggaattcctgaaggaggtgcagaagtcccttgggaagtctgaggtcagagctccctgggggtatgggttgctccaggatgatgtcctctgctgtcctcccacccccactttccaatagaaagcatgcaaggtggtctggaccttcactttgcccttgcctaccaaatctgcccaggctgacattggcactgagactcggtcctctcttccacaggtgctaattttcctccaagccctcctgatgtccaggaagcacaagggggaggaagagaccacagcgctcctgaaggaggcagtggagcttcacttctccagcatgcaaggcatccctcttggctctgagtactttgaaaagctggacccgtacttcctggtctgcattgctaaggagtacttgctcttctgccccaagcaggttaggggaaggcctgtcttcatggtgggggtctggagtacaggtttggatggtgcccacctgaaggaca

SEQ ID NO: 29294 - DNA, 2300 bp, Homo sapien
tgtagttgatgaatgtatggaattgtccatgggttacaatttgagcatgaaaggtcagtaagccctgttcatggatgaggatacagaatcgaattggccctgagccctgcttgcctccccctcacctgcttgcacatgctagtgggagactgtaggcctggttctcagagcagacacactgaagctccaagctgctgtctctgtatgattttgcattgggacctccaaggtgccttcctcatccctttcttctggcagagctgcatctaagcaatttaaagtgggaggtggggatgctgagggagtagggaaggctatccagcagtgggaaaccagtgaacagtatggaggcacggccagattggagttttagaaagagtgacattgctgcctcatggagagggatctggagggatagcaggtagagtgagaggaacaggtagagggcctggccatggcctaactacagagatggatgtggagagcctgactcaggtagctagcacagtgcctcattcacagtggactttctataaatattgattgatgaatgaatgaatgtcagccagaatcagtgggaaggaagtgaaggagatgatttcaggaacatgaggtgtgtgcgaacctgggataagcttttggttactcttgcttgcagtgagctctgtgaacatctgcctggcccccacaccagcctgctactgggcgatgccttaatgagcattctggaggtaagtgagaggcctcacagccttgccaagtggccccccagtctcccttctccagtgggagagaagaggaagacccaaagacactttccccaccagcccgagaaggccctggaggtctatgatgaggcctatagacagaacccacatgacgcctccctggccagcagaattgggcacgcttatgtgaaggcccaccagtatactgaggtcaggctgggctagggtgtgaaggggcagggagggccagcccagcagggaaggaggaggacggtacatgactggggagctctgggtgggaggagagtggctgacttttcactcagctccttgctgaatggggtgccaaggggagaactcagcaactctctgctgctgaccacacctgcttaagctgagggttacaccctgtgccagctgggaggagtgccttttcactttaggctatgttctggaggggcacactggtgtgatggctgctgaggggaacatggtgtcgggcactgaagggcagaaccaggccagaggctaatatttactgtttgcactaaggcaattgagtattatgaggctgcccagaagattaatggacaggactttctgtgctgcgatctgggcaaactgctcctgaagttaaagaaggtcaataaagcagaaaaagttttgaagcaggcactggaacatgacattggtgaggcagcattgtaacccatttctagcatttggagcagacatactcctcccccattccccattagctgaagtcctgatcccagcgctccccaccaacacagcttcccaggagccagtgaactaacactaatttgagtttccatttaacagtccaagacatcccatccatgatgaatgatgttaagtgcctgcttttgctggcaaaggtttacaagagccataaaaaagaagctgtgatagaaactttgaacaaggtaattgacaggtggactcaagctctttatctgccatctgctgatgggggctgaaggaggaggaaggagagagctccaggtctggaaagccccagacctcttccttaaaaaaggacctaggttacacctctgacatccaccttcacttattttcccgtcctggttcattcagttatggtacactaatgtgctctgagctgtggtgggctgggaaaggcaggaagtaagagagtgcctttgtcctcaagggtgatagtagagataataaggatggtaatgacaatagctcccatgcattgaaagctctgtgctaggttctgtagggtttttgctttcttattgaatgatcacagtagccctttgtaataagcattgtgacattcccatgtagcagataagtctctaggaggttgagaaatgtgcccaaagttgggttcagttgtgttagtctgtattctgttggtgtataccagaatacttgaaactgggtaattcatacattttctacagttctagaggctgagaagttcaaggtggaggagccacatctggtgagatcctttctgctcaggggaaggggaactctctaaagagtgcagtgcagggcatcacatggtgggcgggg

SEQ ID NO: 29295 - DNA, 2300 bp, Homo sapien
aaaccacacaactaagtgggtgcaaggcaggtgcaaggtgggatcagcatccttgaaagtttaaaacaggacatactctgagaactgacaactggccaacagagctggagagcagtcatcaggggtatgaggtggaagtgtacaggtgaggctgcgacagaatcatacctcatgtataaaataaaaccaaatgcagaaggactaacgttaaaagcacatgaactggccgggcgcggtggctcacacctgtaattccagcactttgggaggccaaggcgggtggatcatctgaggtcaagagttcgagaccagcctggccaacgtggagaaaccccatacctactaaaaatacaaaaaaaactagccagacgtggtggcgcatgcctgtaatcccagctactcgggaggctgaggcaggagaatcgcttgaacccaggaggcggaggttgcagtgaaccgagattgagccactgcactcctgcctgggcaacagagtgagactccatctcggaaaaaaaaaaaaaaaagcacataaaccaacaaaatgacacgtacacacattaatggcattgaaggggggggaagggagtggtaaatgagggtatgaagagagaggtgagactgcaaaagtgagaaagggccgattatttcagctttgtaggccccaaggagttgagacttcatcaggagggtactgggaagccactggaagcttggctccagctgcccagacacctccgcctgcaggctcccaggtacacactcaatgcatgcggaaggacagggcctttatcttcccccaacctgctttcctcctgttgttcttgcaggaaaggtaaagtggagcagacccctgccattctacatgcacatctgtggctgaagaggggctctcaccatcaactccaccgcagatgccatccaagaaggccaggaggtcacccccacccccaacctggaggaaggtagaatggaatcctgagggctgggctagtggctgacagcattcatctaggacagtcagaagaacccagaatgcagcgggagcaggactgggagggggagggtcaggctcccacgaaggctccctggaggaggcagtgcaagctgagcccttaaaggcattgggattctggtaagcagagagagggcaggagagcattccagtcgagaagaccggctgcagtaaaagcgtgagggtggaaacgctcgaggtgatgagtagactcgtacctgcggttgggaagtggggctgagggtgggctcccaggccaggacttggttgccggggcatgtcgtaccgggagggttggccccgagtcaggaaaggccttggcgggagcagagaaggcagtggaccattttaagtggccaagatctggcccggaagaaaccagcctttttatttttttaagggaaggttgaggtgggagtggggaagctagttctaagaacccctagtttggaacttctgcagggaagggtctcttggcccgtgggcaggaatgaagttcaggcccactgattacatccatccttcccgctccctgcctccccgctccccacacaccccagattcctctccagccacagtttacttttccggcggatctgggggtgggtggtaggttgggggcggaggggggaacttttagattggaataaaataaactccctctagaggggtgggggtggagagcgtacaggagacgtcggctctgccactgtctagcccgtggccttgcggagttacgaggtgctcccggcctcggtctacccatctgtaaactggggcggtggggcgaggtggggatctctacgctcggctctgccggcttgagtcgtccgcgcctttagggaccgtgctggaagcggggcggggagggcgctggcgggagagggctgggggcggagagcggcggaggcgcagtcgccgggtcacagtccgcagggaggcccccaggccgctgcgccaggctccaggcgggggaggaggcggcgcctccggggcggggctgccgggcggcctggctggaggcccggcgtgcgtcagcgcagtgagccccggagttttccactgacgaggagggcggagcggcgggcggggctgggcgcaggcagtctcccgccgccgccgccgctgccggacgcgcagagcgaggggcggctggaccgacggctgccgggccgagcgcacagagtcgcggcgcagggggcgtccccggccgggacgcgggtcgcgtcgttgtcctccgcgagcgtccggattgcaggtgagcgccgaggggcctcgggcccgg

SEQ ID NO: 29296 - DNA, 2300 bp, Homo sapien
tcccagagggagatgtttcccatcatcagtaacatctggggaacatctggtgagtccatcccaggacggggagatgcttttctggagaacacacgtcacttgattcttcttattctcctgtattttcctttgttctctctttctcttccattgggctccccactctaagcgccactccagccctcaccagcaaactccctaccctgatttctgactcgtctggtttccccaatatacaactcaacaggatgcaaacgtaggcagcatgagagaccctcattaattctagtgcccaaccctgcccagttccctgataagcaggcagcatcttctagaaactgagtcaaggaatgttgaagctggtgagggttctcttgtccaatgcctccattttacagattgaaaagctaaaggccagaaagtgagggaaagagacagtcagggacagaaacaaaactagatcacttctgggtatcatagaagcctctcttctgctggaaacttggcctggagattagaggcaggcaggaaggcaggcagtggaaaggattccttgggaacagcaacgtctgcagcccgcagccacagtgagagcacagctgaggtctgaggtgggtggtggagggtgggtggcctgcgggtttaccccttaaagccctgagagtggagtcacctctagcaacagacacccagctttgtagcctttaagctccttcctgtgcattctcagctacactatagcttcagtgtgctagctgtgtgttaaaaatccatccactgccacctccagccctgccctctccttgagccctagcaactttacccatttgctagtcatgtttagtttattcaacaagttcttatcaagcactggagatagagcagtgatcaagtccaacattgctcctgccctcccactgctcacagacaaagcacaaggaaatgcacaaggaaaccacacaactaagtgggtgcaaggcaggtgcaaggtgggatcagcatccttgaaagtttaaaacaggacatactctgagaactgacaactggccaacagagctggagagcagtcatcaggggtatgaggtggaagtgtacaggtgaggctgcgacagaatcatacctcatgtataaaataaaaccaaatgcagaaggactaacgttaaaagcacatgaactggccgggcgcggtggctcacacctgtaattccagcactttgggaggccaaggcgggtggatcatctgaggtcaagagttcgagaccagcctggccaacgtggagaaaccccatacctactaaaaatacaaaaaaaactagccagacgtggtggcgcatgcctgtaatcccagctactcgggaggctgaggcaggagaatcgcttgaacccaggaggcggaggttgcagtgaaccgagattgagccactgcactcctgcctgggcaacagagtgagactccatctcggaaaaaaaaaaaaaaaagcacataaaccaacaaaatgacacgtacacacattaatggcattgaaggggggggaagggagtggtaaatgagggtatgaagagagaggtgagactgcaaaagtgagaaagggccgattatttcagctttgtaggccccaaggagttgagacttcatcaggagggtactgggaagccactggaagcttggctccagctgcccagacacctccgcctgcaggctcccaggtacacactcaatgcatgcggaaggacagggcctttatcttcccccaacctgctttcctcctgttgttcttgcaggaaaggtaaagtggagcagacccctgccattctacatgcacatctgtggctgaagaggggctctcaccatcaactccaccgcagatgccatccaagaaggccaggaggtcacccccacccccaacctggaggaaggtagaatggaatcctgagggctgggctagtggctgacagcattcatctaggacagtcagaagaacccagaatgcagcgggagcaggactgggagggggagggtcaggctcccacgaaggctccctggaggaggcagtgcaagctgagcccttaaaggcattgggattctggtaagcagagagagggcaggagagcattccagtcgagaagaccggctgcagtaaaagcgtgagggtggaaacgctcgaggtgatgagtagactcgtacctgcggttgggaagtggggctgagggtgggctcccaggccaggacttggttgccggggcatgtcgtaccgggagggttggccccgagtcaggaaaggccttggcgggagcagaga

SEQ ID NO: 29297 - DNA, 2300 bp, Homo sapien
tcagtgcatgcgctggatctttgagaactggagactggatgccattggagaacacgagaggccagctgccaaggagcccgtgctgtgtggtgacgtccaggccacctcccgcaagtttgaggaaggctcctttgccaacagcacagaccaggagccaaccaggccccagccaggtggaggagacgttcgtgcagcccgctggctatttgagacaaagccactggacgagctgacagggcaagccaaggaactggaggccactgtgagggagcctgcagccagcggagatgtgcagggtaccaggatgctctttgagacgcggccgctggaccgcctgggctcccgcccctccctgcaggagcagagccccttggaactgcgctcagagatccaggagctgaagggtgatgtgaaaaagacagtgaagctcttccaaacggagcccctgtgtgccatccaggatgcagagggcgccatccatgaggtcaaggccgcatgccgggaggagatccaaagcaacgcggtgaggtctgcccgctggctctttgagacccggcctctggacgccatcaaccaggaccccagccaggtgcgggtgatccgggggatttccctggaggagggggcccggcccgacgtcagtgcaactcgctggatctttgagacacagcccctggatgccatccgggagatcttggtagatgagaaggacttccagccatccccagaccttatcccacctggtccagatgttcagcagcagcagcatctgtttgagacccgagcgctggacactctgaagggggacgaagaggctggagcagaggccccacccaaggaggaagtggtccctggtgatgtccgctccaccctgtggctatttgaaacaaagcccctggatgctttcagagacaaggtccaagtgggtcacctacagcgagtggatccccaggacggtgaggggcatctatccagtgacagctcctcagcactgcccttctctcagagtgccccccagagggatgagctaaagggggatgtgaagacttttaagaacctttttgagacccttcccttggacagcattggacagggtgaggttctggcccatgggagtccaagcagagaagaaggaactgattctgctgggcaggcccagggcatagggtccccagtgtatgccatgcaggacagcaagggccgcctccatgccctgacctctgttagcagagagcagatagtcggaggtgatgtgcagggctacaggtggatgtttgagacacagcccctagaccagctcggccgaagccccagtaccatcgacgtggtgcggggcatcacccggcaggaagtggtggctggggacgttggcacagctcggtggctttttgagacccagcccctggagatgatccaccaacgggagcagcaggaacgacagaaagaagaagggaagagtcagggagacccccagcctgaggcacccccaaagggcgatgtgcagaccatccggtggttgttcgagacttgcccaatgagtgagttggccgaaaagcaggggtcagaggtcacagatcccacagccaaggctgaggcacagtcctgcacctggatgttcaagccccaacctgtggacaggccagtgggctccagggagcagcacctgcaggttagccaggtcccggctggggaaagacagacagacagacacgtctttgagaccgagcctcttcaggcctcaggccgtccctgtggaagacggcctgtgagatactgcagccgcgtggagatcccttcagggcaggtgtctcgtcagaaagaggtttttcaggccctggaggcaggcaagaaggaagaacaggagccccgggtaatcgctgggtccatccccgcgggttctgtccacaagttcacttggctttttgagaattgtcccatgggctccctggcagctgagagcatccaagggggcaacctcctggaagagcagcccatgagcccctcaggcaacaggatgcaagagagccaggagactgcagctgaggggaccctgcggactctgcatgccacacctggcatcctgcaccatggaggcatcctcatggaggcccgagggccaggggagctctgtcttgccaagtatgtgctctcgggcacagggcaggggcacccttatatacgaaaggaggagctggtgtcaggtgaacttcccaggatcatctgccaagtcctgcgccggccagatgtggaccagcaggggctgctggtgcaggaagacccaactggccagctccaactca

SEQ ID NO: 29298 - DNA, 2300 bp, Homo sapien
gcctcatttggctagtggcaactctattggacagcacagctgtactagatacaaagaaaccaagtgctcaggaagagcctctttcctaatattgaggcctgaggaatttctcccatgagttatcacaggaggtgagtacaaaagtgagttccacctaggggcttttctctttttatattatatacagtataatagctggctcttctaaagcataggctatgtgctaagtactctcaggcacttttttttttttttgagacagagtcttgctctatcgcccaggctggagtgcaggggtgcgatcccagctcactgcatcttctgcctcccagattcaattttcctgcctcagcctcccaagtagttgggattacaggtgtgtgccaccacacccagctaattttttatatttttagtagagacaaggtttcaccatgttggtcaggctggtctcgaactcctgacctcaagtgatccaccagcctcagcctgccgaaatgtgctgagattacaggcgtgagccaccgtgcctggctggaggcactcttttcatataataattccttcaattctcaaaactatcctagaaagtaagaaatttcagtacccacagggagaaagctcctcccaggagaaatcctgagaaacctaaggctgccctttccctgaaacactggtacatcggtctccctgcccttcctagagagagccaggagcctgggggacaggcagagggctagaaaagagcaggggaagagacaagagggagggagaccaggaagagggggttcccagatgtccttacccccatcccagctgacgctgcaggactgacattgactacatggaaaaagtgagcaatgtctggcatcaccccctggtaccagagggcatttggggagtcagaaggaagacctcatgtgccaggccacagaatgcacctgcatacccacaggcatggagcctgggccaggcccacctaggacaaaacacctctttcgagttttttgcagatggtcccctgacatccttcaccacactggtctgactgccaggatctcttgggcctcctgggcccctcacgccctggtaagcaaaggaggaggcaggtgtgacccccccacccccgccgccactccatctgtgactgggaagctgatgactccagggtcagaaataaccccacggtcagctccctgcatgccgcccttcccctcccctccattcccagaaagcctgggccctgagtcagagggaagagtcgagaagaaaggactcagataatctggaatgaaaaccatagagtcctgctgtggaattcattcattgggaggccgaggcaggtggattacctgaggtcaggagttcgagaccagcctggccaacatggtgaaaccccatctctactaaaaatacaaaaattaactgggtgtagtggtgcaaaggaggagctgggcctggccaatctcggcccagtgaagagctgggcctggtcattcagatgtcttccccccaaatccagcttcatcggggctgtgttgacctgtgctgtggggcacagggtggaatggataagaaagaaggaactctttagtgcagaagggaatggggaagaaagagagctgagcatcacactcagaggtatccaggctcagaacagaggaggaggtgcccagcctgccctcaggagacctccagtctcctggcacggtgggtggagacacgtcaggaagagtcagaggcagggccagagtagaatgatgggggctcacaagacgggagcaagctgtccaaggtgtcagatgcctcttcttagtcactctctcaaaatagtctgggacacccccaacctcacaacccagctgagtcactgaccccaatccccagatcagactttggatgaatgaagcttctccccctctgtttcccctccccagcccaaaggacatgtaactgattccccaggatggaagagtgacttccacaagacctaaaaataaccgaaccacttaatactcggaacatagcctctcccacccgcccccaccacggcccacccactagccagcaagataaaggcagctgctggggctggcaggggacagagacctggagccagggcagcaagaaggtgtctgttggagccagcagaacagaaccaatttgaacaagaacctccagaggaacgacgaaccctgagaccacagctgctacagaccacaaacaccccatcagccaagagagacccttggtgagtaacctacctctccatccttccacagcaaggctggctttcacag

SEQ ID NO: 29299 - DNA, 2300 bp, Homo sapien
gtttgcagtgagcaaccttgaaggatgagctgacatctcgctcagggccaaataaccgacttgcttactgcttgctataaaatggcacgttacccaaggtcagagttcccttcctataacctccccatccctcacacattcacaggtatctatccaagccatggcatcactctgtggggcttgggggcaaggcaactgacactggacgctggttctcatgcttgccaagcatgaagccctgtgctgctagcagctgtggaacatagccgttagctttaaaagagggtaaaatcacgtcctggacaggacagccaggtgagttgggaagggaagagagcctgccacgggcacaggcatgttgggggaagtggaagtggtgagagcacagtaggaagtgagaaggggcgggccgtgcttaccaggccgtggacttaaaccaggatgagagaacccctggaggcgtttaagttggcagacttggatttcaggaagagctctctggcttctgggtggagaatggccagtggggtaagtggtgagaggaaagacagagaacggagaaggttagatgggcttgggaaattatccaggccctggatggaggtagagatgtgtgctcatgaacacggaggggattactgatgtggggtggatgagactgtcgtcaagagtgtgggacaggaagagagggagagtcttggccagatccaagaaaggagccctcagaagaggaggggagtcagaggcaaggaaggggctgaggcagccagcccagctgagtggaccccaggagaggtatcaaggggtggtgtggggtggggaggggccagtgtcagaaagtggatggggagcggcctgactctgcttttgtcctgtggccttctggccaaaggcagggaaaggtggccaaacactgagaccaagaacaaagaaagaaaactgctggtggacttcttccaccatgagcaggccaccaagcccgcagcactgcactgcagcccccagctctgtcctggggttgggggaggtgaggaggggcaaggtggggagcacacagagcacccgctgtcctcggaacaccacagcgactagaggtaagggagcaccggatgtggctgggatgtgggcagcaaggggccagaggggccttgaaggggtcacagaccatttaatgaaggtgtattgaaggccaccatgggccaggccctagttagggatggatcagaattatatagcatatgccaggggtcaggcaggtaatgaagtgatcggaaggtgatgaggcagtggcagttgagattcacgttgcagtcgccccaagctggccaggccagggagcagaagcatggctggatgccggagcccaccaggctccccactgcagggcaagagtggcagggggagagactgtgaaaggagcataggccaggtcctgggtgaaagctgtgtcctcagccttgactgatgggtatagggagccactaaatgccttggggcagagaggtgaggaaaaaaatatttaccgagcatctacaaggtgcaaggtactcactagatgccttcagtaccaaagcttctcaaacttagtatgcatatcactcttctaagaatttcattaaaatgcagattctaattcagcagatatagggcagggcttgaggtgctgtctttaataagctcccagtgcctgggactgcactttgaggagaagagctgtgtgtgccccagtgtggtccagtgagtactctgggctccctctcgtgggcagggaagctgagggccccatgagctctcccagcttcctgaaggctccccattaatgagagctgactgtgctgtgctttgctgactgcagggcctgctccctgccccccacctccaggttggggtaagtggcacctctctccctccagctccgcagtcttccctgaggtttagatcttccaggtttataaagtcaggccctcctgttggcagctggcctccaccctggagtatctgagcttgcctgtggcagcatctaaagatagtctcccttacaggaaacaagatactattggctaactctgcaaataaaatgctcttagagggaaggaaagggaaatactcgtctctggtaaagtctgagcaggacagggtggctgactggcagatccagaggttcccttggcagtccacgccaggtaggtgcacaggactagttgggtacctgtgggtggggtggagcagtggacagctaataggttaataatgcctgtttgcttacgtgcagacaatggaaaccattttcctggggatgt

SEQ ID NO: 29300 - DNA, 2300 bp, Homo sapien
aactgggggagaatacacgtctgctgctctaagccactaagttggtggtaatttgttacagcagccacaggaaacaaatacacaggtgacagcaggcaagtgtccagtcctgcaggggcccacaccagccctcagatctggctcaggaaacacaaaaagaggagcatccttccattctggctgttcagtcctttcctccaactcttcaccagactccacatctccaccttgcctcattctctctgttcaactatttattaagaagttgctgtgcactaagcactgtgccaagtatggaggagcagctgataaaagaatcctcaggaactgaagatagagactgtttggggtttagatcagcttgcactagaaactgggcttggggggaattccaccttagtccctcaggccttgcttaactgggctttggaggggaaggtggcttcccccacacctgccctcactgatgaggcggtcccatagttcccaccatcatgacatggactagtaatacctgagggccctgagttctccatcggctcaccattgatctttgcttatcacatacaaaactctcataaaggaactgggttttccccaaactgcgtcaaaacatgaatgatggtgaggggaatttgccgaggtatgaattcaggtaccagcagatatttccttttattttttctttagagacaggtcagtggctcaatcatagctcacctcaaactgctggactcaagtgatcctcccactttagcttcccaagtagctgggactacaagtgcatgccaccatgcctggctaattttatttaaaaaatttgtacagatgatgcattagtccgttgtcacactgctataaagaaagaccaagattggataatttataaaggaaagaggttaaattgactcacagttctgcattgctggggaggcctcaagaaacttataatcatggtggaaggcaaaggagaagcaggcacatttttcacaggtcggcaggatggagtgagtgcaagcagggaaaatgccaggtgtttataaaaccatcagatcagatctcttgagactcactcactatcatgagaacagcatgggggaaactgcccccatgatccaattaactccacctggtcccgcccttgacacatggggattatgaggattataattcaagatgagatttgggtagggacacagagccaaaccgtatgagatggggtcttgctatgttgaccagtctggtcttgaactcctaggctcaagcaatcctcctgcctcagcctcccaaaatgctggaattacagatgtgagccaccgtacctggcatccagcagatatttctactgcatttctccaggaatgagtgggttggagatgaggagattctggaacttctgtcatttcctcccaacaattctgggactcatgttcactctcctgggataggggaaactgacttaaagtgattttcaaatggcattcctgttgaaagagttaatatatgtacatgcatacaacatacacacacatttgtgtatgctacataccatggaggaaagccagtcctggtataaattgtataacttcaaaataataatggaattatgatttcattttaatactgatttcaattaaaaattttaatagactattttttagaggttttaagtttacagaaaatctaggtagacaacacagaaaattcccattaacccctgtattagtctgctaggacttccataacaaaatactacaggctgagtagcttaaacaacagaaatttgttttcccacagttctggaggctagaagaccaaggtgcccacaagtctggtttctggtgatgcctatttaccttacttgcagatggctgccttctccctgtgtcctcacatggcctttcctctgagcacctggaggcaagagagtgagctctggtgtgtattcctctacctaggagacaccagtcctattgaattagggcctcagccttacgatctcatttaaccctcattgcctccctttaggtgactaggtgtgagggtggagccctcaagagactgccttctctccatctgctgtttgtagtgggaggatacctccagagaggctgctgctcattgagctgcactcacatgaggatacagactttgtgaagaaggaattggcaacactgaaacctccagaacaaaggctgtcactaaggtatgtgctacaagcatccttggggaagaagggcatgagtaggcaggggcatttttatatctttagaggataggcaaagggaagaccaaaattt

SEQ ID NO: 29301 - DNA, 2300 bp, Homo sapien
aacatgggccactttggatctttgagggaccagtgtgtaattgagggaagttaggtcataagagccaaatcaccttcccttgactgcagataaatccattaaggcttgccttatgctaatgaccttgttttgaattaaagtcacaatgttttctttttaaaaaaaaaaattcactcctccaactttgccattaagtactgctccaaaccccccactcatctgccaatgggtgatgctctttccccatgatcattatatatctctgcatccccacaaacatccaggggaggagatgtgggaaaagaagggcctgtgggctttagagttatgagtaagcatggcaggagcagatacagaggagggaaatctgccagctgccacccttgaaagccagcccatttcttctgagcccacagccaagcaggcatacctggaagggtgagggagtggagggccggctttcactctagatcccacctgtgttcccacacccagagtggccaagagcagtctctaaaatacgccaacccatgatttctcaaaagtagggattcttgtcttatggaatcagtgcagcgggggtgggtgtcagggtggaattaggtcttcctttaaaaagaagtttcagtgcatagttatcaacatcactactgcacaaagaaaaataagccttgcagcttagaacaaagggtagcaaagtattcaatcaccaggcaggtttgtaattttgtttcgttttgttttttgagatggagtctcgctctgtcgcccaggctgcagtgcagtggcacgatctcggcccactgcaagctccacttcctgggttcacgccattctcctgcttcagcctcccgagtagctgggactacaggcgcctgccaccacacccggctatatttttagcagagacgggatttcaccatgttagccaggatggtctcgatctcctgacctcgtgatcggctcgcctcggcctcccaaagtgctgggattacaggcgtgagccaccgcacccggcctgtaattttttttttttttttaatgtttatactttccttaatcctttctgggaataacctcctctgggaccactttccttcctgttctatgtacctcagaagcacaggaatgaagcctgaaaaaatattatcttgctccctaagtcactttcctttctgatctagttcttgggtgatgaatgaaggtggaaagtagcgaaggttgctatgaaaagcttggactttattaccagggccactgcattttcaacaggagtgtcaggatcccagcagtaatgcttttccatggatcagccagacaggcataaggggaagttgggagaccaaaaaagccattgacagattccaggtgagcaataaaccagaattttgaccaactagaccagcgctgtcctacagaaatgtaatgggagccacatgttaaagtttaaatgttttactagccacatttaaaaagaaacacatgaagttattattatttgttttagagacggggtcttgctttgtcgtccacgctggtctccaactccttggctccctcaagcaatcctccagactaggcctcacaaagtgctgagattacaggcctgggccactgcccccggcctgaagttaattttaatatttcacctaacccaatatatccaaaatatcatttcaacatataaaaattattgagattttacctcaccagtcttagacatccagcgtgtggtttatgcatacagtacatatcaattccacactaaattttcagcatttaaagggaaatatggtcctgaaaaaaaaacaacaaaacaaaaaaacgcctgtttaaggagaaagcattccacactgcttgttttaatataattaaaattaatgtatcaattaataaatcaatagcccacgttggctagtggctgccttactgggcagaccaggtctggattgtaaatacgttcagacgttccacgcaaaagcaaagttccctgcagacgctccattaagttctgggtgcaaggaagcgcggatccttcagttctgggcgttttcaccaggtggcactcagaacaccctcacgtgacaagcgtcccacccggaagcgaaatctccccttctacagagttcctccggcgcttcctccaccccgggatacacagaacctcatctcctacggtgctgaagcctgcagcagggcaggatgggcaggagagcagagccgcggagtctgcggcgcgggtgaagagcggcgcgtaattcccgcagcaagattgttccgcgcccgcagcccctggacta

SEQ ID NO: 29302 - DNA, 2300 bp, Homo sapien
ttttctggaaataacatcagtattatctgtttttgtttttgttttatttgttttttgaggcagatgctcgctctgttgcccagattggagtgcagaggtgcgatctcagctcactgcaacctctgcctcccaggttcaagggattctcctgcctcagcctcccaggtagctgggattgcaggtgctcgccaccatacccagctaatttttgtaattttggtagagatggggtttcgccatgttggccaggctggtctcaaacttctggcctcgagtgatctgcccacctcagccttccaaagtgctgagattacaggcatgagccactgcacccagcctctattgtctgttttgtgtgtgccaacctacgaacacatagagtatctccaaggtgcattgtagagattgttaagtgtcctaaaaatgagtctataaaggaagtgtttgagtggggaattgttttatgaggaagtgatctaagtgattttttccttcctgtctccattttgtctgctttcaggtctagacgtgttgggatgttggctgtactcttgaaggtggttcgcacggagagtcttttgggcctttggaaagggatgtcccctgtaagctgccatctgggtctaggttccctagcatccactccttaataaccagctatttctcatctaccttaccagctcttaaggatatgtgagagtcagaagtggtgggagtacctatgtggtcttatctctcatactacaactaacttctgtttgaaggctcagggatatgttgcatttgcacattatgcttagatgtgatttattagtgcagcatagtctctacagcataggtacctaatgtcccacctgtcagaatgcccttgctcttatcacttcagtaaaagtgggatggtacctccacaccagcatttctttgctcaaaggctttttctggccttagggactcacgccaaggaattagtgcccagcccaaacccaaatcagaaatccatacactgatttctctattatcccagtaatgtacttcagagtaattttgtgttttgttttcaagagtataggccagttatataactcactgtaggtttatttgcagtttctttgtgattagatttagttctacatttttagcaaggagaccacagaagtgatgttgatttcctaacccacagcactgtgcatttccaaacccacagagtcctcaaccactgaaagatgagagttggtgtttaaaatcccatgtccctccccactcagttggagggataactctgaggtgtgttctacaccgattcccagagttccccagtgggattaagttgcccacagcagaaactggttttataacatcgtttattgactgccttctctcctatctcatgtcccccacttccctattggtgttccttccacaccttaaacaaagcacttgcatgcgaatcatcttggggtcttttgggaaaacccagctaagataatacttaaagtgtttggtctttgattttcttttctccctgaccttctctgcagtccattgtgagatgtgtccctggcgttggaatctactttggcactctctactctttgaagcagtatttcttgcgaggccatcccccaaccgccctggagtcagtcatgctgggggtgggctctcgctctgttgcaggggtctgtatgtcacctatcactgtaatcaagacgcgctatgaggtgagttcaaccactttagggcctcaggatagttcggcttagccactgggctcctggggagtgaccaccgatgtcaactcctgatttgtaatctaacatagagtctgatgtggtcagacaagccatatgtgaactagatcccatggtaatgccccataacctgcagtctgcttgttcagtgctgaaatgcagcgcctccatgcgagtcactggttctgtgctctctttgcagagtgggaaatatggctatgagagtatctacgctgccctgaggagcatctatcacagtgaggggcaccggggcctcttcagtggcctgacagcaactctccttcgagatgcgcccttctcaggaatctacctgatgttttacaaccagaccaaaaatatagtgcctcatggtagggataaaggaagatctggggaagagctatccttgagacatcagatcctcaccattttctctgggatatgagactatgtgtttctcttagcagagtgttaggaactgagccatatcatgattgtgtcaggaactgggatgcaaaggtggatatgacaaacttgatccctgccctttgg

SEQ ID NO: 29303 - DNA, 2300 bp, Homo sapien
tgtggtggcgcatgcctataatcccagctactcgagaggctgaggcaggagaattgcttgaacccgagaggtggaggtttcgttgagccgagattgagccactgcactccagcctgggcaacaagagcaaaactccgtctcaaaaaaaaaaagtgtatgtttcttctcctgttaatttgtctattgtcagttcattttagcagtgaacactcagagggtggaggggaagcccctacaagagctttaaaagctactgatgcttgggtctcactcagagattctgatatattcagcccaggtgtaagattttaaaagctgcccaggtgatcctaatgccaaggctgaggcccctggaggaaccctgcagagctgcactcactactcagcaatcccaatccacacgtgaagggttaagcaggagtacatttgggtgcagggggcagggcattgttttgggactcaggggcctctgaggaggcttgtggcctgagtttctgccaacaaactgaatgcctcctcttcccataacaaagcgtagaagcgggaggcatttgcatttgccgcaaggggctgtgacttctctgaatttgtccctcaagccccaggtgcttcagccttggtgggtgatgaagcagagcagcctgggggtgacctgtgctagggtccaagggtttccaagctcctcagaaaatcatactggcttcagtggagctgcagagccacttgcaggagaacctggatgtgctgtcctttggaagagtggccataagggtctacgagttcattttagggtgggctcagaaatcagattgactcagcaggccccagagaggaacctgcactttttttttttttgacggagtcttactctgtcgcccaggctggagtgcaagtggcgcaatctccactcactacaacctctgcctcctgggttcaagcaattctcccgcctcagcctccccagtagctgggattacaggcatgcctggctaatttttgaatttttagtagataccgggtttcgccatgttggccaggctggtctcttgaactcctggcctcaagggatccgcccgcgtcagcctccgaaagtgctgggattacagccaccgcgccccttcaattaactcctatttttttgtttgttttttggagacagaatttcgctctattgcccaggctggagtgcagcggtgcaatcacattcactgcagacttgacctctaggctcaagctatcctcctgcctcagcctcctgagtagctgagactacagggacgcaccatcatgattggttaatttttgtattttttgtggagatgggggtctccccatgtttcccaggctagtcttgaacttctgagctcaggcaatccacccacctcggcctcccaaagtgctgggattacaggcacaagccaccgcgcccggcaaacttatctcctactgatggatattgcaaaatttttcttctaccaaaaaaaaaaaaaaaaaaaagatagatataatccataccatctgttcaatcttgtcctttttaactttttcagggaaacttcccccaggtgatagatggatagatacatgagatagacataacgcatacgatcagttcaatcttatcttttttaactttttcagagaaaacttcccttaagtgaacatttaaatctgaattacgtcctgttaaactgttctccaggaaaataaaataaaataaatcttcaagtttttgtttacctaacaatttgttgtgtcgaacaaaccttcctacttttcaggtaacaaaatggcagcttaggctagaaagccgctcatattcgcaggtacaagggctgggtaagaacgccccgcctggctgactaacttgagttccgcgctctggacaggaattatgcacagggcgtcgctgtggcactagaaaccccaaagtcacaagcgccccagatccgaccaggatgccgctaccggctacagcccagaggcccgctcctgcggcgcaagcccgccttcctgaagaaaaagcccagtcccggcagcgttcttctccggctccgcccttcttccgctcgactttctttgccattggctgacaacggagtacataaggacgtcatttcctgccgcctgtcttttccgtgctacctgcagaggggtccatacggcgttgttctgggtgagttccgtgtagcgtccctggcgccttccagggctagaaaaatgagcttttcctgctcaaatgaagggtgagaagactagtgatgaaagccggtcagactggatctgtctcccgcccggcg

SEQ ID NO: 29304 - DNA, 2300 bp, Homo sapien
gttcaagcaattctcccgcctcagcctccccagtagctgggattacaggcatgcctggctaatttttgaatttttagtagataccgggtttcgccatgttggccaggctggtctcttgaactcctggcctcaagggatccgcccgcgtcagcctccgaaagtgctgggattacagccaccgcgccccttcaattaactcctatttttttgtttgttttttggagacagaatttcgctctattgcccaggctggagtgcagcggtgcaatcacattcactgcagacttgacctctaggctcaagctatcctcctgcctcagcctcctgagtagctgagactacagggacgcaccatcatgattggttaatttttgtattttttgtggagatgggggtctccccatgtttcccaggctagtcttgaacttctgagctcaggcaatccacccacctcggcctcccaaagtgctgggattacaggcacaagccaccgcgcccggcaaacttatctcctactgatggatattgcaaaatttttcttctaccaaaaaaaaaaaaaaaaaaaagatagatataatccataccatctgttcaatcttgtcctttttaactttttcagggaaacttcccccaggtgatagatggatagatacatgagatagacataacgcatacgatcagttcaatcttatcttttttaactttttcagagaaaacttcccttaagtgaacatttaaatctgaattacgtcctgttaaactgttctccaggaaaataaaataaaataaatcttcaagtttttgtttacctaacaatttgttgtgtcgaacaaaccttcctacttttcaggtaacaaaatggcagcttaggctagaaagccgctcatattcgcaggtacaagggctgggtaagaacgccccgcctggctgactaacttgagttccgcgctctggacaggaattatgcacagggcgtcgctgtggcactagaaaccccaaagtcacaagcgccccagatccgaccaggatgccgctaccggctacagcccagaggcccgctcctgcggcgcaagcccgccttcctgaagaaaaagcccagtcccggcagcgttcttctccggctccgcccttcttccgctcgactttctttgccattggctgacaacggagtacataaggacgtcatttcctgccgcctgtcttttccgtgctacctgcagaggggtccatacggcgttgttctgggtgagttccgtgtagcgtccctggcgccttccagggctagaaaaatgagcttttcctgctcaaatgaagggtgagaagactagtgatgaaagccggtcagactggatctgtctcccgcccggcgcgccccaccttaggcctgcggcccgcacgtggccaggctcgggctggcgggttcccagagtgccccgggagcgggtggaggccgccctccagcggaggctccgagctggggttcggaccaggccgcgggtgggcgggagtgcagaaagcgggctaacatcctgtgttgctatcccttcggagtcccacacggcggtgagtctaggcccaggcgctgatttacaccagctacttgggctggtcgggttttcccttcgcgccgtgcgggtcaggagttaaggttctcgggtttttagacaaacaagtggtgacagcacagcgaagtaattccaaagcatccgcctacaatctgcttgaaaatgtctgaaaacaattcatgccttttttgcctttagtttgcatattccaaacatggctgctcttttgtatctagttgttaacttggcgcatccacaacttttccttaattcctatcttgagaagtgttgaatttccattcgctaatttcgtgtagttttattactcggttactctgccgtccacactatttcctcagtaagatgtgcgctgttccgtaatacacgacatgtatgggttaactttctgtttacccttcactacactgtaagctcaatgcctgacactatagcagatggagtttttggttgcttttaagggtgtgccctacttaactcaatggaatgaaaagaaataggttgctctcttatttcagattcccgtcgtaacttaaagggaaattttcacaatgtccggagcccttgatgtcctgcaaatgaaggaggaggatgtccttaagttccttgcagcaggaacccacttaggtggcaccaatcttgacttccagatggaacagtacatctataaaaggaaaagtgatggttagtcattgctttaattttttgttactccag

SEQ ID NO: 29305 - DNA, 2300 bp, Homo sapien
agaggatggaaggcattaagttggctaaggcacttacttattttagagataaagctaccaaggacttgggagtgacatgctgtaaaggagttttaggatgaatcttgcatcagtgcagattataaaagggaaagagtggcagaaagccaggaagtggattattaagaaccaatgatggaataagtacagggaaagagaaaggaaagatggatttagccaactgaatctaggctgcacactattaaagctcagggtggaggccagtcttggctcatgaacttctgagtgtcggaagtgtgctatatcaatggcaggattttcgctaacaccagtagagcttgcctctatgactggagtttggtagtactcgctgccacatagagtaaacttgagaagaatgtttgcacagccaggtcaagtgttacaaatccttctgccctcacttaggcatctatatcataaatctcaagaggacctgggagaagcttctgctggcagctcgtgcaattgttgccattgaaaaccctgctgatgtcagtgttatatcctccaggaatactggccaggtttgtggaacagtggttagtttttatattatagaaataaagcttacagacattgtgagacatagaaagacataagaaaacagaaataactcaggccgggcgcggtggctacgcctgtaatcccagcactttgggaggtggagtccggcgtattacgaggtcaggagatccacaccacggtgaagccccatctctactaaaaatacaaaaaattagttgggcgtgggggcgggtgcctgtagtcccagctactcaggaggccaaagtggagaatggcgtgaacccggtgggcggagcttgcagtgagctgagatgcgccactgtactccagcctgggtgacagagccgagactctgtctcaaaaaaaaaaaaaaagaaaatagaaaactcaaactccactgttaagagatcttaagttggactgagccatagaaatcgcccttatgacctatgaccttcctttttttttttttttttttttttccttcaagacagtctctcgctctgttgcctgttgtccatcctggactgcagtggtgtgatatcggctcattgcagcctttgcctcctaagctcaagggattctcctgcctcatcctcccgagtagctggaattacaggcatgtgccaccatgcctgactgatttttgtatttttagtagagacatggttttaccatttggccaggctggtcttaaacgcctgatctcaagtgatcctcccacctcggcctcccaaagtgttgggattacaggcgtaagccactgcgcccagcctgtaagaccttttcaacatacatgctgggcatctggcagtatgttgaactttataatttcattttgtgtagacttgtgccactaaatatctagaaattctattaaagtggcttatcacattttcccatagtcaaagtttttaccttaaaacaatgaaatactgggacagaaattttttaagaatcttagccagtcatgacggcatgcacccatagttcccgttaattgggagtctgagccaggagatccctcaagtccaggagctgggggctgcagtaagttatgattttgccactgcactccaagcctggggcacagagtgagatcctgtttcttaaaaaagccagtcatgggtggctcatgcttttgtaatatggggtactttgtgaggctgaggctggtggcttgcttgagcccagaagttcgagaccagggtgggcaacgtggcaaaactccgtctctaccaaaattaacaaaaacgagctgggtgtggtgttggcgtgcctgtagtctcagctgaggctaaggtgggaagattgctagaacacaggaggttgaggcagcagggagccaagactgtccactgcatcccagcctgagtgacagagtgaggccttgtctcaaagagaacctctgccaacttgaatgaaaaataccttaatttgtatttttaagaaatgactagttagtaaaacttgaatcttttttgccacagctctattttaataatttttctgttgagaaaactagtagatttcttgaattctaagagttctaacagggattttattcatcttaactattttgacagatttaaaaattatgtagtaagactttatttcaatgttgacaggacgggttcccatgtgtgtttttgcagagggttattcctgaaactgacttgttactaggaccacatagtttggtacacagtagaaaaaaggcagttagttattgc

SEQ ID NO: 29306 - DNA, 2300 bp, Homo sapien
gattcagcagtgcttatgagctgccctacatcaggtgggcaccaccaggcaagagaaaactgtttgaactggctagtttaagatggctattccagatggtgacagcttggggacactgactctgtggccatgggcagctgctgggtcccatgagagcatggtgatcccaaacctgagccagaatccactagcagttggtgatatggtacagggccaggggagtggagttggggagaggatcctattttcagatatacaaggttataaaaaggttaaggcctgtcagggaaggctaaccccagctgagtgggtctgagagaaatcccctctagtatttgctggcttccacttagctgaacatgaatgaaccctgccaagggagactacctcctccctaacctcagaatctagaaaaagagactttctggaactgctttgagaatgctaccaaggtctcctgattggaggtgcttggcactaggacacaagtctatggagaggctgggtttgcatgggaccccagtaagatggggtaatcctggaggttgctggatagtcacaacggatgttttccacagtatcttcaagtgtccagaaatgccaaggttctctgttcgctgaacagactccacccagaacccgctcataaatgagcttagtataccttactccaggctcacaccacctcgcaatgcttctccaactcccctgttgaccagtagccttctggtaaactgtccctgcttcccaccatcctgattccagcaatctctaccagtgttgctaaccacttgcaacttcaggatccataaatctcactgaatgccattcaacttggagacattatagggcagattttcccagcctcgcttacagccataagcaggcttcccatgaagacaatgcttgaggctgcagtgttcccattgcctcagcaccaccggaaggagccctaggaatgtggtcacatgtacatgtattttgtaaattttccaagagaatgtatgaatccatgtaaatcagttcaggccatctcaaaatctgcattcaatccaatctatggaaatgtctctataatctttttgagacagggcctcacttcgtcacccaggctagagtatacaggggctcaatcacagctcactgcagcctccaactcctggcctcaggtgattctcccacctcagtctcctgtgtagctgaggtactacaggagtatgccatcacaccctgccaattttttgtatcttttggagagagatggggttttaccacattgcccaggctggtcctgaactcctgagctcaagcaatcgctttgcctctgcctcccaaagtgctgggatcatgggtgagccaacatgacagccacgagtatttttttaataggcaatgaaaatcttgaaatccgtttaggatgaagccaccagcattaatacataaaaaacaaatatggtcaggctcaggcctgtaatcccagcattttggggcgggtcacatgaggccaggagttggagaccagcctggcagaaccatctctactacaaatacaaaaattagctaggtgtggcagtgcacacctgaaatcccagctacgaaggagcctgaggcacaagaatcgcttgaacccaggaggcagaggttgcagtgaactgagatcacgccactgtactccagcctgggcaacagggaaagactgtctccccaaccccctccccggcaaagacaaatatggagaacatcacatttttaaatacatacatacctctcctctcccagaacctgtaggcaagctgacaagaggggcaattaatgtctctcaatgtggggaaggaccatcgcctctccagggcttccaggaatagttaacctaagtgacaggaagactctcaaaaataaaaacctaagctctatagaacttacctacgcaaatggtaataaaagcaagatcatcagggcctcggaaaagtattcctgaggttaccaactaagtatgtgtaaccacttacatctattttcacagcacacatgttctccacacaggaaggaagctcagggaaattctgaagtgaaaagcaatatacactatctacagtgggctttagaagtacaactcatgtcgagacatgtatttattattatgctttgatatgcaatcccaggtattctgatctggagtaaaaagcaaactaaatgaagacaacttttagaaactgatgtttattttccatcaaccatttttccatgctgcttaagagcctatgcaagaacagcttaagaccagtcagtggttgctccta

SEQ ID NO: 29307 - DNA, 2300 bp, Homo sapien
agaaatagaaaaagatggcattacaagcattttgtggaacctccatactttggttgtgtaaattgtatatcactctatatatggtggagtagaagatcaaagatgggacttccccaaaatgtgtcattaagaacttttgttggaaagatttgagaagcagagggtcttttaataaagatagagctttataatatatctactagatcttgtattttttaaatagcctgaattagtctccagttattttgtgaatagaaaacaagtccttacaactgccacccacccctgttggtaaccttctttagggccagggccataagagtgacattggtgcaggactctgtgtgccaggcattctttccaccagtgaacacatattaactgatttagtcctcactcaaatccttgaggtgggtcctgtgatgatcctagtgtcagtgcctccagagctcaagctctaaaccatcttaccctactccccagccctcagtcacagtcagtacaacacaagcaaaatactggcatcacagtgggagtgaatcaaccagcatacgtctataactcattactcagagaatgtttaattaactataaagttagtatacgaagaggccaggcacggtggctcaagcatgtaatcccagcactttgggaagccaaggcaggcggatcacctgtggtcaggagtttgagaccagcctgggcaacatggcgaaaccctgtctctactaaaaaatacaaaaattattcaggcatgatggtgggtgcctgtagtcccagctgctcgggaggccgaggcagaagaatagcttgaacccaggaggtggaggttgcagtgaggtgagagcgccactgcactccagcctgggggacagaaccagattccgtctcaaaacaaaaacaaaaacaaaaatgttagtgtacaaagagatttatagtcaatgtttgtagtctcactggattaccttttcaaggttccctggctgattctttactgagacaagagcctaaagagaaacttggtggtaatgttgacatttatattacactgtcatggagggggcgctgggaattcaaaaggcaaggctgctgttggttggattggtttcagaagtaagctttcatctttcaaatcattagtgggtagttctagttctacatatataaaataaatagcagaagcagagttacaggacccatggcatttaacagagcacagaaaggtgtggccccacattttaggttaggaaaattataagaaaatgccggtgtctaagactgaagccaataaaatgttaattgaatgagatttatcattcgcagaaactgttcaacataagagatgatttatacgtgttttcataaatgtgaatgcatagggtaattgtcatggaaacttccaaattcaatgttagttgtaactagactggattagactcttgctaatcaagtgtacaagggcatgcttgtgtgaattttagttttggggtgtatctatgggtatacatgagtgttttagggaaggaagtgtgatcggtatttaatctacatggagtataaaaactcctggaatttgtcaatgtgattgcagctgtgttcatggcttatgggtatggcttgtgatgtgtgagtgaggtatggggtgctgggtgggatggcgctgtggtggcatagcatgttggtggaagggtgtgtggtttggtagggtgagctggtgtgtggtgtggttggacctggcatggaacttaactggagtttatgtggaatgaaccttgaggggtgagttttcacatggggtgttgattatgtgggaggtgggaggctggaatatgtgaatgttggggggctgtagagtgaatgtggggtgcgtgtgtatgtgtgtgtgagatatggttatagcttagcttagcttttgtttagattttcttttgctctttgtttttgtctttggcctttgttttatctttgtttcgctctttgtttaaactttctttggcttttgtttggtctttctttagccttttgtttaaactttgtgtggcctttttgtagtctttgtgtagcttttgtttttaagtggatcttcgctgaggactcatcaaaaacaccttgtgtaatgaaaaacccagatctataacctctccctatatattctgcatgcattgaagtaggctcaaaccctcagggacctggtatagacgcagaatctgtttcacacaacaactgctatttgaaggtaagaggattccattggtttttattttacttcattttatactttcatctttaaatgacaagtg

SEQ ID NO: 29308 - DNA, 2300 bp, Homo sapien
tctgtggacttttcatgccattgcaccagcacattctcatgttgcagagcatgctggccttgtatgacactcactgatgtctgtggacattcctctacctacaaggtgagctcattgtgagcaggatgtttatctgctctacccacttcctcatctcagtgacttgtacttatttggtctcagtaaatgaagtttttctggccattagcacattatgtgcattctaatcacttacttgcctgtatctcccactggtggataagtttcttgaggactggactcagcatgatttagctttgtgtccagtatgtgaactgagcactgtgccaggcaaaaccaaagtgtatagtaaatgttaaattaaatgggtgaaggtaacttcatttattatttagtatttattacaccttaaataactctaacattaaaagtttagtgttaaaaaaatgaaagatttgccaaaagcagatgagcctataagggaaatggacaaggagagactagagatagaggaggagatctaggagaatgtggtgtcacaggaaaggaaagactttagatggagagagaccaaatatgaaggcaattggtttagcagcatggaggtctgtggggagctatgtagagtcatttttccttgggaggaaagggccaggagccacagtggggtgcactgatgagtgagtgagtggaagatgtaaagatggagggaaaaaatattaataccttttcaagaactttacctatacaaaagaggagggtaatagggaagcaaaaagacacgggagcaggatccagagaggattttcttttaaaatggggcatcatgagtatgttaaaagctgacagaatggggaaaactttctgggaaaaatacaaaacctttaataagatctaagatacttaattacataaaactatttttgcatgataaaatcaagtgaaacattgggaaagaatatttttaacatacataacagatgtgacacacaattttgatgatcacaaacagaggtgcaaaaacaacgtatttgtaactgcattctacctgcttctcagctgtcatttctatttgtagtagaagacaaccacaccaacagacaaaaaaattaaaatatcccctcaaagttatttagttattgttctgtactcatccttaaaaacccagattataggttctgtcttcaaggaatccatcctttttccatgctttgtacacacttgtattggccaacataacagtgttttgtaattacatactgcacatatgcatctccaacctgaccctgagtttgttgagagcagagacattctcagtatccagtttatgcccattaactaagttgattcctgttgattgatagtcacgtaagtcccctgtgggcttcggtgttttgcagtgttaggtaggactatttctgcatctgtcacattcctagaaggactgttttcagtctccagcaagctcccctgttgccccttctgagtcggaacccaccttctccaaatataactatgctctgatttctagcaccatcgattagttttgcctgttcttgaacctcctgtacacacagcttgttttcttgtgtctgacttcttttgttcaatggtatgtctgtgagatcaaaatgtgttgatgtatgtcagcaggtcagcagtttgttctttttccttgtgtagtattttattgcatgaatgatgattgttttaataataaataataataaattttttattttgctttttagagaaaaggcttttcctaactctagaatattatttagtcaaggatatgtttggttttaaatgttttcctatcttacatgggtctctaaaacataaggaaaacaagagcccatgtttctttttctccttaaaaacacgatttttaaaaatacacaaatgaaaattaatgaactgttagttgagttcctttccacagagttggggggaagttggtcttccagggtgttgctctgtagggcccccctgaatgttaccttggattatgggagtagcagggggcttccagagtagagggctccctttcctgatgtgcgtttatgtctcctcctgtctccttgcatcggcgatttccagtgagatgagtcagaaaccggccaaggagggtcccagactctccaaaaaccagaagtactccgaacacttcagcatacactgctgcccgccgttcaccttcctcaattccaagaaggagatagtggatcggaaatacagcatctgtaagagcggctgcttctaccagaagaaagaggaggactggatctgctgcgcct

SEQ ID NO: 29309 - DNA, 2300 bp, Homo sapien
aaaagatgttatacaaccatcaaagtggcaaaaataaaaaaaatcaagtattggcaaagatgtggggaaaattctcataagctactgatgagaatttataaattattatgacacctttgggttgcaatctggggatactggcaaagcagaaaattgtacaacctgtgatcaagcaataataattttaggcacccatcctagagaaaacttgaattcatagaaaaagtaggtacacgtaaatctgttcaaggaatcattgtttggcattgaaaataggagagagatcatgagaaattaccaaaatgtccaccaatagaatgagtgaatcacctgtggtatatttataaataaaaatattaaatagaaggtaaaacaaatcagacatacacacattagatagataaatttagaggacaaaataaggaacatgaaaagcaaatagtagatggcaaatgtaatataatatactatgcataaattttaacaacacacaatattatattgcatattgcccaataagcagaagccataaggtctcacacttttcttataatgcaatagaataaaaatgacaacaaagtaaaagggtatcccaaaaataaaactatccttttggaaaaaaaaagatttaaaataattcctggtttgaagaaataacaaattaaaagctatatataaacggttaacaatattaggtggacatatttgtttgaagagataggtgaaagatagttgaaaagcctgggggtatattcaaggttatatgtcttagaaaacaaaaatacttgtttgggttcagttttggatctgggcttgttcttgtggcttctgatgatttctgacttggggaaaaatggggaagagttgaaatacgtccttccacccaaacctttgtttagtaataggtaggaaaatgaagaagaaaatagaatgttgcagaatgtggagggatgtaaaatggacagtactagggtagaggggaagtcagattagaggaaagaaagagcatcaggaacagtcttgtgctaggagctggtgtggccaagcacagtcggatgcccaaagatccaacaaggccatggctctgtgtccttgagtgggcacaaccattcctagccaagtttaagaggcaagtaaaaatataggggcaatgtcagatgaagtcttgttcagggtatggggctaggatgagagagaatgccacagagtatgaaggaagagtgatagatccagatgagatacagctcagagtgccacgcccccagaaagaggaatcaggcaagtactgtcccaaggcagctggagggtgagggctgagtgccctggcttcctcacttggggagaccatgggtctctgtagaaattccaatataaaggcagggaaatttgactgcatggagtcttcaggtagaaatgtttctcttgcctaaattcaggtgctaaataaacaacaaaatggtaacctctactatgaagtgtttccaatgatgggatatctgaggccattacattcctgggaataacatggtgaggtgcagggtggtggtggtggtgaaacatacgacagaccactgtaagtgagaacaaattactggcccagcccaacccacaccaaataagaaatttaatatccctttggcctgttttagattttggcaaagccaggcccatagtgcttgctgggctctctcttccacatcatccagaagacacacatttgctatggaatgattgtggaggtgagagtatagtgcatattaattcatgcaaaaagttagatattagcccagaaatgttagtaacaagaaactactgaattctctgtttgtctgttgtggaaataaaaccttctggggatgaatcaaaactatctgacaattacttgaaatgggtgaatagctaaatgtaatgtgccttggatattataactaaaaggtgctataatccagttatattttttatcttttaaggattggttctgaggagcactaccagtaaatattgcaaaaattacataaagctccaaaagctactctgtgtaaacttcttgagtgggaattctcaaccataatatctggaatatgactgataattctggatgttaactgattttatgttctgatgttttgactggttttgggaaaaattttgggaaaaaagagttttcctcgtaaatacccaacaactgggtctctgggtaaaaaggcctaatttatagagattgctaatttccatggtgtaaatatttccacaatgcagattccttccttccttttttttttttttttttttgagatgga

SEQ ID NO: 29310 - DNA, 2300 bp, Homo sapien
gacacccttctgttcccaccactcaagctgaaagggaagaatgggaaacaccctggcttctccctttctccctcctattctcctactgctgagtcccatcggccaattgataggggagtctgggaaatgaagccccccatgaagcagagtcggaaggactaggaatggatatgagagctaacaggctcagaaccatcagaggggtgggtgtgtgaaatatgcactcacataccttgtgtgagatcatgagtttatatctctatgaagggcatttgacattatccaaattacaaatgcacatcaccgttgaccccatgatccagttgtacagatttattcttcatatgtacccccacacgtacacagttacataggaacaaagttattcatgcataattgttattaacagtgatagattggagaccatttaaatgcccataattgggggcccttacataaattttggcatatcttattcaatggaatatcatacagctgtaaaataacaagaaaaagtttttggtaatgatatggaatgactccacgataatatcttgttaagggaaaagatcaaaatgtaaaacaatgtgcatagtttgtacaacaaaaataaaaataagagcattagacaaatatgtttgtgtatatgtcaatttccttgagggaggtacacactggttgcccccaggaagaggaattgagagacaagggtgggagggagtcttgttaactgtgttccatttgtagttttagaattttgtgccacatgaatgctaatcaagcacagctaaataaaatttaaatttaatgtaaacaaaagagaaacaaactaacttccttccactttaccagtttgtagacattaaaatccctttaaaggagggaatcgaatctttaaagaaattaactcctttaccttccgagttcctttctttaaggttttgtcttgttttgttttgttttctgctgtggactgatcagcaaacaagccatttatttctactgcgcacatttacacggagagaacagcctcaacccaccggcttgagaggatttccagggattcagaaatcgccagtgtaactccataaatgctttattttcatggagcgacttccaccctgcagctaaaattgacaaagtgttttcacagccgagttgttggggctgaggcagtgggtctcaggaagatccctggcttaatggatgcaaacgcacaatgaagtcccggcctggagtggaacctttcaactcccagtcattcttccaggaccgggaactcctggcacgagcccgaaagcgttcctcacttgcagcagtctttgggagtctttctgacagcgcgggctcactaacccggcggttccgcagctgtgtttgggagacttgggggcgcattagcctggacagctccctgatcggtaacccctttgatgtgtgttgaatgaatgagcgtcgttagcgtagtagtaaatttatgggagaattaaagcaatccagataggggtcactacggagactttaattacccagggactgtgaagtggggaagagctgtctgtggaggagcgccacaccatgtcttagattcaggcaggccccggattctggtgacccattactctacggtcactgagggtccgggcccccaggactcagaggcaggagacaggaaaagcctgacttagaatcggggaaggacctggagtcgcacatgggggctcccgaaccgcggccccaatactgcactgcgccgcagggaagagccccgggaggggcgcgggtccccgccccgggcgcgcgcagccctgccccgcctcctcccggtgcgccccgcccctcccggcgcgtgccgcccgcgcgcccgaggtgctctggaggaaccggcccggcgggcaccccctgccccggcgcaggcgcgatcgcgggccgcccctcccgccgggcgccctgcacgcgcccccgccccgcctccgcaggctcccccgctccgggcgcctctgattggctctcggccgggccagcaggtgtcggcggtggctgcggccaggctggccctggctgcctgcggcgcgggcgcctccctcgcagccgctgctgccgacgccgctgcgctcccgcctcctgtcggttcccgggttcccgctgcggctgcggttctggcagccgagcccccgcggtgctgcagcccagctttagcgcgcagaccgacccgcgccccttcttcgccgccggcagcctctaatccacgcggcgcgttgcggcaggtgccctgggcgtactgaggcgcggtggcctga

SEQ ID NO: 29311 - DNA, 2300 bp, Homo sapien
ctaagaaacaaagcctggcttgccctgtgtttctaaataagtagtagtatggtcctgtgtttctaaataaatgagtagattggtagctggtacccatgggacaaaaggattgtagtctcagaagtgggttcagtaacactactcctttgggagagaaacatgtcaccacatgttttggggatgcacctgcacatctcttctccccccatatcctggcagtggttgtacagaagctacgcaccaccacctactttttatctttactgtcattgtatttactatgactcttcaggtacttttcatgtgcttatttcatctaaaacaaaaattcacaacagattctaatccaacctacctcaaggccaaatttcgcaagatacttttttttttttttgctttttaaagtgtgatataatatacataacatagaactgaatattttaaccattattaaatgtacagctcagtggcattaagtacattcatgttgttgtgcaaccatcactatccatctccagaaatttttcatcattccaaactgaagctctatgcccgttaaatagtaactccctattcctttcctcccccagctcctggcaactatcactttactttctgtctctgaatttgactactttaggtacctcatataggtggaatcatacagtagtttgccttttgtgtcttacaacagtggtcctcgacctttttggcaccagggacgggttttatggaagacagttttcccacttacggtgtgcggagagggatggtttcagaatgaaactcccatatgcagttcacaaccagttcgtgctcctaggagaatctaatgctgccactgagcttttgtggagccagtccatggcctggaggttggggacccctgtcttaccaaatacattttaaacatttaaattttaccccagcttatgcttaaagtggttcgcagtatctttccaagagacctttactaacatgaaaagatacatagacataaatttttaaataggagaagaaaaatataaactaagtataattcaaaaatgcaccctgctgtgaatgacacaatttcagacattggaccacacatttatatctgggtcccttaatgcccaaaacagaacataatacttgatcaattacataattcttatagagaacatactgacttccaagcaaagcaagtatttcagggcactttaattctgaaagatttttctccctttcattctttgcagggaaacattaatgtgggggactgtatccttgataatggcctcatagtatttcacaggactgctccttaaaaagcgtaactccacaagagctctaaaaaaggcctgagagtgaggccaaggaagcatggcttatattgacattgttcatttatacagtcatttaacaatagttcaccaagtcacctgtgagcatggattacaaaggcaaatgaggtataattcttaccctcagtgagattacaaatcatagcctagtgcttttgattaagggtcctcaacccccagactgataccggtctgcaagctgttaggaaccagcctggttcctaacaaatcagcgatggcattagattctcataggagcacaaaccctattgtgaattgtgtgtgcgagggatctagggtacacgctcctcatgagaatctaatgcctgatcccaaaaccatccacccccttaccaccctggtccatggaaaagttgccttccataaaaccagtccctggtaccagaaaggctggggactgctgcttttgatgatcaggctagattcaggagcaagaaatctaggctccatgtcctttaacatccttacatatcattttctgcagtccagcttctgagagatgttgggcatctaaaaagtgtcttcccccagcaagggcattctatgtggtggattattgtgagctccatataccttaaagcacaaaccaacagactgatggctccccatgcctgggtgagacctcccacatggagtgagtcacacaagatgtcaggcaaagccaaagcaagatgcatttgccttttgacataagaatctgtggtagggaagaaagcacaggaagaagagagtcattttgatgtcctcaactgcagtaggagccatctccctgacttgttctgacctgacttgttccctaccgtaatctcctggatgcagaagtccctcaggcccatcgggtaaactaagaatcttgctggagttggggtcagaatgtgagccatcagagagatggctggatcaggggattcagacaattatatggggtgcact

SEQ ID NO: 29312 - DNA, 2300 bp, Homo sapien
gaccatgaaaccctaagatttctggaatttttcttttaatttctctgtgtttgtagttttttcttcactggatcacctttggcttcttctgagaaataaagtaatataaaatactcatgtacatctactaagaaagaaaggaaacaaatagagatgcattatctagattacaaattatttagaaattagagtgttagagtattaacatagggcacaaaattgaactaataaaattactttaaagcacacttatttagatattttgatgctccttgttttggagccagctctaaactttacacctcaatttgggatacgaagagtgttttccatttgaaccagagctggaagaccacaaatgtggttagatttctgagagttaagaatttgatttttttttcaggcattaacctacaaaagccttcatttccacacctggtgcatagagtaatgcttaccttataaaatagctatgaagattaataatgttatatataagctttgtaacaggcaaacagtaagtactaaataaatggcacttatcatcattgttaattacaaaagattgtcaaatccaggtattcttaacctgcggtctgcagatccttggctcatggataaaactgcaggggtggagatccctaaaattggatggggaaagattatatctgcattttcattaacctctaagcaaaatttaccatttctttccattatgaataaaggcaacatcatagtgatagaaggacctgtcacttcgcaccaacagaagttacacatactttcatattaaatttctgatgttacggacatcacaaaatatctcttacatttatcagctttttgaaattatagtattagacctaatcttgctagatcttattagtgtattaataaagaaatacacgttattaatgtattttttaaatttcaatataattggtttcctttgtaatcctatgtactttgtgaacttaaaacttaacttctcattattctgagaagggattcagcagcttcacaggattgccatggcacacacaaaaaagttaagaatccctaaattttagtctatctctttgcttccagaaagccaaccaagtttgacaattgaacacacctgcctgagtgagccaattcccaaagtctcgggtttatttttctgtgcgtgacctgataggaagatattacggtctggtacatgactccatcaattaacctatttgctgagctcaccttcagcttatacctggcatctttcctgaattctctgttgggccttctgaggcacacaaaatgagctgacaagctgattttctggtatcttctgttcatacacacctggcccccactcgatgccaggcccaggattaagctgggcagtgattctcaagcctgatcccagaccagcaggcaggatcagcatcaccaaggagcttatgagaattgcagattttcaggtcacaccctagacttcctgaaacagaaactctggggtctatcagtgttttctcaagccctccagagacacacgctttagtctgagatccaccgtgctagggaatcggaggtccgtccaatcctggaaagagaggctcccatctccagtattggttgagactaacaccgctcctgcaactggggttggaatttcaatgcaggtagttgctgagcgggggccaatgagttgaaagccggagcaaggggacttgttttgttcctgcaccccgattttacttacattacccggggcctcgagggtgactcatagagattagccctgagcgtcgacccctcggcgccgccactgcacagcgagagaaggggagtcaagagagacgcttgagtcccttgactgtcctcccctacgagctctctgggaagagagccccagacctgcgaactctgggccgctctgcggccgcttgaacacttcgcgggtcttccgccccgcgctagaggacgcactccgtgacgggaattgcggtctcggccgcccccggcctcaggctttccgggctctgctgcctccagaaaactacaagtcccaggatgctcggcgcgggacggtcacgtgggaggggccgcgggcgcggctaaatagtctccatcggccattttgtgcgagaagccgcagcgccgcctcttctctcgcgccctcgcctcttcctccgcctcctccttcgcctcttcctgcctcctcccggcttccgccgccgccactccagcctaatcccaaccccagggcgaagcgttttcttatttatttccgttttctcgccactacagcctcctgacaa

SEQ ID NO: 29313 - DNA, 2300 bp, Homo sapien
aaatcatgttgcctttaaatacaattttaaaagcaatctcaaggttacacataaagcacccaatcactcacctccaagagaaactggcagatgttttttctttggtcaccttgaagctgaataacctctccgtattcaggatgttcaatcacagtaccattacaggcaaatttctggaaaagtgcataaatatacaacaaaatttagtcaactactatgaggttttatttcaccgtatgaacagaattagccatttcagtaagctagatcatatttagagaaacagattttgtctcctataatccacaatccttccaaattaatttgtaaaccaggaaatgattttatgtgtaacatcaagaactaaatatttcacatttaaatttatttaaaagcaacgcgaatcttcttttaaaatgagagaccacactgggagaataactaaatatttacatgttaattacaaaaatgagaacaactttcttggtctagttattttcatccacgccgatataaaggtgtgaatcataatccagttcagaggtgtgcatcagtaactctaatcctttcttcctaatccctttacctttttgaaagctttcacaagtttctttttgtcataatcatctgcaatgccctgaacagtagtcagtgtctttctgccgttccgttgctggattcttatatgaatgtaatcctcagtccctgccgggagtaagtcgtcacccttagttgcatcagcaaaggggtctgcgaatggataaaaaaaaaaaaaaaatccaaagtagaaaaatattttttaagaagtactttccagaaatacattatactaccaatccagacagtcatcaatgaaggttctagtgcctttgctgtttttgccggtaggaatggagatgggggtggagtattaataaaacccccaagatactctcacaaaaagagaaacatttgaacagctatgtccattgtagaaaaacgctgttatagataaataatgttatcgttcaatatggtcctctaatgagaaaaagatttagaaaaccttaatattgtagccgctataaaaatgtgcgtcatctcgattacattctgatgaaaacataaacattcgaatacgcccaccttaatcatttaaccgtaactgtgccttgccaaaaaaaaagtagattacatatatatcaagaggcgtaatttaacaaattgctacgcaagcagagaagactgaaccactggccagtgacagatcagaggcttgcatccgcatctttccctaagtgcccccaggagctgccagagaacgggcgccgatccctggtttccctggcccggcataccctttgcaagtagcagggccgatctaggagtccacgaaataggatcgccaaggtttcaaggggcagaagcggaggcgagagccgggtcaaggacggggcagggggtggcgcagggcccgcggccggggctccgagaggagggctcggagtccggcgctgtcctcggggaaggggtcgccaggggccccgtcgccattttctgggcgccgagacaaagccccactaggggtgcgggaagggcagaaagggggcccctaggggcggtggccaggcgggcaaaaggccgagatgcgcgccgggcaagggagggaggcggcggcgacgggatcttaccgaaagattggaggttctggatagtggacatgcgatactagtgtgaggccggtgaggggataaaattcctgcggggcccgcccggatcaccttgtcaggaggctgtagtggcgagaaaacggaaataaataagaaaacgcttcgccctggggttgggattaggctggagtggcggcggcggaagccgggaggaggcaggaagaggcgaaggaggaggcggaggaagaggcgagggcgcgagagaagaggcggcgctgcggcttctcgcacaaaatggccgatggagactatttagccgcgcccgcggcccctcccacgtgaccgtcccgcgccgagcatcctgggacttgtagttttctggaggcagcagagcccggaaagcctgaggccgggggcggccgagaccgcaattcccgtcacggagtgcgtcctctagcgcggggcggaagacccgcgaagtgttcaagcggccgcagagcggcccagagttcgcaggtctggggctctcttcccagagagctcgtaggggaggacagtcaagggactcaagcgtctctcttgactccccttctctcgctgtgcagtggcggcgccgaggggtcgacgctcagggctaatctctatgagtca

SEQ ID NO: 29314 - DNA, 2300 bp, Homo sapien
aatgagccagttgtttcaataccagttattgaataatatgttatttcaacctgttctttatcttataatcctatatccaatagtctgttgtggcctatcttttttgttctttagatctctcagtatattcctgtgcccaagccaggctgtttttattactgtggctttacaatatgttttgatagctggtgggcaaatctgtattattttataatcaggaaaactcacaaaggagtgtgtgtgtgtgtctgtgtgtgtgtgtgttcttgcatgtggaaggtggatgaggaaatgcctttgaatgactaggtctactttggaagctgcaaaggagtttgacacagtgcctggagcagagtttccagaaaagcttggaaaaataaaaggagaattggagactacagggctctcaaaggaggctgatgctcacacttacaaggtctgtaggttgatgcaagcagagaggaaagctggcatggactgatctctgttatttttatacactagcactaactgcctttcaaggcccattaggcctggaaaccttttcccagcccctgggaagtcactggggatgctaaggttagtcattcacccactggggctatctaactgagctcaggtccgggtgcactgccagcagctgtttgtgtacttacagccccctgggtgcagacggacccccagctgccagccatatgccttatgtttcattgtcccacagctttcaaagaaaacaagtcttttaattcagcaagtattcactgaatgtctgacacccccagtgcagaccctgtcccaatcccccaatggggtccacctctatccaactctgggtgaatgaccatggtgctcttgcgcgcgggcacacacacacacacacacacacacacacacacacacacacaggcacacacacataactcaggcttggggcccacctctctgggctcagaggtatcaaagcaggggcattcctatcttaaggacttcttgtcttaggggctttggccccacctgcacaggacagaaaattagtggatttctaggagaaagcaggctatggcagggtatagccagggactcagctcttccttccagacatgcaggaaccataaggagggatggtcaaacagggcctgcttaggcctcttgctgggatcactccaagggtctctggggtcactcagaggagccgggaggctgcctgctgctgtacactgagacagactcctggggtgtttggatcacggcagcccacatgctgcctttttgttatcttttctgttttgcctcttccgggctgtacttgtcttgagtttttggccttatgacatccatattaaatggggtagggcagagcattgctcagtaaacagcaagaatggccctgggcatggccaaggcagttctgctaagtgtgaaagggaatgtgcctgccatactttgtgctttaggcccaagtgacctaggggccagcctgcctactggcctcactcccaacattacaggtgtttgactctactccaccccgtggagagacggagcacaggagccacccaccgggggaccacataaggtcatgcacacccacagagtgcccagtccctgcctggccttgtccccattttccctccacctagggttggggtgacaatggaggtaactagaagacagatcaaaaggttcttggtcttgacacagatgcaagaaggaggcagataatagacacctcccttccccctcgcccacataggctccggtgggttctcagggcaaggcctggctccctcctctccgacttcaggtacaggtgagtgtggagggaactgaaagaggaaaggtgaagtgctgtttggcttcgacctggagggggacagaaggctctctgggcaggcagggccggtcttttggcaagaggcgcgctctctctcccttccccttccatcgagggctgggtgtgaaggtgagagcaatcagaaaagaaggtgaagaggtacttggccttgacacggacggggggggcggtcccaggccgaggccgccccgcccccgccccgctatacccggcgccgcctcccggcgtctgagctgacacctccttagcgctggccgcgggccgcctctgcggcagcgctagtcgccttctccgaatcggctccgcacaggtaagatcaggggacccggcgcctgagctgccgaggaaggagtcgggggtgctgcgtgagactgagagttgggaggcaaagaaacaaaatcggatttcctcagagggccagaggaagagactgaaacacggt

SEQ ID NO: 29315 - DNA, 2300 bp, Homo sapien
ctcttgcgcgcgggcacacacacacacacacacacacacacacacacacacacacaggcacacacacataactcaggcttggggcccacctctctgggctcagaggtatcaaagcaggggcattcctatcttaaggacttcttgtcttaggggctttggccccacctgcacaggacagaaaattagtggatttctaggagaaagcaggctatggcagggtatagccagggactcagctcttccttccagacatgcaggaaccataaggagggatggtcaaacagggcctgcttaggcctcttgctgggatcactccaagggtctctggggtcactcagaggagccgggaggctgcctgctgctgtacactgagacagactcctggggtgtttggatcacggcagcccacatgctgcctttttgttatcttttctgttttgcctcttccgggctgtacttgtcttgagtttttggccttatgacatccatattaaatggggtagggcagagcattgctcagtaaacagcaagaatggccctgggcatggccaaggcagttctgctaagtgtgaaagggaatgtgcctgccatactttgtgctttaggcccaagtgacctaggggccagcctgcctactggcctcactcccaacattacaggtgtttgactctactccaccccgtggagagacggagcacaggagccacccaccgggggaccacataaggtcatgcacacccacagagtgcccagtccctgcctggccttgtccccattttccctccacctagggttggggtgacaatggaggtaactagaagacagatcaaaaggttcttggtcttgacacagatgcaagaaggaggcagataatagacacctcccttccccctcgcccacataggctccggtgggttctcagggcaaggcctggctccctcctctccgacttcaggtacaggtgagtgtggagggaactgaaagaggaaaggtgaagtgctgtttggcttcgacctggagggggacagaaggctctctgggcaggcagggccggtcttttggcaagaggcgcgctctctctcccttccccttccatcgagggctgggtgtgaaggtgagagcaatcagaaaagaaggtgaagaggtacttggccttgacacggacggggggggcggtcccaggccgaggccgccccgcccccgccccgctatacccggcgccgcctcccggcgtctgagctgacacctccttagcgctggccgcgggccgcctctgcggcagcgctagtcgccttctccgaatcggctccgcacaggtaagatcaggggacccggcgcctgagctgccgaggaaggagtcgggggtgctgcgtgagactgagagttgggaggcaaagaaacaaaatcggatttcctcagagggccagaggaagagactgaaacacggtagccccaaatccttgggcggctgggaggtggtccctgtcatgcccacgacgggtgggcgcgtctttaccgacagcctgcatggatccgcagatgtgctgggcgcttagatgcctgcggctatgcagagacgcagtccagagaggtgaccccagatcctggtgggggctggatcccagggccccgacatccctttgcaatttccagccagcagctaaagactcccttcccggggctttagagaggctccaggctcgcgatccatgaacacacaaaaaccttccttgctcatgttctgaaaaaaagccccgcctcagctttgtgaatgttaataatagggggaagatttgttctctcttgggtgtgtgtacaggtggaacaatctgcagaaaaagaccttttttcggaaaaccttttcagtttgaagtttcagcaaatccatttttcatttcctttcatttggggagatgacatgaaatttaagctccagctttggggctgtctctgaagttctggggttcggcttacctttcccgggatgaggttttgatttggaggaagtaaaatgggttttgtcttaacctgggctcgttctttaaacttgtgaggccggggcggtggacttactgacatcctgtattctctcacctgcagctaggagaaaagatgttcactgtgctgacccgccaaccatgtgagcaagcaggttagtatctctcagcaggtagcaagcgtggttttgccaaatcgcaagagaaccccagcttcggcctacagtttttcatccatatcccctgcaaatgattgtttaactttattggtttgagactcagtactcagctgggtttcaacac

SEQ ID NO: 29316 - DNA, 2300 bp, Homo sapien
accacacatgggttcccaatattgtggtggtattttattctttagatttttacccaggccagtgcagagaggtgttaccttttatcacttgattaaggtgatgatctttgccatgacagttcccagatgtatttcaagcctttcctctaagctctatgccagcatatcttccctgagactgctctagcagcctcctaaattctgtctttaatctgttctctgctcagcagttagagggatcttttaagtaagtaaatcagatcacattatttcctgtttttaacagttcgattgcttttcataatatttggaataaaatctcaacttcttactctggccttgtatcatatgctttaatacccagatacaccttatgccatccctccttcattgtgttgaagccacactggtcttgaatgggccaagctctctcctcctccatgacctttatacatggtgtctctcttgccaggaatggtctacccattgttaatactcatcgtgtagcagtgccaacttatctcttgtattttttcctagatatttttctgagagttaaccaggctaccacataaaaaaaggttaagtccccacccttctttttctagctcaccttgtttccctcagagttatcacaattgcaattgtttgacttgttttgctgcccacgtaggtgttgtttcgttccagttagaataagttccatgagggcaggacctttgctgtcttttctgttttattttctcaccttagtctggtaaggggctcaataaataggtagtgaatgaatcagtctttaggtcttgttgtcttgctttataatttacaaagcaaaagatatgaatgaagaagaatgttcattttagcattttttttgctactatctccaaactggaaattacccaaaggcccataaacaagagactggataaattgtgataacaatctatagcaacggagtctacagcaactacatggaacaatgcggatgaatttcataaataacactaacaaataagctgacacaatatatcctgtatgcttttatttatatcaaattcaaaacaggcaaaactaatctacagttcttataagtaatgatcatatttacctttggtgcaggcagcagtggctaaaggggaaaaggggagcttctgagctgctggccatgttgtttcttcatctggtgttaactacgggagtgtgttattatttttgttttaaatttttttagagacgggtcttgctatgttgcccaggctgatctggtactcctggcctcaagccattctcctgcctaagcctcccgagtagctgggattaggggcacgggccaccccgcctggctgaagtgtttgcttgtgaaaattcagagccctatccatatggtttatgcgttttctcaccaaatgtatgttaacctaaaaagtttttttttaatgcagtttcctggctgtacaaccagagaactttatttgcaggtctggtgaggggcaagaatctgcatataaaaacaagctctcaaacacactttgaacttccccgaacacaatttgagaaacactttgggactccccctacagttacagaattattttctaaagtacattatcttgttatatcactcctgtttaaagttgatttttatcccctatcttacaggatatagtccaaactccctagtctggcattcaaggcactccaaaatcttactcccaaacaccttcctagcttttttctccgaccattctgcgtctctcattcctatttcccgcagcatttcatgcagcttgagccccctgtttcctaaaatgtgctccccacaagcatctcgagatccccatcccaggcagccccaggcagtttttaagtttctaccaagctccactatactggcaaggcaactttccccaagcaagtcttgtttccttcggaaggtcgcaggcgcccaggaatgaacaggataactgctagtggctccagatgtcagaaaacagatgaccagatcgagcacgcgcagatctctggttggtcggctgtgtgcctccggaaggcccgccctgctcgtccaatcacggagagggagggcacgttgagagtgatgccaggaatcaagatggccgcctgggaccgctctcagccccttcggcctctacctgaagagccacgccccgtctgctacacccaactgattggttcctcaatcacagagaggaaaggcaacatgaggatgacgtcagttacaaatatggcgttttggacgggctcgatagtttgcttggcctctactcaaggtgcgt

SEQ ID NO: 29317 - DNA, 2300 bp, Homo sapien
ggctgctagagcagtctcagggaagatatgctggcatagagcttagaggaaaggcttgaaatacatctgggaactgtcatggcaaagatcatcaccttaatcaagtgataaaaggtaacacctctctgcactggcctgggtaaaaatctaaagaataaaataccaccacaatattgggaacccatgtgtggtggtgtattcctgtagtcccaactattctggaggctgaagcagaactgcttgagcccatgagttcaaggctgtagcaggctacaatcagacctgtgaatagctactgcactccagcctgggcaacacagccagaccccatctcttcgaaaaaatgtatatgtgtgtggccaagcacagtggctcacgtttgtaatcctagcacttctgggaggctgaggcaagtgaatcacaaggtcaggagttcaagactagcctggccaaaatggtgaaaccctgtctctacttaaaacacaaaaattagccgggcgtggtggcaggcacctgtaatcccaggtacttgggaggatgaggcagagaactgcttgaacccgggaggcagagaactgcttgaacctgggaggcagaggtggcagtgagccgagatcgcaccactgcactccagcctgggtgacagagggagagtccatctcaaaaaaagaaagaaaaaaaaaagtgtttgtgtgtgcgtatatatatagagagagagagagtgaagagagagagaatgtattctgatgtgatgcaccaaggacatagcatttctaccaaaaattcactatctgaatccaatgaggaaaactccaacaaacccatgttacaaatttaacagttaaatctaaaactatcagttaaagactagagacctgataaataattgcaatttgtaatcctccattagatcaagagcctggaaaaacaattttttttcccatttgctccaaggaacataggagcaacaacttataaatttgaataaggactgaaggttagataatagtactattgcaatatcaatttcctgattttgataagtgtactgatgacataagagaatctctctgttgttaggaaatacacattttaagaacgtatagataggctgggcatggtggctcacgccggtaatcccaacactttggaaggccgagacgagaggatcgtcttcactcagaagttagaggctgcagggaaccatgatcgcgccactgcactccagcctgagcgactgagggagaccctgtctctataaaagaatgtaacgccaggcacggcggctcacgcctgtaatcccagcactttaggaagctgagggaggcagatcacgaggtcaggagttcgagaccagcctggccaacatagtgaaaccctgtctctactaaaaatgcaaaaaaattagccggccatggtggcgcgcgcctgtagtcccggctacttgggaggctgaggctggagaatcacttgaacccgggaggcggaggttgcggtgagccaagcccccgccactgcactccaacctgggcaacagaccgagactccgtctttaaaaaaaaaaaaatgtagcgatagaaggacatcatgtcggcaatttcctttcaaatgatatagcacatgcaaaacgttaacatttgtggaatctagaagggtttgtgggaattatttgtactagtttagcaatatttctgtaactgtgaattacttgaaaatgaaaggttaacaaagttactgagattaggagagaacgtgaggagcgaacagacctagccatgaataaccaacaaataaaactcgaggaaataaaaaggaactcaaatggcatgcgaccaacggaagacatagcttctgtactcttaaccctaaattactaagcgatgaccctcctgcagctttctaatccaaatcaccaaaaacaatctcgccgcccaactttgccaaaaagcaacttaacgccagccgactccgccatgttttcccagtgagcttgcgagcgcgtgcgtacgcacgcacgcacgcacgcaccaaccaatcggtgctcacgtcggtgactcgttaccgcaggggcggtgcgttcttctacacatgcgcagggttgggcgggtcttcttccttctcgcctaacgccgccaacatggtgagtcttactgttgcgggctccggggccgtcgaccatgccgctcgacctccacctccgctgggaagctgaggcgccaaacggctcccagagggtcccgggaagcgcatggtgagggtccccgggccggctgtgcagcggaatcgggcccttcccggac

SEQ ID NO: 29318 - DNA, 2300 bp, Homo sapien
aggcagagaactgcttgaacctgggaggcagaggtggcagtgagccgagatcgcaccactgcactccagcctgggtgacagagggagagtccatctcaaaaaaagaaagaaaaaaaaaagtgtttgtgtgtgcgtatatatatagagagagagagagtgaagagagagagaatgtattctgatgtgatgcaccaaggacatagcatttctaccaaaaattcactatctgaatccaatgaggaaaactccaacaaacccatgttacaaatttaacagttaaatctaaaactatcagttaaagactagagacctgataaataattgcaatttgtaatcctccattagatcaagagcctggaaaaacaattttttttcccatttgctccaaggaacataggagcaacaacttataaatttgaataaggactgaaggttagataatagtactattgcaatatcaatttcctgattttgataagtgtactgatgacataagagaatctctctgttgttaggaaatacacattttaagaacgtatagataggctgggcatggtggctcacgccggtaatcccaacactttggaaggccgagacgagaggatcgtcttcactcagaagttagaggctgcagggaaccatgatcgcgccactgcactccagcctgagcgactgagggagaccctgtctctataaaagaatgtaacgccaggcacggcggctcacgcctgtaatcccagcactttaggaagctgagggaggcagatcacgaggtcaggagttcgagaccagcctggccaacatagtgaaaccctgtctctactaaaaatgcaaaaaaattagccggccatggtggcgcgcgcctgtagtcccggctacttgggaggctgaggctggagaatcacttgaacccgggaggcggaggttgcggtgagccaagcccccgccactgcactccaacctgggcaacagaccgagactccgtctttaaaaaaaaaaaaatgtagcgatagaaggacatcatgtcggcaatttcctttcaaatgatatagcacatgcaaaacgttaacatttgtggaatctagaagggtttgtgggaattatttgtactagtttagcaatatttctgtaactgtgaattacttgaaaatgaaaggttaacaaagttactgagattaggagagaacgtgaggagcgaacagacctagccatgaataaccaacaaataaaactcgaggaaataaaaaggaactcaaatggcatgcgaccaacggaagacatagcttctgtactcttaaccctaaattactaagcgatgaccctcctgcagctttctaatccaaatcaccaaaaacaatctcgccgcccaactttgccaaaaagcaacttaacgccagccgactccgccatgttttcccagtgagcttgcgagcgcgtgcgtacgcacgcacgcacgcacgcaccaaccaatcggtgctcacgtcggtgactcgttaccgcaggggcggtgcgttcttctacacatgcgcagggttgggcgggtcttcttccttctcgcctaacgccgccaacatggtgagtcttactgttgcgggctccggggccgtcgaccatgccgctcgacctccacctccgctgggaagctgaggcgccaaacggctcccagagggtcccgggaagcgcatggtgagggtccccgggccggctgtgcagcggaatcgggcccttcccggactcgcgcccttcccggactcgccgctggcgagcgcgtggagggcccggcaggcctggcgcgccttgggccacgcgtgcgcgcctccgccgctggagctggatggctgatgcggctcgtggtccgagagccttgtcctgccgtgtgggccttgcggacctgggagctggcgggcgttgggaaccgggcttaagctactgaggcgtttgctgatttcgtccatccaggttggcgcctggctctcgggcgtttgttccctgcagcattctttttcgctgaatttaaccatgttgtctttagctgcagaaggtgacatatgtagcgagtatttctaagtaagtttcactgtcctttctcctccaattttaggtgttcaggcgcttcgtggaggttggccgggtggcctatgtctcctttggacctcatgccggaaaattggtcgcgattgtagatgttattgatcagaacagggtaagtgtcacaactttttactaaacatggcagtggacatgtgccctgcagatggcaataatgaattgtctcgatggctgtgtaagatgaggatgct

SEQ ID NO: 29319 - DNA, 2300 bp, Homo sapien
tcagcactctgggaggccaaggcaggtagataacttgaggtcaggaatttgagaccagcctagccaaccccgtctccactaaaagtccaaaaattagcccagtgtggtagtgtactcctgtagccccagctatttgggtggatggaacagaagaattgctagaacctaggaagcagaggtcacagtgagccaacgttgcgccagtgcattctccatcctgggttacagagcaagaccctgtctcaaaaaaagaaaaaaaaaaagaatggttttcaacacgtccactgcccgagtggaattatatatagtcagaggtgggttttttgtgttttttttgagggttttttttttcttttgacacggagtctcactttgtcacccaggctagagtgcagtgacgcaatcttgactcactgcaacctcaggctcccaagtagctgggattataggcacctgcaaccacgcccagctaatttttgtgtttttagtagagatggggtttcactatgttggccaacctggtcttgaactcctgacctcaggtgatccacccatcttgacctcccaaagtgctgggattacaggtgtgagccactgcgcctggtcaagaggtagtttttaaattcataaaatgggctgggctgggtgcagtggctcatacctgtaatcccagcacttcaggaggccaaggtggagggttgcttgagcccaggagttggagaccagcctgggcaacgtagcaagaccctgtctctacaaaaaatataaaaattagctgggtgtgctggtatgcacctgtagtcccagctacttgggaggctgaggcaggaggatggcttgagcctagaaggttgaggctacagtgagccatgatcatactattgcattccagcctgggtggcaagcaagatcctctctcaaaaaaaaaaagggactggattacagttttgattaaaatatgcttgaagttaataacctattctggcttactgaacacaaaaataagtaaaatacatagtgtaccaggtgttgtgtaacaggaagagtgcttttcaaggaacaaagaaagtgtctttgataatgagtgacttcaaagctgatttcttaatctgtggtcttggctcgttctagtgcccaccagaagtatgtccgacaagcctggcagaaggcagacatcaatacaaaatgggcagccacacgatgggccaagaagattgaagccagagaaagggtaataacttagggtcatttgaattctggtcctttctttttttggagggttcaagatagtgtgagagggataatttttatttgttgttttttttttaacagaaagccaagatgacagattttgatcgttttaaagttatgaaggcaaagaaaatggtaagatttaagatctgtatttttgtgtaacttagctttaaataataagggagcagtagccaaatcccatttcaggctgccagcttcttggaagctttctgtaaaaaaggagaatttatcttcatttgtatttcatgatgtccctatggaattgttacctttcttcagatgtagttgtagggaaacagactacttaatgccctttctaaaaccagcataaattggattttattgtatgtatacacaataagtgctttcttacattgataattttcagaggaacagaataatcaagaatgaagttaagaagcttcaaaaggcagctctcctgaaagcttctcccaaaaaagcacctggtactaagggtactgctgctgctgctgctgctgctgctgctgctaaagttccagcaaaaaagatcaccgccgcgagtaaaaaggctccagcccagaaggttcctgcccagaaagccacaggccagaaagcagcgcctgctccaaaagctcagaagggtcaaaaagctccagcccagaaagcacctgctccaaaggcatctggcaagaaagcataagtggcaatcataaaaagtaataaaggttctttttgacctgttgacaaatgtatttaagcctttggatttaaagcctgttgaggctggagttaggaggcagattgatagtaggattataataaacattaaataatcagttcctttttttttttttttttttttgagatggagtctcgttctgttgctcaggccggactgcagtggcgctatctcggctcactgtaagttccacctcccgggttcatgccattctcctgcctcagcctcctgagcagctgggactacaggtgcccgccaccgcgcctggctaattttttgtatttttagtagagacggggtttca

SEQ ID NO: 29320 - DNA, 2300 bp, Homo sapien
tgctcaaggtggtcgggctacagcttggttttacatgttttaggaagatataagatatcaatcaataaatgtaggatgtacattagctccatccggaaaggagggacaactcgaagtggggagtgtgggggcaccttccagggcgtaggtggattcaaagatttcctttcctttcctttcctttttcctttcctttcctttcctttcctttcctttcctttcttttcttttgaagatttctaactggcaattagttgaaagagttatggactgggcacggtggctcacgcctgtaatcccagcactttgggaggccgaggcgggcggatcacgaggtcaggagatcgagaccatcctggctaacacggtgaaaccccgtctctactaaaaatacaaaaaattagctgggcatggtggcgggcgcctgtagttccagctactcaggaggctgaggcaggagaatggcatgagcccgggaggcagagcttgcagtgagccgagatcgcgccactgcactgcagcctgggcgacagagcaagactctgtctcaaaaaaaaaaaaaaaaaaaaaaagttattagctaaagacctggaatcaattgaagggaatgtctgagttaagataaggggttttggagaccaatgttcttattatgcagatgaaacctccaggtagcaggcttcagagagaaacgattgtaaatgtttcttaccagacttcaaaaggtgccaaactcttagttaattctctactggatcaaggaaaacactttgaaagtgaaggggattctttacaggatgtagattttcttcacaaaagacagctttacagggtcatttcaaaatatgtcaaagaaatacattttagggtaaaatacttcagtttatttcagggcctgttatctgtcacatgagactatactagagtcaggttagaatttgatgtcttattgctataaagagtttgttttgggctgggcgtggtggctcacgcctgtaatcccagcactttgggaggccgaggcgggcgatcacgaggtctagttcaagaccagcctggtcaacatggtgaaatcccgtctctactaagaatacaaaaattagccgggcgtgttggcacgttcctgtaatcccagctactcaggaggctgaggcaggagaattgcttgaacccgggaggcggaggttgcagtgagccgagatcgggaaactgtactccagcctgggctacagagtaagactccatctcggaaaaaaaaaaaaaaagttttagtcagtctcaagatctctgttttaatgttaatgctggtccgtagtgcctgaattccaagggcataacgaggcaagtccgatcccctgcttcccatcatggcctgaactagattgccaggttttctttggaatgttttggctgagagaagtggtccattcagttggttgggggacttagaattttatttttggtttacaaaactgttgcatgaattgactcagttaattcactgaatttataaattacaaacttttaccattctcaactgataaattgaggcaacgatttaagtataacttgagcaagtccatatagagtggagccaggaacgcagacaatgagacaccataccccatggtcttaggtcacagtcattcagtgggagacaggggctataaattcattagaaggttaagttaggaattaagtaattaggtaaggaattaggaattcagttaattaagttacaaattgttaaatatggaggaatttatcatgtagttggggtactaagacataagagaaaataataaagaaaaacaggagcggccgggcgcggtggctcacgcctgtattcccagcactttgggaggccgaggcgggcggacagcttgagctcaggagttcgagaacagcctgcgcaacatagcgagacccccgtttcaaaaaacacacgaaaaaattaaaattaaaaaacaaacaaaccaggcgcagagcggttgtggagaagggaagcgaagggttggagtttcgtttcgtgggaaccatagagaagggccagcctcccggcttcctagagaggctgtagggaccgacggccggccagctaatgcttccgtcttggccaccttgcgagcgctcgggttgagtttcccgggcttccctgactcggctacctgttctggaggtcaggctttgggcccttgcagaggtcgccgaggggcccgcgccgccgccagagcctgggcccagtccccagtcttcagagacgccctcgaccttcctgctccgaggagctggcctgatgt

SEQ ID NO: 29321 - DNA, 2300 bp, Homo sapien
taaggtaggtgtatatttaatttttaaagaatctgcaaagtttttccaaagagactgtgccattgtacatttccatcagtattgtatgggttccacttctgatacatctttgcctacacttgatgttgtctctacttttagcttttctagtaagtgtgtaatactgtttcactgcggttttaatttgcatttctctaatgactaacaatgttgagcatcttttcaaatatttaattgctttccatatatcttctttggtgaagtatctgttcaaatcttttgcctatttttaaaaattggtttattttcttatgagtgagttttgagagtcctttatatattttggaaacaagtcttttatcaaatatttttggtattttctcccagtctgtggcttgtcttttcattctctaaaagtatcttctgaaaagcagaagatttaactttgattaagtccaatttatcatgtttttttccactggctaatactgtttagaatttgtggtgtatatgtatgtacgtttatgtgcacccactcatggtaaatgttcattttaataggtttagcgaagggacagtatgcacatgtatgtccttgtcatgccattgtttctggaaatctaattatttaaaacaagtgctgtgcataaactttaaagtgaaaatactatagattttataaaatgaactgtttctgtgacagttaaaatctctgtgctaggtggccccacaatggctcccaatggttctcatatcctggcattcaaaccttgtgtatctcttcccacactgaatcatgactaatctgaggagaatgtattgaggaaatcatgatgcatgatttccaaaactaggtcataaaagctttggccttggcctcttggattgctcactttgggagaaagctacatgccatgttgtgaaaaccctcacatgggaaggaactgacgcttcctgccaacaaccagcacccacttgacagccatgtgagtaaaccaccttggaggtggatcctccaaactcagtcaagcttcagatgacttcagccccacatgacacctgactgcaacctcagcagagaccctcagccagtaccacccagccaagctgctcttgaattctgggtccacagaaactgtcaaaagataacaatgtttattgtttttagccacaaagcattagagtagtttattatccagcagtagatacataatatactctccatggcaggacttgttttgaaagtggtggataaatctaattcctgtggaaggaataactaaaatctgtttccaggctgggccgggacacacatcccagtacagggcaggaaagggctctaagccaaatgttaatagctctttcgctaaacttcgaaaattgtccttaaaaaaatctatttccctaaagcacgccacatattggagtcccagcagcacctattttgtgtcttcaaaaaacacaattggaaaacaaaacaatacaaactcacgagtacatactatgtgccaggcacaactgtaaataatttacctatcaattaactaatttaatgaattaaccctgaacagcctcaagaggttggtaccaccatcataatacccatttaatagacaaggaaaccggggcaaagaaacttgctgcaggtcacacaactagcaagtggtgcagctgggtttctggacctacgtagtccatacacattcggccttctgagtaatgggttcgcctttccccacacccacttttcccactgcagcgcacccacacaatccagacagttttggcgcatgtgaagggcgcgatggtcccttcattatctggaaggacacccagagtggcaaatgccagataaccacgaataatacccaggatagtaaccattctgtggcctgagctggccagacgtcatgccccgaaggagctaccaggtgtgggcgctgcaggacccctgcctggggccgcccgctcgggcccgtgttgtctcaggcagtagggacactggcgctgacggcgggggtaggaaaccacagagactggcaacttcccaggttcctagagaggaggggcatggaaaacgcacttccggcggagggtctcaagctttccccggtgtcggcggcaggtggaatttccacgctttatctgcgcctgcgccgcgcgggattcgcggtccgagctgaagaggttcgcggtccgggtaactgattggttttcctggggcttgttctgcctggttttgcaacccctttgctttttggggtgaggagttggcggaaaggagaggggcccaagtagca

SEQ ID NO: 29322 - DNA, 2300 bp, Homo sapien
atttttagtagagacagggtttcgccatgttggccagggtggcctcaaactcctgacctcaggtgatctgcctgccttggcctcccaaattgctgggattacaggtctgagccactgcacccggcgcaggaagggaagtttcacactaatagctggcatctatgtgccaaccatgtgagtgagttacctttgaggcaaatccccagcctcagtccaactttcaagtgactgcagtcccaggtgacacctgactagaccctcatgagagatcccaagccagtaccatccagccaagccactcccgaattcctcatccacagaaccttttttttttttcctttttctctttttaggactgactgactatgttcactgattcatagaaactttaagagataataagtgtgttttgttttcagccataaggttttagggtgatttgttatgcagcagtagatacctaagatactctccataataggacttcataagtcagtctaattcttaagaaaggaataacaaatccaagaagtgggacccctgtaataaagcaatatatctagatatccaggatcattttttatcttttagtggtgggagaccaattcccctttatagcatggaaatgcttggtggtgaggagcctggtatctggaactgtgttcaggagaagttatcagcgtgattaaagtaaaacaaagtctgggccgggcgcggtggctcacgcctgtaatccccagcactttgggaggccgaggtgcacggatcacaaggtcaggagatcgacaccatcctggctaacacggtgaaaacccgtctctactaaaaatacaaaaaattagctgggcgtggtggcggggtgcctgtagtcccagctactcgggaggctgaggaaggagaatggcgtgaacccagaaggcagagcttgcagtgagccgagattgcgccattgcactccagcctgggcgacagagcgagactccgtctcaaaaaaacaaacaaacaaaaaacaagcaaaaaaaaaaaaaacaaagtctgtccatcttagcaaccactttgatactggagaaaggctcctgtccagaaggaagggcacagtagtgaggtacttgccaatgagctgggtagagctgccactggctggcttcgggaagtgtttatcactgactggctcatgttcagaagcttggagtgaggctgttgtgtactggttgattttcagagtacgtgtactgatctaaaattatgtaaattaatggcaagtacttgttagtgacttgggactttggtcaaaaaacagtcttttcctttcctgaatatgaaaagtaagttcttttaattagcagcctcccctcttcactgttttttcttcctgcagtccaactaacagaacagaccataaaggtctgtccagatcattatttatggaagtatgagatatatatatttcagctggtgttaacattttatttaagtgccagttactgagcagaaaaatagctgtaactacgagtttttgtaatttattggaaaaagctaaatataagacatttagggtgtcctcccaaagtcaacacaggacaagatcatttaatataggacatgtcctgtgtatacaggatgcctagcaactgtatgtagccacgggtgttttggttgttaaatgaatctgtcctaaaaggttctacgcacatctaggtccttggaagggagagggctaaaacggcgagtggaaaccatggtttccctgaggactgcccagctgaggacccaagcaagatcctgggcttgggcctcttagagatgacaaagcaggcgccattctcccctcacctgcacggcccaggcttcaggtgagccacggggccaaggcggccaacagctgaggcgcagcccgtgaactgggggcccacttgtgcctagagggcgaggtctcggtagagccaggctgtatcagtccgtgacactccagccagaggcgatgccgacggctgccggagaaagccgggcttagagcgccacagttccacgcccgccgccggcctctcagcccagccggtcgccgcaacctcgcctcttccgcagggcggggccagccatgaaaggcggggcgggtctggccacggggcgaccgagatggcggcctccgggggcctagagggaccctgggcgtgcactcgcccttccggctcggcctttagttagtgaccagctcctcggcgttctgcagagcgtgggtttcagcgagttctacgtgccaggtccgcccggtgccggcttcctcgctgcccctggcggct

SEQ ID NO: 29323 - DNA, 2300 bp, Homo sapien
acccaaagccaaccagcacattctgtaatcagcccatccccaatccttacctaccaggtgcccaagagcatgattttcttacccaaagaaccggcatcgtcctgtagtaatatccactcactgtaagcaactgccattacattagccatccctaaaagtataccttctacctacctattacacaccaaggctaacaaccctttcataatgcaaagtaacttctgatgccccaaaagtcaaaaaggccaggtaacgcaatgaaaaacagagcagggccttagattttgagagggatctgtctgcttacactttttgggattccatgaggaagacaggttttttccaaaatggggtctgtagcatctcctctgtttctccccaaaagtcccaggctctctggaattaccttaggtcttctcatgcgggcattgagggtggcaacaagacagacaaaagtaaatggagacacaattcagttgactgagaggaaaaaaactttttttttctctaaaaacaagacccaagaagagaaaaaagcataaaggccttttgaatatatgcatagtttggatatccacttttaattaagttgacttttaaccatagagctcttttaaaaaaatcgttttaaatatcttattaccagactctagccaggacaaacagccaacacctctggcttttaagctttatttttgttccccaaaggtattttcccaagtgaacccaaaatccttaactaaggttatgatttatctgtggacacatgaagtgtttccaaagagatgacaagcggtttttacaagatctagaatcaccactaaggtatcttggagaaaggaaaactcaagatagaaaatcagaagctgtccatggagggaaaaagaatcagtaaacagtaaaagtcccacaattttttttttttttttgagacggagtctcgctctgttgcccaggctggagtgcagtggtgcaatctcggctcactgcaacctccacctccctggttcaagcaattcccctgcctcagagcctcctgagtagctggaactacaggcgcacgtcactacaactggctatttttttttgtatttttagtagagacagggtttcaccatgttggccagactggtctccaattcctgacctcaggcaatccgcccaccttggcctcccaaagtactaggattacaggcatgagccaccgcgccgggccattcccacaagtattaaaccagaaagaactcattccttaagccaggaattgaatccaggccaccattttgaaagggaaatggcttagctactgaactacagcatgaggcgactatcatcttctttcccagaaggagtctagagcagtcattttcaagcttcagaggattttaactgctcaagagaattttctgagactagccatggctttatcatgtgtccttcttttaattcaaacctttaaaaaaatgttgcaagtaaaagttctgtaaaatccgttttaaaaaatggcatacttaattccaatagcgtctcagtccaaaagccagttaaaccagatggtaactttcccagattttaccacataagcaagaagtgtttctacagatgggggagaggagacatgtctatggtccccaagaattcactctcagaaatggacttaagatagtaaaagatgactgtcagacttctgagcccaagctaagccatcatatcccctgtgacctgcacgtacacatccagatcgctggttcctgccttaactgatgacattccaccacaaaagaagtgaaaatggcctgttcctgccttaactgatgacattgtcatgtgaaattccttctcctggctcatcccagctcaaaagctcctccactgagtaccttgtgaccccccactcctgcctgccagagaacaacacccctttttcctttacctacccaaatcctataaaacggccccacccctatctcccttcactgactcttttcggactcagcctgcctgcacccaggtgaaataaacagccacgttgctcacacaaagcctgtttggtggtctcttcacatggatgcgcatgaaatttggtgccgtgactcagatcgggggacctcccttgggagatcaatcccctgtcctcctgctttttgctccatgagaaatgtccacctacgacctcaggtcctcagaccgaccagcccaaggaacatctcaccaatttcaaatccggtaagaggcctctttttactctcttctccaacctccctcactatccctcaacctctttctcctttcagtcttgg

SEQ ID NO: 29324 - DNA, 2300 bp, Homo sapien
ttgcaaattttacattttctttaataaaatgtatttgtttacggtgtcagtagggattaaaaatcataattctaaatttaaagtatttaaattatagaaaaatgattccattattttggtaatggaacagagaaatacaaatatagaaacgtttttatcctttagatcttctaatggtgcagatatttcttaaccaatttcaagagtgccttattcaaaaacaaaaaacctgcacatagaaaaagcaaacatgtttttttaaaaaaagccctgtaaaagtggttaatctgtcgtctgattttcaatgtatgactttaatcaattgcatattccttaattctgcaaatgacaattaaaattaggaatcagtacctgaaaacgccatttatacttttgagtttatattagaaacacggttttgatgaaatacctttttcggttcaatctttttgaattgtgaccacaaccaatagctacacttagattctacagaattagtaggaaagatacaaatgagaaggtctttctagacaatggatctcactgaacatcatcttagtgtgtagactttttccactgcagtggcccacatgtgctatggtgacagacggcagttggcattaccacttatatagtaaaatatctttaagacaaaaataaaagttatttaaagaatacgctggccctgaaacatgagctgtgccttaaactacatatcctacctccatgagtgaatgaataagtgggttttccgcctgcatctatgtgttaagacctattgtttgcttgtattaattgtagtcctgggataaaagcacagaggtaactttcactgctgctttttgtactctctccaatgttttggaggaaaaataagcacaaacaatagcctagagaaactgaatcgatcatacttgttgcagcttcgacaaacgtcaattttgctgcattagaatgggaaacatttttcagtctattgaaatgaattacaaacgtttttaaatagaaaattagttaaaaaattggaggctgcttaatcgatagctttctctataaacatacttggatttcacaaataagtaataccgtaaaaatcttcttctccaaagaaaaatccccacaaataaatctattgatacctagtgacaagtggaaccagataaaaatggaatctataagaattaacctaattgacagcgctctggagctaatccatttccattagttatttgttcacagtaggtactcctaaggacttgttgaattgcgggcttggcgcccgttctacggagagttcacagccttcgtgagtggggacagaaggcggctcggcccggtgattcaggtcgaaattcaagctgaacagcctgctgagaggtgggatccaccatccggacagtggggggctttgggggtgctgtgagactgggctgcgacccaggtccagcagggagtgtgcggcacagaccacaaggtcggcgaggccccctaacccgcgcccggccgggaacccgcagaccagcgacggggcagctgcggggccaggagcgccccaagacgggcgggcgctgaacccgagcccctgccgccgccctggccccgaacttccgccctcccaggacctgtcccggccgccccgagcggtactcgaaggccggggccgagatgccaccttccgcaggccgcgggaaaggcgcgccgagtcctgcagctgctctcccggttcgggaaacgcgcggggcgggggcgtcgggcttgggacaggggaggataccagggccaccttccccaacccaggccgcgggggcccggcctccccgatgcagaccacagcgccctcacgggctgccctcaggccgcgcagcgggcagccgccagccgtcaccccggggagcgtccgtggggtgcccaggcaccccaccccggcccggggcgctcagacggcagcagactgctgggcggcgcggggactactttccaccgccccctcgcgccccgccccttgtcctcgcgcggcggaacgctccgcgctgcgccggtggcggcaggatacagcggcttctgcgcgacttataagagctccttgtgcggcgccattttaagcctctcggtctgtggcagcagcgttggcccggccccgggagcggagagcgaggggaggcggagacggaggaaggtctgaggagcagcttcagtccccgccgagccgccaccgcaggtcgaggacggtcggactcccgcggcgggaggagcctgttcccctgaggtgcttgggcgctcctttccttatccttccgggg

SEQ ID NO: 29325 - DNA, 2300 bp, Homo sapien
tttagtctgctttgaagtaaatgctcaaggggagtagtttcagaatgtctacccaataccagtacttgaaaactaacgatgtttctgaattcctgtattacaggtggtggttaataaggctgcagttatggtccatcagctttctaaaaaggaagcttccagacacgctatcatgcgttctcctcagatggtgtctgctattgtacgtaccatgcagaatacaaatgatgtagaaacagctcgttgtaccgctgggaccttgcataacctttcccatcatcgtgagggcttactggccatctttaagtctggaggcattcctgccctggtgaaaatgcttgggtaagaaaacatgtcagaatgcttgaagctaaaaagtagaagagtatactcacaatatttctgatgaggcttttttcttcttcccagttcaccagtggattctgtgttgttttatgccattacaactctccacaaccttttattacatcaagaaggagctaaaatggcagtgcgtttagctggtgggctgcagaaaatggttgccttgctcaacaaaacaaatgttaaattcttggctattacgacagactgccttcaaattttagcttatggcaaccaagaaagcaaggtaagagaattattctttatgtggttttcatggagcattggacacctccagtgtcatgtcattccatgcagtgttcctaacctttttggcaccagggaccagtttcgtggaaaacagtttttccatgaatgggttgtgggaatggtttctggatgacaccattccacctcagataatcaggcattagattctcatagggagcgtgcagcctagatccctcgcatgtgcagtccacactagggtttctactcctatgagactctcatggtgcagttgatctgacaggaggtagagctcaagccaggtaatgctcgctcacctgccacttacctcctgctgtgcagcccagttcatttctgttcttttaaatttttgagtttccatatgtaaagcactatgcgaagtagtagggatatggtaggcaagcttctcttcacacttttgttcttaggtgggatgtagatgttgggaataataacctaatatttaatttgtgtagtgggaagaagtggggctatgagggcacataacacaagttgaaactgactctttttgagggttcaaggagacctcttggaggaagtgatagttgagttcagtgttcaaggatgagaagggattcactaggtgaaggttaggtgagaaaacaacatctttgaaacgaaggaaggagatggaaagttttgggaatttaagaaatactaatagtaaggaggaagaaaggtttgaggtgaggctattgagatagacttagcagatctcatagggctttgtagagcatgtttaaaagcacaatgggaaatttcagcagaagcctgaaatgatgaaatttgtttttagaaaattggggcagtgttgaaagggaagatatacagggaatgaaaggacaagcatgaatgatcattttatggtatctgtttttaaggtggatataattaggaaaattaaagggccaaatgatgaggagttaagtgccagttctggttcaaattttcagtgaatcagttttgatataactttcatcttagggcattactcttgcctaccaacatagtttctaaatttttttcttttggtgtgatcactgtgggaagaaggaaattgggcccaaactgatacattgtttggaggactgggatgtctgaatttgagtggaatgctttaaaaggacaagttggatagggccccagtatgggggtctgagtgatggggtccaggaatacatttaggtccaatggcaagctggctgaaattcttgtataataaaataggttggtaatatggctcttctcagacatgtgatcaagattccttgactaacaagatatatatatatatctttctagctcatcatactggctagtggtggaccccaagctttagtaaatataatgaggacctatacttacgaaaaactactgtggaccacaagcagagtgctgaaggtgctatctgtctgctctagtaataagccggctattgtagaagctggtaagtatatgtatctattctgagtcttgtgtatagcatctgcagttctaattagattacttttcttaggaaaaggtggtagaactttaactactgaaaataaatggtcctattcagtttgcagccaagatttacattcagagtacctgtcatctggattgtagctaaatatttaagg

SEQ ID NO: 29326 - DNA, 2300 bp, Homo sapien
taaagttaataacttccacacatgatcacataacaaccagaaatctgagaacattccaatgttccaagacatctcctttcaaagtatatacctgtttttgtggcagatttacaaatagcctaaaccactcccaccctaccaaccaagtctttctgaagttctgtaggcagagtaaaagtattttacccaaactggctttttaaaacttcttacctaaaggatgatttacaggtcagtatcaaaccaggccagctgattgctgtcacctggaggcagcccatccatgaggtcctgggcatgccccagatctggcagcccatcaactggatagtcagcaccagggtggtggccacccatctcatgttccatcatggggtccatacccaaggcatcctggccatatccaccagagtgaaaagaacgatagctaggatctagaagagtcagggtgtcaacaaaataggcaagaaggaaggcaaaagagagaggagagaagcagacatagacgttaacactgaggttagggcatccaaagttcagcagcaaacttgtcagaaaacaacgctttctagcctcttcaacctccagctttctttagccaagtaattactcagtgccaggccacccatgagactacacaaataacatctatttccatcagacaggcacaccagcagggcctagtcacatcattagtctaaccctgaacactctgcatttacccctgtcaagagacttggggttcccgaggagaagaagcaggaatctactgtgtgaccacctaggcagtgagaagtcatgggaaggaggattaagacaataatgaggtctggcaggtgtaatctatcttgacaaaaaggccaagtgacacccacaaaagtactaaggaaaggcactatttccatgaaacctcaacatattttatcttagggttgacatgttatttctcacagtaagaatctgcgctttagtggtttcataattaggtagaagcagatgcggttataaatgtaagacagttataattgttagtggtctatgccatcctccatgttcattacccagatttaaattagcttttcaagaaaaccctgatgataatgcaactatgtaaaaacccacccgagatctgagcctagaaacaggagttttcctatcttccttgggtagcttgtagacaaaggtattatgagtcctctggccaaaaagagaataaaaagccaggtaaattgtaacatcctgcactgcagaggcctagcagtagcatgtatttgttggtggtgtaatcctactgctactcattgtgtggctctgaattccctgtgctccattaaagatactgttgctgactggaatttaagaactgcttttaattgaagccactacttttctgccaacactggtttcccagatgagcaaaccggctcttctgataaaagttttagaactttagcttgatctggagttaatcgagaaatatgagacacataccatcctggcgatatccaaggggttctccctgggcaccaatatcaagtccaagatcagcagtctagataaacatgcacaaagcaaggaagaatagaaagcaaaatgaaaattctcaaaagtacactaattttttttaaagcatactttcagattacaaaaggaacaagtaactccaacattacacaaatgcttagaaaatggaagttcttcaaaactccacacctcaaagatacatttttttttctctttgcacctcacattaaaaatactcactgacttgttctttcaacaaatattatattaagcacctattatgtgctgccaggcactgttctacatgctagagatatagcagtttaaaaaaaaaaaaaaaaaaaaaggcaaaatgcctacccacaaacaggagctgctgataggatgtgttatatgaaagaaaagttttagcctgagcagctggacagacaaagctgacattaactaagacagagaagacagtgaaaacaggtttgtggaagggggtaggtggagaaagttaagggctcaagttggaacatgttaataagatgcctattaaaaacccaagtaacacactactcactggtaatttgctttttttttttttttttttttgtgttggagtctggctctgtcactgagtgcagtctgttaactcctgggttcaagcaatcctcctgcccccgtctccccagtagctaggactataggcatccatctccatgcccagctaaagatggggtttcactatgttgcccaggctgatcttaaactccggtctcaagagctgcatc

SEQ ID NO: 29327 - DNA, 2300 bp, Homo sapien
ttgacaatgtggtattaaagtctcccattattattgtgtaggagtctaagtctctttgtaggtctctaaggacttgctttatgaatctgggtgctcctgtattgggtgcatatatatttaggatagttagctcttcttgttgaattggtccttttaccattatgtaatggccttctttgtttcttttgatcttttttggtttaaagtctgttttatcagagactaggattgcaacccctgttttttagttttgttttgttttgtttgctttccatttgcttggtagatcttcctgcatccctttattttgagtctatgtgtgtctctgcacatgagatgggtttcctgaatacagcacactgatgggtcttgactctatccaatttgccagtctgtgtcttttaattggggcatttagtcatttacatttaaggttaatattattatgtgtggcctcatggtgacaaaatctctcagcatttgtttgtttgtaaaggattttatttctccttcacttatgaagcttagtttggctggatatgaatttctggattgaaaattcttttctttaagaatgttgaatattggcccccattctcttctggcttgtagggtttctgccaagaaatctgctactagtctgatgggcttcctttgggggtaacccgacctttctctctagctgtccttaacattttttccttcatttcaaccttggtgcatctgacaattatgtgtcttggggttgctcttctcaaggagtatctttgtggggttctctgtatttcctgaatttgaatgttggcctgccttgctaggttggggaagttctactggataatatcctgaagagttttctaacttggtcccattctccccgtcattttcaggtacatcaatcaaacgtagatttggtcttttcacatagtctcatatttcttggaggctttgtcgttttgttttttttttttttttttttactctttttttctctaatcttttctttatactttatttcattaatttgctcttcagtcattgatatcctttcttccacttgatcgaattggctatttaaactcgtgcatgcgtcacgaagttcttgtgctgtggttttcagctccatcaggtcatttatgttctctacactgtttattctagttagccattcatgtaaccttttttcaaggtttttagcttccttgcaatgggttagaacatgctcctttaggtcggagaagtttgttattaccgaccttctgaagccaacttctgtcaacttgtcaaactcattctccatccagtttttttccgctgccggcatggggctgcgatcctttggaggagaagaggtgctctggtttttggaattttcagtttttctgctctggtttctccccatctttgtggttttatctacctttggtctttgatgttggtgacctatgggtgggattttggtgaggatgtcctttttgttgatgttgatgctatttttttctgtttgttagttttccttctaacaggcccctcaggtgcaggtctgttggggtttgctggaggtccactccagaccctttttgcctgggtatcaccagcagaggctgcagcagcaaatattgctacctgatccttcctctggaagctttgtcccagaggggcacctgcctgtacgaggtatctgttggcccctactgggaggtgtctcccagccaggctacacaggggtcagcgacccacttgaggaggcagtctgtgtgttctcagagctcgaatgccatgctgggtgaaccactgctctcttcagagctgtcagccagggacgtttaagtctacagaagttgtctgctgccttttgttcagctatgccctgcccacaggggtggaatctatagaggcagtaggtcttgctgagctgtagtgggctctgcccagttcgcacttcctggcccctgtgtttacctactcaagcctcagcaatgacggacacccctcccccaaccgggctgcagccttacaggttgatcccagactgctgcgctagcagtgagctaggctctgtgggcgtgggacctaccgagccaggcacgggagggaatctcctggtctgctggctgctaagactgtgggaaaagtgcagtgtttgggcaggagtgtcccgtttttttcaggtacagactatgatggcttcccttgggtaggaaagggaaatcccccgaccccttgtgcctcccaggtgaggcgacaccccgccctgcttcggcgcactctccatgggctgcacccatgtgcatcccatg

SEQ ID NO: 29328 - DNA, 2300 bp, Homo sapien
aaaaggaagaagaaagaaaaagaaagacccaacaaatagaagacccaggagggaaggaaaagcattgtctggggtgggttgtgaggggtcacagggaggctggaggaaaaactcaccagttgtagcagtgctgaatcaaaacttcaggtggccttccatcagtcacggaggggtcacgtccagctgtcctgctggctcacatgcctccctccacagaggagaaaaaagcaccccatgtctggtgatcgcagacaagccctgaatgaatatgttactgaccatgagttcttgggctctcaatgcaataggacatgaggccgacagagttctcccagacgaggcttcattggagcctcctgaggtggtacactccacaactttggtttgatagtttgggtctcgtaaggccagttcctggaattctttaagtaaaagccacggttaaacattttgagagctcagtggaacaatatagcatgactaaagccttggggttagcgggtatggcatcagtgaggtactggtgtgggttttgtgatcactgggaatgtatgaaagaatgctgtagcagggatgagctggagccaagcctcattcctactctgtctcataaatactgttgatttttctgtattcatcttctgacaagcttgcttttttggccatgtttattcgtttttaaatttctagagatgggcacttagatcgtttgtttcagtcttactcctctcctgatatacactattcaacctttaagatagctgttgatcatgttggtagtattgatagcagtatatatttctttcctttgcatagttttttctttagacataactggaagtttggagttctcaaagtaccttggtgaagcatgatatctgtgctttcagtgatgtgacatcacttagtggaagagggtgaagaaaacacccctggttcttagggtccttgtaaaaatattgagatatactgtcacatataaatttcctatgtcaagtggagatagaatatgttaatactgatgggccaccagccacatatggagattcttgcctgtgcagggcgttgttttgttggtatggacggcaagatgtcgtttggctgtgcacagattctcctgctcttttatcagtatagagagaacaagtacacaaacaatgggaattttgtttattgtcactaaaatagttcatcaaatgaaacagtagttttcatcattagactggagtagggattctttcttttttggtattttggaggaaaatacttgttttttggggttaagttttaaaccatatttgattgttctctgatacaactaggaactcacaggggtggtttgtatagtggatttacatctttgtggtctatttctaaaaataaccaagacgaacttgtcatagttatttgatgtatttgataaaacatggggactattgtgtcttttttttcccaacattttgattgttgtttaggttaaacttgatgtaatgatcaccagcttatacatactaatttgatggtttaatgccaacctgtgccaactagattttgcattatattctaaagttcctttcatagaccctgaaggttttgataaattactgttttgattttcataatgtcattttgacctgaggacttttttagatttaaatgagcttggtggtttattaaatgtcatggagagtttaaatccaggataaacttagccgttgctttttttcactcctttgattagggattctgtctgtggaaaaaatatagatagtggttgatatcagttttgtgttcatagagattctgagtcttttacatgctttcttttaggttgttgactatatactgccacccttggtgtccttggttcaaagccaaaatggtaagtgtgatgacaccagcaagaattgcatcagttacacattctattttcattctgtctccatggagtcacattcttggcattttttttttctttcaagtggagtggagactctttagcttgcggttgctctcagaaaccacatctctactcgtgaaccaggagtttggggatggcaaggagaaggccagtgttgattctgacagcaatcttctggctctcattcgagatgtcttacttccccagtaagtatcatgcagttgtattcatgcagagaagtgtaggctatccaggaagcttctgtcaaactaggttcagtgatggggttggggtcttgatgtccttatgtttatacacatatgcttgtgtactcattataaaaaaagtttagacaggtgcggtaactgttagactgcag

SEQ ID NO: 29329 - DNA, 2300 bp, Homo sapien
gagggtattcagtggagttgatggtatgatacatgattttgggaagataatgaaaagccagaccatgaagaacctcatatgccataattagttttaacctctttttaatggttgtgtaactattgagaatattttataggtgagttatatttgctcttacagaggatccactgtggctaaaatttgtagaatagatggaataaaggaaaattagataaagccgattgtagtaattcaggaaagatataatggtgcatagaaataatacagccatagtgggggtgtcattttcacagagcttggggttaattgggcgtgggagaaaggaaagaagggtcaaggatggtactcagacttctgagtttggctagtactcatgtttagagtagtcactgagtttaattttggacatacagtgtgaatgattgcaatagatcctttgtccacattcaccaaatgttaacagtttgctatgtttactttataatttgtctctctctctgtctttatctctttcactttgtgtgcatgtgtgtgtgcgtgtatctgtgttttctgacccatttgagaagtttgtggacatgatgcttgctcttctaattctaattatttcattgaatgtttccttgaaacaagctgtgaatttcaaaatcaagaaactaacattgattcagtattgttagctaatctacagaccttattcagattttgccagttctcccgatagtgttctttatgggaacaaaacttccagatcttgaattgcagtcagttatcatgtctttttaatctcttataatctggaagagcttttcagtctatgattgctggaaatttgaatggctttggaattatgtgtgtatatgttgggggtggtgttgatatggggaacagacttgtgatggtggtccttagaccacagagtataaattagaatcaggaatggactctggggagatggattttctactgtctagttgctggaaaggtagaaaacagatcttctactcaaggatgactgccttgatttgttttttttacctgagataaataatttggctttgataatttggttcaggaagtaggtgagactgatgcttagatatgtttttatccttaagtagcatagaatttacatggcatatacatgactatgtaaattcttcctacctggaaacatagcaccaaatagaaaaggactggagtgtggccaaaaaaaaatgagcttcttaaatctgtcttggacacacagtgttactgttaggtgctggcctctcttaagctctcttgggaacttatatattcctgttctctgtagccatcttgctgatattacgattccgtatttctgactacttacattcgttaaccatgtgtgtgtatgtgtgtctgttttctgtttgcatatttatagaaattatttatagtctgtcttttaaaagggaaagtagcactattccttgtcaatacttagtcctctgtgttgaattatacctttaattaaagagtgttataggagtatacgtttctttgtgtcatgtattgagtattgtctttatatctgttaagccctcagatgtgtagactagaggtatgatctctctatatgcagctcttctcagagatttatatctacatgtagttgtgactgacagttgtattatttgctgccacatttccagttgtgtgattgagtagttaacaggcaggctttgtcattcaactggcctggattttatccaactctgaatttgggtaaattgcttaatttttccatattcatttttctctttaaagcggggacaacattgtcaactttttatgactaactttcagatttaaatgagataatattaaaatttagttatgggatctggcacaaattgagaatgcgaaaacagtagttattattttacttcctgccatctgcttgattattatagtctgttcactctgagaattgagactgccctatttttttatgttctctcaaaaaattgtttaaatgtcttctacagggttttgtctccacaattatccgtttacttgacagcccctcaacatgcattagagcaaaagccttcctggttcttctatatattttgatttataaccgtgagatgttgctgctcagttgccaagcaaggtaagattttctctgatggtttcatcagtaacttcaatttagtgcctgttgtattagtagttgtagggtatttcttggcctctgtgtatctggtatttttttttaagagtttttccaggggcttaatatttcacctgtaatctcagcttggaag

SEQ ID NO: 29330 - DNA, 2300 bp, Homo sapien
cgctctcccttagaggggttagtagcattactctgggcaccagtgcacgaaccgggtcgtgtcgtgctgaactcagacctgggcacagtgtcagcagggcagttataccttctacagacaatagtggctcagatccaagtatgaacttacataaacgggttacataacaagtggaatatgcgcctgtgtcctaaactcgctgagccactctggcccggatgtccaccttggcctattccttgaccaaagcacatccatataccctacaattggcaattggttaaaagagttattatataaagacctggagccaatagaaggcagtgtctgggttgagataagaggttgcagagaccagggttcttgttctgcagatgaagcctctatgtagcaggtttcagagagaatagattgtaaatgtttcttatcagacttaaaacaggtgtcaggttctcagttaattctctccagcatcagggaaaagacctggaaagacaaggggattctttacagaatgtagattccccccagaagagatagctctgcaaggccatttcaaaatatgtcaaataaatatatttggccaggcacggtggctcacacctgtaatcccagcactttgggaggccaaggcgggtggatcacctgaggtcaggagttcaagatgagcttggccaacacagtgaaaccctgtctctactaaaaatacaaaaattagctggtgtggtggcacacgcctgtaatcccagctacttgggaggctgaggcaggagaatcacttgaacccaggaggtggaggttgcagtgagccgagattgcgccactgccctctagtctgtgtgatgcagcgagactgtctcaaaaaaaatatatatatatatacgtatatgagtatatatgtatacataagagtatatgtgtgtgtgtgtttgtctatgtgtgtgtatatatatatcaggataaaatacttcaatgtcttttggggcctgctgccatgttggtatcttattgctgcaaaaaagtctgttttgtcagtcttaaggtctctgtttaatgttaacgctggtcagctgtgcctgtattccaacgggaggagggtataatgaggcctgtcccaccccatcttcccatcattgcctgagctagttcttcaggttaactttggcgtgcctttggcccagaggagggatccactcagttggtaggggggcttggaacttttatttttagtttacacaatcaacttgagatcagagtgtctcatctgtttcctccatctccaaaaaggaaggtaattcacagccttctcttttctaaatggtgaggaccccggggcccctgcttctgaggcgttggttatccagactatgccaccatgtctacctgagctcccagaagaagccagaaagaaaagaatggaaggaaacagaaggacagtgggaacgggaagagaagaaatgacgaggtctcagttctccacactctagcctcagcacccacttaagattgaagagtagtccctcacgggctcccacttcggactctggccaataggaactgagactcttaaccaatcagcgctttgcgtttttccagcgttctgcgtgctgccatggagatggaatgagcaaatccaaacatagagggatggtgggccgaccactatgactgttactccagcacttcccgccccagtctctggcctgtgggctcgtccaaaggcagggcgtgatgccctttgggtggagggaggggccctcgtggtctctcacttccgggccccagccaacaggaacggaaactgcacagccagtcggcttcctgagcttcttccggcgttctgtgtgctgccgtggaaaccgtatggacgaatccaaacctggaggggcgtcgcctccgtaaggctggtcggcttcttccgcgcgttccgctttgcttcactgctttctcccccattcttgggcctgtggacctgtcctgaggcagaggccgagatgcgcgcaaccgcgggagcagccaagtggactggactcttttcttgacttagctaccaggtgcgtggcagtggcggttttagtagctacgagtctgagttcgtgtctgcctaagcggtcgcggaagagcgcgcaggcctgccggggcgggtgggtggtggcgcctggccgccctctctccttctgccagtggaccccgtaccccctgcgctcccctgctttgcgctcgtgttaaaaaagccgcccgtttttatccgggcgttagttaagggcacacgggacgcctcttctaggacctgggtgcag

SEQ ID NO: 29331 - DNA, 2300 bp, Homo sapien
gcacaccctggcctgcaaagccagctctgtcagggtcagcagcttaactctccctctgggcacaagctggttcctggctcggctcccctctgcccaccttaagggcaaccgctctcccttagaggggttagtagcattactctgggcaccagtgcacgaaccgggtcgtgtcgtgctgaactcagacctgggcacagtgtcagcagggcagttataccttctacagacaatagtggctcagatccaagtatgaacttacataaacgggttacataacaagtggaatatgcgcctgtgtcctaaactcgctgagccactctggcccggatgtccaccttggcctattccttgaccaaagcacatccatataccctacaattggcaattggttaaaagagttattatataaagacctggagccaatagaaggcagtgtctgggttgagataagaggttgcagagaccagggttcttgttctgcagatgaagcctctatgtagcaggtttcagagagaatagattgtaaatgtttcttatcagacttaaaacaggtgtcaggttctcagttaattctctccagcatcagggaaaagacctggaaagacaaggggattctttacagaatgtagattccccccagaagagatagctctgcaaggccatttcaaaatatgtcaaataaatatatttggccaggcacggtggctcacacctgtaatcccagcactttgggaggccaaggcgggtggatcacctgaggtcaggagttcaagatgagcttggccaacacagtgaaaccctgtctctactaaaaatacaaaaattagctggtgtggtggcacacgcctgtaatcccagctacttgggaggctgaggcaggagaatcacttgaacccaggaggtggaggttgcagtgagccgagattgcgccactgccctctagtctgtgtgatgcagcgagactgtctcaaaaaaaatatatatatatatacgtatatgagtatatatgtatacataagagtatatgtgtgtgtgtgtttgtctatgtgtgtgtatatatatatcaggataaaatacttcaatgtcttttggggcctgctgccatgttggtatcttattgctgcaaaaaagtctgttttgtcagtcttaaggtctctgtttaatgttaacgctggtcagctgtgcctgtattccaacgggaggagggtataatgaggcctgtcccaccccatcttcccatcattgcctgagctagttcttcaggttaactttggcgtgcctttggcccagaggagggatccactcagttggtaggggggcttggaacttttatttttagtttacacaatcaacttgagatcagagtgtctcatctgtttcctccatctccaaaaaggaaggtaattcacagccttctcttttctaaatggtgaggaccccggggcccctgcttctgaggcgttggttatccagactatgccaccatgtctacctgagctcccagaagaagccagaaagaaaagaatggaaggaaacagaaggacagtgggaacgggaagagaagaaatgacgaggtctcagttctccacactctagcctcagcacccacttaagattgaagagtagtccctcacgggctcccacttcggactctggccaataggaactgagactcttaaccaatcagcgctttgcgtttttccagcgttctgcgtgctgccatggagatggaatgagcaaatccaaacatagagggatggtgggccgaccactatgactgttactccagcacttcccgccccagtctctggcctgtgggctcgtccaaaggcagggcgtgatgccctttgggtggagggaggggccctcgtggtctctcacttccgggccccagccaacaggaacggaaactgcacagccagtcggcttcctgagcttcttccggcgttctgtgtgctgccgtggaaaccgtatggacgaatccaaacctggaggggcgtcgcctccgtaaggctggtcggcttcttccgcgcgttccgctttgcttcactgctttctcccccattcttgggcctgtggacctgtcctgaggcagaggccgagatgcgcgcaaccgcgggagcagccaagtggactggactcttttcttgacttagctaccaggtgcgtggcagtggcggttttagtagctacgagtctgagttcgtgtctgcctaagcggtcgcggaagagcgcgcaggcctgccggggcgggtgggtggtggcgcctggccgccctctctccttctgccagtggaccc

SEQ ID NO: 29332 - DNA, 2300 bp, Homo sapien
tagttgctcaggccaagaaccttggaggcatttgtgattctgcctttctgcgattcataccccagtttgtcaagaattctgttggctgtatcttcagagtatgttcagaatctacccagcatttactgtgtcccagccacccccatctcacacctggatgaccgcactggccttccagtggggcctcttactgctacccttgcctccctaaaattctttctccgctcaaccatgagagttggcttttaatacaatcagatggtttaactctcctccaaacttccagtgagctccccttctatagagacctgtaaggaaggggctgaatgacaggaatccctctttgccccgctgacctgcctcctctgtgccctccgtgctccaggtacactggccgcctcacttaaccttgaactcaccaggcacatccagcctcagggtctttggattgccttaactccagatatccttatgaccccctcttccttctccaagtgacattttatttgatgctttttgtgacccccccccaatacagagtgatctgcctcacctttccccatctccctttcctgtttaattttttcccccaaacttaaccatctgctgaactactgtatttgtgttttgtctcccaaacttgcagtagactaaagtcgcggagggcaaactctgtgtctactttgcacactcctgaatccagtgactaacgtagtgcctgcctgtggccagcgctcagtgaacatttgttgggtgtatcaattgtgtcaatttgtgcagtgagtactattatcctctttgtgtaagtgaagagtctaaatctcgaaaggttcagcaccttggtgaaactcctgagtggcaggagttgcatccaggtctgtaggaccccagggcaagggttctttgctgcctaagaatttagtctagttggggagacagatgagtgagtagaaattggctgtacaccgaggttagcacaatgataagcacagcacagtagggcaccaaggagggtgccaggctgaaccttggaggggaaaggacaggagaagaccacgagggctttgtggaggaggcgatgacccaaccgcatctacatttgtccaaacacatgaattgatccttgggattctagtggcatctgtaccagtgaaatccaggaagcatccagcctgttaaagtgctttcactttctttgaatgtgacagtggagggtaaagaaatggcagaatgtaccgctgaaacttcacagctgggcgtggtggctcacgcctatgatcccagcactttgggaggccgaggcgggcagatcacctgaggtcaggagttcaagaccagcctggccaacatggtgaaaccccgtctctactaaaaatataaaaactagccaggcatggtgacggacgcctgtaatctcagctacttgggaggctgaggcagaattgcttgaacctaggagatggaggttgcagtgagctgacacagtgctactgtactctagccttggcgacagagtgagactctctcaaaaaaacaaaacgaaacagcaacaacaaaaaacacaacaaagaagtggcagaatgtagtgctgaaacttcaaaccctataggatgtggtgacttgggggttctttgttgggaccagaggaaagctgagaaacagctcggtgctgttgtgtttagcactggcttggtaaacaggagagtaaacacagacactcttatgcgtttaagggatgggctgtcaggtgatggagaacatgctcggattaaagttttattaggcagtcattgaaaggaagacattaaatggaaaaaagttctccgagagacctagactatccccaagaatgcatctgtggcctcccagggctttgccaagtgcagtctcaggacactgcttggcattcagcccttgataaattcactcctcccccagttcccagcaagccctgagatgaacagcagactttttgttccactttaatttttaggcaaaaccgaatgcccatcacaaagccccgttctccttgctactccccttcccccaacctagaggtatcacatttttgggtgcgtcattttctgtttggggtggcttaacaagatgagctgatagggttcccaggctgcctggagttacataacccattgtgcttccaggacagctcacaatcttaggatttgccctaacaagcaaactcagaaaactgctgaggaaggcacgggagggtggctgtgcgaggtactgccggggctgagctctcatggaggctctctctgttctctgaagtgcctttg

SEQ ID NO: 29333 - DNA, 2300 bp, Homo sapien
gtcctagaaaactgaaaatgtatattcaagttgggatcagggagagggaataaagtaagtgagggaggctatgggatctgatatatactttgaccagaaagaatgtgcagtttggttgggagtgtcttggaggaggaagagatgatgacagaggggcacaggtcctccagggtgtaagtggtagccaggagacagcagggccagggatggtgtcattcccttgtctcctacattttctgaacttttctggaatcctattaacaattttagccaaaattcatcatcagcatcagtggttccactgcagcatgcggggatggtttctttgtctgcttgtggtttgggcccctgcctttaacttctcttttccctccgggacttgaggctctgttatccatagtgagtgccaaagggttggatccttgcagtccacaagaggacaggacctgctctcactaaaggctgggccaaatggggttggccagccacctggcaagtgggaaggtctgatgtggtatcctgcccaggtgtgcaagcaaggcccaatgataagggccagacatggctgtaacatgaggagagggtaccccagagcagagagagatttctttgaggacctcacaacacaacgttacaggctcttcagcttccagtgatttaggaagattgagatggatcgatacaaagtatggattccatctaagattctctatataagatgtgtgtgtctatgtgattttcctttaaatttctattttacacacagaagcagacatacacatacatagaaacacacacacacacacacacacactattatctgtatatatgctgctgttgacaccaacagatacttacagtacctggccaagaggacaatgaagtaaataagtagttttggtttagggcaaggttctcaaccaagcagttttatatccaggggacatttggcaatgtctggagacatttttggttgtcacatcttgggggtggagggtagtgctacctgcgtttagtgggtaggcaccagggttgctgttaaacatcctgcgatgcccagaatagccttccacagcaagaattacctaacctcaaatgtcaatagtgctgaggttgagagaccctgctttagggaatgaaattcaacctataggatagcctagaatctgtcttattatccactaccttgttttattatgaatatttcaaacatatcaaacatttagaactaatattaactgtattttttaaggaaataaaacatatgggtgcatttataaggaaagttttaaaacctcatttcctcactccttccccagaggcaactaacttcctgcaggtggacttttttcttctagtgtgcactttaacgccttgattacacatgtacgtgtccatgaaacagcatattgtactgcacaagccctttgtgatggcgccctcctctatttgtatgtgacaggctgtttttctagaagtttgagcaaaagcatgagcagagaatagtagtgcatctaagtgaaaatgtttccattttctaagtaatttacatttcctttaagtggtggtcaaaaattatagaagatgtttaatgtgtgaaatcaggttgaggaaaggaaaccaaaagtaatgatttgcagattttaaaaggtggcagatttcaaatccagagtcttctttctatcgtgacccaaagtagggtgaataagcttgtccttacgtttcttgaaggtgatgatggtgctgacccctctgtctctcccttgcctgtaccctttcttttccctgcctggcatctctcagcctctgctgccagcatccttggaagacatttcctccatctctgcatcatttttcagagccggccagtttctatggcaacggttagattgaaagatgagcggcgagcaggagacgaggcttgagtgagacagccagtggtggtgtgtgtctctgacgtcaccctctaggcgtctggataggacgatcctggctactcccattcagggctgctgtccagtgctgctttattggcagtgctgccagggtctccgttagctctctgcaaattgccttcctttctgctcctcctactccctccttcccccatagaatttttcttttcattgcccactttactgttttggctccagactgtcgttaagaatgtacagcctaattctggtgtgtttcgggatattcttctgtccagtattctggaagggcggggaggcatggcagcgttttacttgacgttgatggtgctgtgaagtccattctttcctctgcaagactactga

SEQ ID NO: 29334 - DNA, 2300 bp, Homo sapien
aaggttggggaaaagtaatgaagtcatgttctaaatattgtgtaatatatagagtcttggacatcatttagaatatctaagtctctgtatgtttcataatagcgatactctagatttgaattaaaagatgagtataaataaatttattatgagtaaagtcacttgatagtatttttgaattggtgaaattagcttttgttttcctttatatacactgtggccggcacaatatcctactcatcttatcgtcaatctgatacttgctgaatgaatcacgcacaaggtggaggttcttcctctctcctgccttctcaggggttcagaataaccatttgtgtcattcacaacaccttatagatgtgcccactgtcatctgaattgaattagtctaatccgataaagcttattaatattaaataagtattttttgagtgtgtttatatttaaagcttatgcagtatttcaaaatggaatgttgaactccctgcctgaatttctacacctttttttttttttttttttttggctaagaacacatctttaacatggtaaaatacagctctaattttcaagttctaaaaaattaaccagaggtctgggcgtggtggttcacgcctgtaatcccagcactttgggaggctgaggcatgcggatcatgaggtcaggagattgagaccatcctggtgaacacggtgaaaccccgtctccacaaaaaatacaaaaaaaaaaaaaaaaaaaaaattagccaggtgtggtggcaggtacctgtagtcccagctactcgggagactgaggcaggagaatggtgtgaacccgggaggcggagcttgcagtgagccgagatcgtgccactgcactccagcctgggcgacaaagcaagactctgtctcaaaaataataataataataataataataataataataataataattagaggatgcatatgtccttagacttttaaataaaatctttattatctctggttttctatttagaggcacttgtacatgatgtcatattagtctttatggaggtagtaattcaatttagctgacatttttagccacctgagcagaattctcggccctaaggattcaaagacgaatgagatatggttcccgaacttgtgtagaaaattgttttatgaagaccttgcccctgctaaaatctctcttggctacctgggggaggcagcctgttcgggaggttggaatgagtgtcctggtgtagctgttaggagcaggagacctgcacagtgtagctgggagatggctgaagcacagagattacagaatgagctgtgattctccgagacgctagcacccggggctgcctttcactgggtttgatggaagaacctgccgttctcactgttgcaggcaaaatcaaatggtatagaggaattgatatcaaggtgtgcaattaaactgtggcttctttctgcaggcaactttgcaagctattaggctttagatttttttcttaccttgttctagcaattagagagatctttataaatttggctgtggaaacacagatttagggtaagagcaggattttatgaaatgtagattgataaagagaaaatggaggttattatcaaagaaggactgggatgaattaagtttaacgaggtaatggtcactgcatttttttcccttttgctagaaattagaatgatcccttccttcctctgctcagcgctgtcaggcagttgtcacagtcagatttgtctccacatcttaagcccgcccacaggaagtctctcatctgggggtgttgggcagtgcttcagcaggacaattcctccgccagcgccccacctttaaacaggtgtgcctgctcaaggcttagttgatgttgccccatgcagttgctgtgagacttctaggaagctaccactcctcattgctgctgggggaggaaaggtggagagggtctaggaggccgagagcttgctgagatcctgtaccttcctgcagggctttcctctgaatctcctgcgcctagcagggcattcccaccccgccaagtgctccaccccaccccgcccctcctccaggctcataggagccacccccttccgggtcctgcccgggtgatgctgggccaggagctttgtgtacacccctccacttcagctgagccagggcatgtctgcggcccaggccagggcgcagtgtgtgccctgggggcccaggcctgcatggctcctctgggtagggggtcgggggcacccccaaggatggtcccttagggtgatgttttggctttggggtgacttcagcaatgtccc

SEQ ID NO: 29335 - DNA, 2300 bp, Homo sapien
ctccaggtcccaggctgggcggcctcggtgcacggagagggcgaggggcgtgttgtggagccttggcaaggcgctgctcttcctcgcgcctcggtttgcggtctgtgaaatggggttggcagtgcctttgcagggacgcggcgaactcaagcaccagcaagcggactcgaactcaaagggtttcagggtgtagacgaccagagcgcactgaggggctccaggtcggcccgctccggagccgggagagtaaccgcgtgcagggaaaggcgcacggcagcctcggtgcctcccttccctccaccggacgggtgactgactaggggtgaggtcctcacctccaggctgcgcagctgagttctggaaggtactgtcctgggggtgtgagtgtgtgggccctcaggaaaggtgcgaggggcggatgccgtggtctacccgagcttgcgggggtgcggtggtcaagttccccaggaccctcgctggcgccgcttgtcgacaacggggaacagtgggcgccgcgggtggtggtaacttggcccgggaagaaaacacatccctttcccaaaccggattcctctgagcaaaaccagatggtgtcatccgcattttacagctgcgtcaagagaggcccaggacaccaagagccagctgtggccagagccctttcactgacccagaacactggccctcggaaacctggagaactgcgagggcttttaatgcggctgagaagaaagtgaagaccccgactcctcctctctccttcgaaagagccgacacaggtatgaagaccagcgcctcggacgctccggggtagggggccgacgccccctccctttcagaatcacgccttgctgatgctcagtcctgcccagtgtccaccccccacccccgcccccagtttcctttctagcccctccggtccccaaagcgaactaagctagcggcagcttctccatcccggaggagactccaaactcctaggtttcccaccttggagagtactgctctggaatgcgcaggggagcggcacctggaaagggttgggcggaagcttctcggacccagagggggcggacacccggcaccgcgcgtgggagggattaactccaccccactagaccacctccccctctctcccaggagccacttcaaccggttgtcgccccagtggccgccctctgagcacgtgttactgccagtctgcgtcagcgttgggtaaatacatgactggccgacgccgccgggtggggctatttaagagacagccgcccgctggtcctccctgaacttggctcagctgccgggctgctccggttggaaacgccaagccagctgcgtcctaatccaaaaggtaggtccctcggttcgtcagcgggggatccaagtgtcgtgtgtctttgaaggatgctgtcttcagctttgtgcccatttccattatgcttttctattttctgtgtcttccctccgagagctcgaaagacatttcttgaagtcagaaataacggctctgggtctaaaagtgaggtctgggtgggtagagctgctttagagcctttcatacgccagcatcattaagggatgaactacccattcgctaagattcgcatgcagattgagtttgctagctgttacacagcggtgcgggggactttgcaatcttttctaataaaatattagagggttttaagatttaaattcattttctaaatactgcagaaaatttcgaggctttacggatagaaacttgagggtgttttatccactagcgatctaaaatgcacggggctttcgaagcctgagcgctgggcacatatttctgattttaaaacctgcctatgttctgcgtagtggcttattgccatttcccacgtacactttgagaaaaactttataaatacggctttatttattgctcctacattttaaactgtgcttctctttttcatcatttactgtatttccatattgaaagcttgttagctatctggaaaagtgctttccccagggttctcatttctcccacggagtcttccctttaggatatttttttcacactatttttaatctcgtggggttttatttttcttctttcggttagaagagaggcactctgcaaacacttcctcaaactttaggaaagcaaaaacattccttctgctcaacacggcagaaaacagggtctctgccccttggcgctgggtgaggagttcccaaagaccagccaggtgcgcccgggggcgcgcgccatggcactcggctggggtcagcgcttggcgagccctcgtgcttgcggcggcctg

SEQ ID NO: 29336 - DNA, 2300 bp, Homo sapien
aggagaatcgtttgaacctgggaggcagaggttgcagtgagccgagatcatgccactgtactccagcctgggcgacagagtgagactctgtctcaaagaaggaaaggcaaggaaaggaaggaaggaaggaaggaaggaaggaaggaaggaaggaaggaaggaaggaaatgaagaaagaaagaaagaaataaagaagaaagaaagaaagagagagagaaagagggaaagagggagaaggagagacggagggagggaggggggaaggaaggaaggaaggagggagggaaggaaggaaggaaggaaggaaggaaggaaggaaggaagggagagagggaaagagggaaggggagagagggagggaaggagggaggaagggagggagggagggaggaaggaagggagggagggagggaaggagggaaggaggaagaaaggaaggaaggaaggaaggaaggaaggaaggaaggaaggaaggaattcggattcttgggcccttcctcagacctactgaattagaagctctgggggtatttcgataacaagtttatgtttccagacatgtcttgccacaatcacaaataagactctttttcgcaactgaactacacaaaccttagcaggctcgtggcgaaaccactggaaagcatttaatcagcttcagctctttcaaacatgttgcccataggttgcagaaacgcagctgcctctcaggattagaaagtggagcagcaaccggaggcgtctctgggccgcccccccaacccccccaccccgcctcgcccactccaccctcacactggcgttgccacagtccctccattccagagggaattccagagcggaatacggattccgattttaaaataagcgcttctaaatctttctccttgcatctaagacgggtgggggaaagaaagggagaggagttgaggtcccaaggttcaaggcctggtgatctccaggtcccaggctgggcggcctcggtgcacggagagggcgaggggcgtgttgtggagccttggcaaggcgctgctcttcctcgcgcctcggtttgcggtctgtgaaatggggttggcagtgcctttgcagggacgcggcgaactcaagcaccagcaagcggactcgaactcaaagggtttcagggtgtagacgaccagagcgcactgaggggctccaggtcggcccgctccggagccgggagagtaaccgcgtgcagggaaaggcgcacggcagcctcggtgcctcccttccctccaccggacgggtgactgactaggggtgaggtcctcacctccaggctgcgcagctgagttctggaaggtactgtcctgggggtgtgagtgtgtgggccctcaggaaaggtgcgaggggcggatgccgtggtctacccgagcttgcgggggtgcggtggtcaagttccccaggaccctcgctggcgccgcttgtcgacaacggggaacagtgggcgccgcgggtggtggtaacttggcccgggaagaaaacacatccctttcccaaaccggattcctctgagcaaaaccagatggtgtcatccgcattttacagctgcgtcaagagaggcccaggacaccaagagccagctgtggccagagccctttcactgacccagaacactggccctcggaaacctggagaactgcgagggcttttaatgcggctgagaagaaagtgaagaccccgactcctcctctctccttcgaaagagccgacacaggtatgaagaccagcgcctcggacgctccggggtagggggccgacgccccctccctttcagaatcacgccttgctgatgctcagtcctgcccagtgtccaccccccacccccgcccccagtttcctttctagcccctccggtccccaaagcgaactaagctagcggcagcttctccatcccggaggagactccaaactcctaggtttcccaccttggagagtactgctctggaatgcgcaggggagcggcacctggaaagggttgggcggaagcttctcggacccagagggggcggacacccggcaccgcgcgtgggagggattaactccaccccactagaccacctccccctctctcccaggagccacttcaaccggttgtcgccccagtggccgccctctgagcacgtgttactgccagtctgcgtcagcgttgggtaaatacatgactggccgacgccgccgggtggggctatttaagagacagccgcccgctggtcctccctgaacttggctcagctgccgggctgctccggttggaaacgccaagccagctgcgtcctaat

SEQ ID NO: 29337 - DNA, 2300 bp, Homo sapien
tgtgtggcagttaactgtcatccactgtagcaataggggtgactggtgccactcatttcttgcaagatgaggccaggcatgttcatgtggtggtggcagagctcagggtgagcagaggccatcaggcttcctgaggcctaggattagtactacctcattccactgtgatctattgtcagagcaagacaggccaacccaacccctggggtggggagtggatggcatcccttgatgggagcagctaagttgcaaagccaaggggcacagatacagagaagactgtaaaattgtggccttttttttttttttttcaaactgtctaccgctgtggatgaggagaatatttccactattatgccttcagaggtgggagtttctgcagatggaatgtttctcgattaactgatttctgtgaaaacaccttagttttctgccaaccagcctccagctgagccaacactaaagactgttgagaaaataggcatgtatggatttaagcctcagcgtttatggcctggttttagtttttcttttatgattctttacattattaattttcaattaatcgactaattaccagttctaattgagtcagccagacagactaatgtgttttcaaaaggccaatttgccctcaatcatctcaatatctcttaacttttggagctgaaaaggaccttaaagataacccagtctgatgccctcaagtcacagatgaagatgcccaggccccaagagaggatgtctttgaccatggccctctggtgactaggaaagctacataagggcttctcccactgttccacctagaaggcagtcctatgagggcccggaagaatgctgtagcaggcagaatactgatctcccaaaggtgtcctaatgaagccatgccccaaagagttaaaaaaaccaatgactaacagaaattcttgagtttgcaggatggcaggtaagaaaagaaacaacttgctgaaatactgaaactccctctgcttatgagatataagaactggctgaaatcagctggaaccaagatggccgaccagagtctaggcagaaccagcttgctgatgtcacagactaaatttccaccatgtgctttatactaactttccccataattgcccaggggacccataaaatagtatgaagagataactgcatatgacccaggactttccagcccttccctttcttccaccaaatcacctactaatcttagaatcccctaaactttttctaataaaaatactgcatcacaggagacagatttgaggttgacactgctgtctccttgaaaatcgacaatatattgattatatatttaaaattaaatatttatatttcaataaaaagccttttctcaaacacccagtgtcatagcgttggcttccaatgcattgaatcacttttgttcggtaacactcacccctggaacctctgaatgtgttagtttgcatggcaaaagagactttgcagatgtgtttaaggttaaagactttgagaagcagaggttatcctggatggtccggctggaccaatctaatcatgagtccttagacagggaaggggaggaagaaaagagggtcagaaagatacaatgacagaagaagaggcaagagaaattcaaagtgtgagagggtttgactcacccttgctggctttgaagatagaggaaggcaacagagctaagaaatgcagacagtgcttagcagctgggaatggcccttagccgacagccagcaaggaaacagggaactcagccctgtgactgcagaaactttattctgccaacaacctcaatgagcaagggaatgaatcctcttctaaagcctttgggaaggagcacagccctgctgacaccttaattttaggcctgtgagacccatttctgacttcagggctatagaactttaagataataaattgtgttgtttaagccactaaatttgtggtaatgtatttcagcagcaatagaaaactaatacaaatgtgacagtgacagaccctccctttttcagaatatcctggtgcatagcaactgatgtcatagaaaggattctagaagagcatgtcatggagaactcttgggtgcagacaagtggatgattaatgaagtagcatctgaaaaacccaaggaaccaaatgtaggtggagcaacttccctgcaacacacgtcgaagctgctgcagtggctgttcttcccctccccttggaaaggcaccaaaagccagcctttggaagggctggtggactggtaggcgggtatatggtgggcaggagggtaacgggcatgacaa

SEQ ID NO: 29338 - DNA, 2300 bp, Homo sapien
gacccaaactgagatatagtaatagagtttttaagctggacacatgactgcctcttataaaggctatattgctcagctgtgtattttagccatgggtggccatgtgattaagttttggccaatgggatgtgagaagaggtgactgtgcaacttccaaatcactcagttgctaggaaggggcatgccatcttcttcccctttgcctctcttcactgcctggaaagcagaagcagcagtggccatgtggacaaaggtctttacctcctgatattcactcccttgtgtagcctcctcccacattcaaccaagaatggcctctgtgatcaatagaatacggcagaagtgacagtgtatgactctcacagatagtcataaaaggcactctatcttccatttcagtccctggggtctgtcactcaggagaaccagccgccatgacataaggacactcaagtagccctgtggaaaggtctacatggaggaggaaccaaggcctccttccaatagccacgtgagagagaaaatggttgggaatagatagtaccccaaataaacctttagatgactacagccctagctgacatctgactgcaaactcatgacaggtctcaagccaaacctgtccaaccaagtttcttacaaattcctgatcgacagaaaccataagacataataaataatttattaaagccactaagttttaggtcaatttcttatataatactaaataactgctatgggttgaattgtggctctcctgtcaaaaatttacatgttgaagtcctaacccctagtacctcaaaatgtagcattatttgaagtaaatgtctttacagaggtaatccagttaaaataaacttattagagtgggccctagaccagtatgactgatgtccttataaaaaggggaaatttggagacacacagggagaatgccaacgtgaaaatgaaagcagagattgggatgatgcttcttcgagccaaggagtgccaaagattgccagcaactaccagaagctggatgagaggcatgggattctcctagtccttagaaaccaaccctactaacaccctatccttgggctttctggcctccagaactacaagaaaataagtttctgttgtttaatcccccaaacttatggtacttggctacggcagccagagcaaaccagtacaataactgatacagacaacatccaaaggatagtggagtagaaagaccgaagaactctgggcctttcatgtcacagcaagagcctccacaccaactctggcttctctatgcaaaaaaataaatccctgtcttatttaagccgctgttcttcccatctctagcccacgtagctgaagctatatcctcacaaattcagcatctaaaacttcctctcgacatgtgctgtcctgactgatttcacatggaaatgaatccccagaataaagaaataaattgagatcaacactgtcatcaagattgtaaagactgtcttcctttcgcacacagacactgagtgtttcttccagatggaaagcaggtggggttgggtggaaggggatgcaggaagcccttactgtgaaggagcagcacatcctggcaggactgagggggaggtctggaggaaccacactggctctactcactctatggagacagagcagaacatctctctaaggaaaaagaaagggcaccaggtccaggagagactgcccaggagcggaggccaacacaaagattcaaaagaagtgcttctttctgtcctgggctaaaacgaaccacacgtacattcccattccttcccaagatggcctcttccattctgctgtccctgaacaacttgaggactggggagttggagttggaacttgcagtattaaaactctttctgtttcacttaacatgaagccaacgtatactggcctaagcaaagaagagatttatataacagaaacagaaaagttcacagggcttccggtgcaactggattcaggaactcaaacaatgtcatcagaaatctgtctatctctatcgcttggatctgatttccttgtgtttgctcaaatctcaagcaggtaaatatgccacagcagcagcaagcttgcattttcccagcttactagtggaaaagcagcttctttcccacagttccagcaaaagccccagggctgatgctcattggcccaggttggggcatgtgaccattggcaagactcccattggccaggcctggggcaggtgctcactactggagccagagcggagtataagccctacccaatcactgaactacgtgggtcaagag

SEQ ID NO: 29339 - DNA, 2300 bp, Homo sapien
gtatgtgttgaggagtgagggctgaggattcatgacaccccaaacccacaggtttgctcttcacatctagggctcctaggacaccatgccagcacaagtaacttcccaggaaaaagacacaattccactgtcctgccagggaactgagacccgagacggggtacacagggtcataaggagagacaaagacccctgatttctgagctaacagcagccgtcaggggtgtggatagctgaggagatggctgaggatgattcaaacactcccgccattgggagatcgagtacaaacccaagaaaggctaggacagaggcatctccacagctcccaaatctaaggaaaggcctgtgtccagcctcactgattatatcgggaaggaggtagaaattgcagggagtacagtagctccccaagttcccctcatggcaaggggatgctgcccatccacctctgtgcccccagtgcacagcacagggcctggcacacagaaagagattaataaatgtgcatggaagaaaggagggaggggctccatggtggcgaggttccctttaatgaagggaaggaggagagggaggaaagggaaaaagagcaagtgcaggggatggaatgctggaagggaggaagaaagaagagaaagaagagagagtggaaagaaagtgtaagtacgccctgaagaaagggccagggcactcatcccttcccggctttcccccactcccctcaagcccaccccatggcagcatcccaacgttccctctctgtagggagggaagccctggtgggtcctcagggagctcctgcgcgcctgctgttcagccaaagcctagcgcgggacctccttcaggtagccgcacattctgctcagggctctgggacccgctgccctctccgcctctccactgaactccgcctctccttctgtcacacggctccgccagccactctatcctgccgccgcgaccacatctccagcctcgattgtgcaggctcgagcccgtagaaagagggctagcagccacctgcgcttggtccacaagaagacgcgctcccagggcgcagagctggtgaccccgctccccatgccagggacgaataaacgagaaaaggggctgacccggtgtcacccagcggccgagcagccgccccttggaagctcagcaccaaaggcaggcggccagggtcctggcccctctctggaccccagtatccccagctgtaaaatagggaatgcaggaggaggacgacgtctgtggatcgttttaggtcagctgcggagtcggcctgcgggctgggagcagacctcgctccccacgcgagggcgctggcacttcagcccagcctccctggggaggtgccctggacgagacccgcgagggtgcggacacctcatcctccctggagcaggtctcccgaggcttgaagggccagggcacccaacaggtgctgagcgcgccccaccaggtcacccgggagcagggaacaccaaggaacccagagtcgggcctctttcgagccctcgcttcctctcgcctggcttcttcggcgcgaaggatgaattggggttgttgaaaattgatcaaacaacccgatctctgtcagcgcctggacacttgctgggccccagctcgcagcctgggaagataagtggcacttcctgtctcgtaatcggatttgcgcgcacgaaccctcggagacgcacaggtgggaaatggggaggctggcggggaggcctcctggaggaggtggctccgagggtagacatgaggagcgccctgggatggggctgagggtggatacagaggtgggagcttgcgaaggtcgtgagctaagcatggaaggatggaatgtgttcgggtctcgagattcccgggtgatgagcccggaggggcgaaggcctataaatgtctcacgacggaagaccaaggtgtgggattggcaaagagagagcagagcttcctcactggcaggggctccccagccccgccccatacctgcgcggcggccccgcctccacccatccattggctagatccgccgcccgtcagacgagcccccggggcccgcccccagccctgagctgcgcctcttagctctggggccacagcgccagcgccactctgccaggctcccggccatcgcccgcctggtgcgccgcccgccagctctttgcccgcgcggggccgcccgccgcgggctcagggcagaccatgcgcccgccaagtccgctgcccgcccgctggctatgcgtgctggcaggcgccctcgcctgggcccttgggccggcggtgagtgttcg

SEQ ID NO: 29340 - DNA, 2300 bp, Homo sapien
cctccccctgcaggtgggctgtaaggcagccatggtctttttccaatattgtgtcatggctaacttcttctggctgctggtggagggcctctacctgtacaccctgcttgccgtctccttcttctctgagcggaagtacttctgggggtacatactcatcggctggggtatggtaccagggagggcttccaggctggggacagagggggcaaggcctggagaactccctagggggagggtgccaacccagcttgcagtcctacgtcttgcttagctgcaggtcctgcctgcaaggatatcagccaagggtcaagaaagtcctcaaaatgtctgatcccaggacaagtccctcaggttgcagctgcacctagggctgacctgtgggacagattttgtgaacatctttccatttccctttagttcccgaaatacacagggccactgctaatctataaagggcctctgtcacaattagaaagagaatgtccgtctaggtagacacagcccttcaggcatacagcttcaccccctcagtggagcatccctccgtggtgaacaacctatgcaaccaaagacagcagactgacaacccacccttttctctctccctccctctccctgcttttctccaaaatctctccctcatgccctctacccctgcttcctgtgccctctctgctctttcactctccctgggcctgacaggggtacccagcacattcaccatggtgtggaccatcgccaggatccattttgaggattatgggtgagctgctgccccacacactcccccggccgccatcacttgggcaggccccctgggtgggatgataatgccatctggccttggtgagtggacaaaaaccacagctctcgggccagaggggaggctggaggaggacctggggagcaacagactctgggcccggggttgctaaagtgctcaggagcagagctggggacaactgggggaggtgctgctgagtctctctctggctgaggacaatccctctcattcctccccacggtctgctcaggtgctgggacaccatcaactcctcactgtggtggatcataaagggccccatcctcacctccatcttggtaagataccctcccaccacctagagatggggaaacaggcccaaagggcaggcaacttagcccaaggtcacatgggaaattagtatctaggtcagaactgaaacgtagcttcctaatgcccaatgcaggatcatccccacccctgtcctaccagttcttccttgagcgtaagcggattgggagcacagtccttagggatttgaaggaggtagagttcccggatgacctgcccaaaggggaaatgccagaggagaggtaagatagagagaggggcagcaggaccctgggaaagaagacaggccagcagtcaaggggcctgaacacctcagccttcccgctctgactgcccgaactcgggtccccacccactaggtaaacttcatcctgtttatttgcatcatccgaatcctgcttcagaaactgcggcccccagatatcaggaagagtgacagcagtccatactcgtgagtgtgggcctagtgcctcagcccccagtacctccatccccagtcctcaaatcatcccacatctccttgaagtcctcccaccccaaacatccagagtcaccaaagagccacattgttctttcccacctccaccatggcctggctcagcccaccaccatcccctgctccagccccaccctcaccaggctgcactcagagccctgcatgcttctcctgcccacactcacctagcatccttcccaggtatgcatctgctgccaagccagggagctcaagaggacaccgatgacctgtgtcttgttcataccatgtgcccagtccctggcatgtgcctcacatggaaaaagggtgcaataaacacatagtagatgaatgccctgggggagaccccagtccaccaatgagacagccatgttcgggactcagtattcctcagtaataatgatgacacctgcagtttacatgccaggcacacgctaagggatttccatgcatcatgtcatttcatccacacagtcccctgcaaaattatctttactttacagggaggaaatgacatacactcccttctccttgagggttttggagcaggtcaccatgggcagggagaagggggcacaatgtccatggaccagggcttggaaaggtgtcaggactgttccccctgcttgggaggactggaggaagaggcaggtttttttgcgggagcaacaaggcttgaagacagag

SEQ ID NO: 29341 - DNA, 2300 bp, Homo sapien
agaggagaggtaagatagagagaggggcagcaggaccctgggaaagaagacaggccagcagtcaaggggcctgaacacctcagccttcccgctctgactgcccgaactcgggtccccacccactaggtaaacttcatcctgtttatttgcatcatccgaatcctgcttcagaaactgcggcccccagatatcaggaagagtgacagcagtccatactcgtgagtgtgggcctagtgcctcagcccccagtacctccatccccagtcctcaaatcatcccacatctccttgaagtcctcccaccccaaacatccagagtcaccaaagagccacattgttctttcccacctccaccatggcctggctcagcccaccaccatcccctgctccagccccaccctcaccaggctgcactcagagccctgcatgcttctcctgcccacactcacctagcatccttcccaggtatgcatctgctgccaagccagggagctcaagaggacaccgatgacctgtgtcttgttcataccatgtgcccagtccctggcatgtgcctcacatggaaaaagggtgcaataaacacatagtagatgaatgccctgggggagaccccagtccaccaatgagacagccatgttcgggactcagtattcctcagtaataatgatgacacctgcagtttacatgccaggcacacgctaagggatttccatgcatcatgtcatttcatccacacagtcccctgcaaaattatctttactttacagggaggaaatgacatacactcccttctccttgagggttttggagcaggtcaccatgggcagggagaagggggcacaatgtccatggaccagggcttggaaaggtgtcaggactgttccccctgcttgggaggactggaggaagaggcaggtttttttgcgggagcaacaaggcttgaagacagagctaaagaaacatgaaaaatatgaaaagggaggctgtgggaaggcaagtagggtctgcatgctcacagatgggagtaggagattgagtatcagtgctattgacacaagacaaacctgggacgtcccacaaggccttccagtcctgggattcttcttggcctggcttctctttggagagtctgtgctgtggttctaagattcctggctagaatgtcacagactgctggatttaggattctattctggaatcctgtgattctccctgatgagactaagactcacattcctggtgtgactgcattctctcctgccaggtgtgtaggcggagcttcccttcctgtctgagaaggaaaggctgggggggacggggggggcatctgcagtctgctgaggggcagcacatcgggcctgtgcacccttatcctctcctttgccgatgggaccttatttcccccaacttacaatggttcaaaagggcctgaatctgaggcaaacagagctggccatggtcagggccaggtctgtgtggtgagacagaaaggaaacagttgtcagcaggcaaaaggggtgggggcagttggagatgaagctcctcaaggagaagctgtcagctcccactctacacctccccataagcctttgatttaaagaaagcctccatctgttagcctccggtgtgtgggatagttttgcagccgaagaggggtgggcattgctcaggatcttggcatggctgagaaccaggtccaggaaggagtgggaggggcaaggccagctcctctgcccccagcttgctgtgggacctcaggccttgggctagacttccttggactgactgctaaggcaggagagacagagtcagagaccctccctatccacaccccacctctcctagccagggagcaatgggttcacactgcctggatcagctatgaggtcaggtggctgggaggcctgaaccaggaagagctctgggccatgggaggcgggtgagcatttagaatgaatgctgaccctactgagcacacaaagctgtgaagaaggagctggtccttcagagcacgctgggagtatatgcactggtgtggggaggtaggaggagggggatgcaaccccagagaaggtggcaacttctggagaagcagacacagcagaaaaaacacagatagagggcgatactgattaattttgggttgtccctggtgatcaggtatgaacttgggtccccatcaccctcccaagtggccctgggcatatgtggtcagcacccagttagaaagacttgtttcctagtacgtcttctctcatggtctctcatggatgcactatacttcatagtacccaaaacact

SEQ ID NO: 29342 - DNA, 2300 bp, Homo sapien
ctatagatatatgggaggggatttattaggggaactggctcacatagttatggaggctgagaagtcccacaatagaccatctacaagctggagaaccagggaggctggtagactgcttcagttcaagactaccctgtcttagacttggcctcagaaccagggaagctgaatggtgtatctcccagtccaaggcccaagccgggagaacctggggaaccactggtacaagtcttggagtccaaaggctcaatacttgctaaatgaataaatggacggactctactacctaatctcctagagttaggagattaggggaacggggaattctgatgccaagggcagaagaggggtgtcccaactccagagtagagaatttgcctttcctctgcctttttgttctattatgtggtgcctgcgcatattagatgaggacagatcttccttactcagtccattgacttaaatgccaatatcttctgggaacaccctcatagacatacccagaagtaatgttcccccagctacctgagtatcccttaacctagtcaggttgacatctaaaactaatcatcgcaaaatcctaaccaagtctcaaaggtgcctcaaattcaacttgtctaagatggagctcaagatcaatcttatctcctcttccagtgttctccatatctgtgaatccctgcaccatccatccatttatccaaggctgaacagtggcatcatccttgaagctgcttcatcgccccttcacatccaactcatcaccaagtcctattgattttgctcctacatttctctgcagccttcttagatctctttttcttcactctcaccctagtccacactccagctccattctctcttgcccagatgactgcactggctcccaggccagtcccaccatagctctgttgagacttctccattttgatctgcactttagcagccaaagtgagttttataaaatgcaattttgaccagtgttctatggtcctaaactttccactatggtccataaaatcctacatggtcctgccccttctattcgctctagtggatctcactccactcctttattctctaaactctgagtttcttttctttttgtggtaaaatgtacataaccatttttaagtgtgcagatctgtggcatttggtacattcacattgttgtgtgatcatcactactatccatttccagaactgtttcatcttctccagctgaaattctgtacctattaagcactaactttccatttccccctttctgggtttcttttcatccctcaaaggagctctgctgccttccacagagttcttatatacatgctaatctctccatctgaaacacacttcctctcccctttgcctagttagcctcctgtgattcccaacaccagcctagaagcttctgtaaattctcccaaaacccctgctcctccctgaagagcagtttgtatttatacaggtgtttgattgtttgaagggtgctctcaccctgcctcctctcttaacatagtttttcgtgtcaggaattcctcgctttgtccacaacccctggcacatagcaggtgctcaatacttgctaaatgaataaatggacggactctgctacctacctaatctccttccagccagtcatccatctgtgggtgcctcggtccccagcttggggtgtgtccccctgggtcggactttggcgccccatccaggctggcagtaggttgtgctctttggtttgcctatctcgggcctcccgcccagccgcgcggaccgcagaacatacgccccgggcgttatcactctgtcacgcggagcctccccgcctccagacgtcagtccggttgctaccccggcaggaatcgagcttagatcacgaaggctccttctcacctccggacgtgagaattacaggcttggatctcaaaccgccgcggtgagagccgggaggtgggaagaaagttgggaggcgcgcgcccccgtcacactccctctccgtttgggtcgcagccctttaagaaccactacgttcgcgccttcgccgggacgggggctgtggaggcgcgccgggattggtcggtttgggtgcgggtgtcgcttagcagcagcgaatgcggggtaggggggaggtggggtggctcaagactcgcgcacgcgcaccacggcctacctgcgcctgggctgccggtgacctgggccgagccctcccggtcggctaagattgctgaggaggcggcgggtagctggcaggcgccgacttccgaaggccgccgtccgggcgaggtgagggctggcgggcg

SEQ ID NO: 29343 - DNA, 2300 bp, Homo sapien
tctggaccatctcatgttattgtcattcctcacttgtctaaacaggaatagggctgagtggaactacggaagacctgtatcctgctcctgatgtttccttttctgcccactctgtgtctctgaaagctttggggaattttcctgaggaggaagcctgatgtggagttaacagtgcaggcttggtaaccaggaagccctgagtccgccccagctcaggtgttacctcacttctctcaccgggtttacctctctgtgaaatgggatgaaagcaggccgggcacagtagctcacacctgtaatcccagcacttttggaggccgaagcgggcggatcacgaggtcaggagttcaagactagcctgaccaatatggtgaaaccccatgtctactaaagatacaaaaaaaaaaattagccgggtgtggtggcaggcacctgtaattccagctactcagcaggctgaggcaggagaatcgcttgaacccgggaggcagaggttgcagtgagccgagatcacaccactgcactccagcctgggtgacagagcgagactctgtctcaaaaaaaaaagaaaaaagaaatgggatgaaagctgccttttcacaggtttgaataaagggattgtggagagaaagcccagtaaagcagatgagcttgctcaggatcagggccaccactcaggggaataaagctctagggacctcccctttttaggagtgtaggttcccaagatctccctcctaaatgaagtggccgctgctcactccagggaaaacgaatcttgttaccacatccaccacggatggctagaacaggggaccggtaccgcatagcaggaggtgagcagagggcggataagcattaccgccgagcattctgccccctcagatcagcgggggcattaggatcagcgggagcattagattctcacaggagcgtgaaccctattgtgaactggacttgcaagagatctaggttgcgcgctcctaatgagaatctaatgcctgctgatgtgaggtaaaagagtttcataccaaaaccacccccacctccgtggaagacaagaaaaattgtcttccacgaaaccaattcctggtgccaaaaaggctggggaccactggtctagaagactacaaccaattcagttgcagtggtcaccaggagtaaccatgtggcccaagaaggtatgtccagcttcctccttgcatcttgcggcacaacacctttgcggtatggtgcctgggcagtcccgggttgttaagggtgagagttctaaagccaggctgcccgtattcagagactggctttgctaaggaaccttgggcaagttacttaacctgtttcgtcatctgtaaaatggagaaaataccagtgctttttagggttgccaacctaataagcattattcctgccccaaataagtccaggctatgtggaaaaacgcgaatttctcgttcagcaaagagtaaagctaataccagagttttcctggcctgcagatttggcctggcaggagacaatgccatagccaatgttcatgctccagatgcagacctggaggcacagagtgatgtagagaggacaatggatctgaagccatgtatctgggtgccagacacgctgggtgaagccgagcaaaccgctcctgcagatagattgagtatgcacacccagcactttgggaggccgaggcgggcggatcacgaggtcaggagaccgagaccatcctggctaatatggtgaaaccccgtctctactaatacaaaaaattagacgggcgtggtggcgggcgcctgtagtcccaggaggcggagcttgcagtgagctgagatgcgccactgcactccagcctgggcgacagagcgagactccatctcaaaaaaaaaaaaagcatgcacagcctaacactggaggtgctgacgccaggtaggtcagcagtagacccagccccaacccacaagtttcgctctccagactgcgcaagcgcaaaggatacgaaaacgcccccggcgttctgggggctgggaccgaggaaagcgctgagtatagctcttgcgcgtccagtcacaaatgacgtcccttctgtaccccgccctgtaggcgggagcatccaatcaacttcgagagcgtaggccccacctatcgtgggtcgagttgcttggcggtcgtggttccggaggttcctcgggatgtcggtggccttcgtaccggactggctgaggggcaaggcggaagtcaatcaagagactatccagcgggtgagcatccacgcgggcgggcgggcgggcggagagaagtcggga

SEQ ID NO: 29344 - DNA, 2300 bp, Homo sapien
agacggcgtttcatcatgttggccaggctggtctcgaactcctgacctcatgtgatccacccgcctcagcctcccagagtgcagggattacaggtgtgagccaccgcacctagcctacaagaacaaatattacatgattttactcacatatgagtagacaaatactagagtagacaaatttacagagagaaagtagaagggtggctgccaggaacttgggaaaagagggaaatggggagttactgtttaataatacagagtttcagttttgcaagatggaaaatgttctgtggacggatgggaggtactgagggttgtacaaccgtgtgaaatacagttaatgccagcgaactgtacacttaaaaatggttaaaatggcaactttcacataatgtgtatatatatctatagatctatagatatctagatatctgtagatctatagatctatagatagattttttttgtttgagacggagtctcgctctgtcacccaggctggaatgcagtggaccgatctcggctcactgcaagctctgcctcccaggttcacgccattcttctgcctcagcctcccgagtagctgggactacgggcgaccgccaccacgcccggctaattttttgtatttttagtagagaaagggtttcaccgtgttagccaggatggtctcgatctcctgacctcgtgatccgcctgcctcggcctcccaaagtgctgggattacaggcatgagccaccacgcccgcccatgtaatgtgtattttatagtttaaaaaaaaaacttataaaatagtgtggtactcagacacagatcattggaacaaaaatccagaaacagacccacacatatatggtcacaaggcgaaggtaattcaatgtataagagtcttttcaggccgggcgcggtggctcacgcctgtaatcccagcactttgggaggccgaggcgggcggatcacgaggtcaggagatcgagaccatcccggctaaaacggtgaaaccccgtctctactaaaaatacaaaaaattagccgggcgtagtggcgggcgcctgtagtcccagctacttgggaggctgaggcaggagaatggcgtgaacccgggaggcggagcttgcagtgagccgagatcccgccactgcactccagcctgggcgacagagcgagactccgtctcaaaaaaaaaaaaaagagtcttttcaacaaacggtaatggaacgactgtatatcccaataggaaaatgttgacacttacttgacaacataagcaaaaattaatgatattagatcatatcatagacttacacgttaaagactatgtaaaacatatatgagaacacagaatatcttcaagaacttgaggtaggcagagatttcctagcacaggaaaagcacaaaccattaaaatataaaactgaccaattgacttaatcagaattaaaaacttctttgccaaaaacgtcaaaacaatgaaacgacaggcccagattgggaaaaagacttcgcaatcatttatgtaacaaaagattttcattcagagcatacatatatctaacaaaacatttgtatccagaactgttaaacacgaaggaccagatttaaaaacgggcagaagactggaactgaaacttcacaaaagatgcagaatggtcagtaagcacaggacaaaaacggtgccagtgacgctggtgccaaagcgggaaggaacgcattcttcagcctaaaagacctaacagtaggacacggacataaccactcccggccaaaaagaacacagagcaacacaacgtcttggctaacgaaaactcaaagcctcaattcactcagttccttcacagcgctcggaaacagagaagtctcgcggtatcggaaaatgcgcggcgctcacagccacacctgacgagatggagggcgcaggcgcatccacggctttcagattgggcgactgacttcaaaggggggggcaaacagggaacgcgcaggtataggagcgctggctggaggctcctcgagagctccccagacacgcccccgtgcgtacgcccccgtgcgtacgcccccgctgccgccaccttcggttgaccacccccatctagactgtactctcgcggtatttgtcccgactctcgcggggtttagcgtggcattgggaggcccggcctgggggaggagacggcgttccgttagcggcgttggggtttggctgcagtggcagtgctttctcttctgctcacggggacccgctcaggctggaggccagccaggtgaagagctcgcccgcatgcgtgcgcgctgcgtg

SEQ ID NO: 29345 - DNA, 2300 bp, Homo sapien
ttgcccaggctggtctcaaactcctgggttcaagcaatcctcctgcctgggcctccctaagtactgggattactggtatgagccaccatgcttggtcatacttctactcttcagcaatctactatttttcttttcttttctttttttttttttttgagacagggtctcactccgtcacccaggctgacatgcagtggtataatctctactcactgcaacctctgcttcccaggctcaagcagtccttcagtctcagcctcccaaatagctgggactacaggcaaaaactaagagagccaccatgcccagctaatttttttattttttgtagagatggggtttcgccatgtaggccaggctggtctcgaactcctgacctcaaaatgatacacccgcgtctgcctcccaaagtgctgggattacaggcgtgagctatttttaattcttaatagaaaataaccctgttatctaaagcatggattcactacaaaataaagattaaggtccatcaaggctttctagtaacacttatttaaaaaaaaaaaaaaaaaagatcaatcaaggctaaaaacattaaaaagagagagaaggcaaccaaatttccaggattatctcatccctttgctcgaaaccctttaatatcttcctacctcactgagtcagtcctacaggccatttcttactattctctttcctcttctactccagccacactgggcaccctgctgtccctcaaacatgcaagtacagtcctccattgtttaataaccaggacggattctgagaaatgtgtaattaggcaatttcgtcattgtgtgaacatcatggaatgtatttaaacacacctagatggtacggcctactacacacctaagctatatagtctatttgctcctaggctacaaacctgtacaggatgttactccactgaataccgtaggcaactttaacacaatgaagtatttgtatatctaaacacagctaaacattaaaaagttaccaaaaaaaggtattatatataagaccattgttaaagatagaaatgtcatttggcgcctgactgtatactactcctcacctcagggctgtgctgtttccctctaccacgaatgctcttcttaaatacggctcacttcatctccttctgatacctgcttaaatctcatcttctcaaaatggccttgtctgaccaacttattaaaatagtatcccaactacaagtcactgttatttttttcctagttgtccgtcttccccccaatagaatataaactataaaaggaagaggcctttgttttatgcgctgctctatctccagaccctagaacagtagcaggctctcataagaatatgcagaacaagatgttgcacaaagacaacacatatatatatgtctccaattaaaacttttgtcacggataacaaaaaaagctaagaaaacagtttgaaaccctgcacgctctgctacttagaatgaaataactatgctttagaaggaaatgtttcatttaaaaaaaatacactaacaaatgtctggattccctaaagacaaacattaatgctaagtgcatgcatgctgcaattctgctggtacaaaatgctctggtttatcacaaaagatcttcactaagccattttcccaggaaccacgaaattctagctaaagattcttaaggaaaaatagaggcaaaattaacatattagtgatatatcgtgattaggaaacacacaatatttcctactagttgaaacttcatagcaccaagcaagataaccggaaatcggatcgggagtgtctgcctcacggagacactgggagagaaaaagtcctcaaagaactgcacctccttttcttggcgccaggctggctacgaggactcagtccggagatgcagcggggtgtgtggggtttggcaggaagaggcccggactgcgagttaggggtgtgcccaggccaccttcctctcccactgattttctctcaagagaaaacggaaagttgcctgcgcctcctacccgctcccaaaaaggccgggggagggttgctgagggtagacccctccccttcgccaaggcaggcctcggccccagcagcgctccccagtttccagctcacccggctcccggttgatctcgatgtcgaagtggcactgcggccggtcctgcgcccccatcgcgaccgaggtggcggcaagagctgggagagagggggagaaaagcggtcagggcaggggcgagggcgggggcgagggcaggggcgagggcggggctgagacgaagtccgcgccacggtgcctcac

SEQ ID NO: 29346 - DNA, 2300 bp, Homo sapien
tggaagaataatggactcgtgaaattagttttgtgaattaaaaaaaaaaaagagttacttatactgacttttatatgaaatcagggaagcatttcttaaggggaagagattagaaaggaatgatctcaaaaatgaaaaagagagtaagaatctacgttatataatggaatcttctctatacattttaatttataaaataatagcacacattcaaaactgatttggtagaattttatgaatttcactactttgaaaaaatttagtattccaaattttacaataaattttaaataaatagaaaaaatggggagggaaacatctataatgttactttaaaattagaacaaactggccgggtgcggtggctcaagcctgtaatcccagcactttgggaggccgaggcaggtggatcacctgaggtcaggagttcaagactagcctcgccaacatggtgaaaccccgtctctactaaaaatacaaaaattagccgggcgtagtggcaggcgcctgtaatcccagctactcaggaggctgaggcaagagaatcacttgaacccgggaggcggagcttgcaatgagccaagattgcgccattgcactccagcctgggggacaagagccagactttgtctcaaaaaaaaaaaaaaaaaaattagaacacactgaaattttaaattcttacttggatacacatatgcaatttttgcactaactccttgattttgttatttatttatttgggacggagtctgactcttgtctcaaaaacaggctggagtgcggtagtgtgatctcagctcactgcaacctccacctcccagattcaagtgattctcctgcctcagcctcctgagtagctgggactacaggcctgtgccaccacacctggctaatttttgtatttttttttttagaggcagaatttcaccctgttggccaagctgatttcaaactcctgacctcaagtgatctgcctcggcctcccaaaatgttgggattacaggcgtgtgccattgcgcctgacctcattctttgactagagtgataagtgtgtctagtattatgtcctatagcatgtagagtctgtaccacacaattttacatttacatgctgctttggattatttattttggtttgcgtgcatgtgtgtatgttaaattatcatgtcatctatttcttatatctcttccagtgcctagcacacaggaaagatttgacacaggattaattggtttgttctttccatggaaggatgtataaataattaaacttcatttcttttttttttttttttttccaggagagaaaggccttgggaaaacaactgggaagaagttatgttataaaggttctacgttccatcgtgtggttaaaaactttatgattcagggtggggacttcagtgaaggtagagctaaaagttgtgttcctaataactccatctatcagtttttaaagtatttcattattacttttagttctaaatattgtgtcagttacagtatgatataaaatgtggtcagtgaatacttgttggatgagtgaatattataggtccagaatgtatgaaaaagcaaagtaccacgtaagacattttattttgtttttatgcagtttattttattaatattatagttacttagtgaattcctttacaatgaatgccaaagtactgtctgattgcttttgttctggaatgtttttggtgttattactgtttgaaataagtaggttgtgaagatgacttttttgatggtatttcttgtaatgggacttgacatatattttacagatgaagttaattgaggactctgagaattttgattattgcagcagttataacattccaaggtttccttcagcgaattgaagctatcaaaaatgatttctgtgttagtatatttttaatgttcattatggcttaaagtaggtgattatttgcaggtaatggaaaaggtggagaatcaatttatggtggatattttaaaggtaaggcttaatattttacggtcttttgtttcagttctgatattaaagcaagtttgatcatatacttttaatgagaagaggtttacttatagttcactttttgcatgaaactaatgctgcatgaaaatactttatttgcatgaatttggggataaattatattgtaatatataatttttaattgacaagattaattaaggctaactttatggttaaacatgactttcagcatggaggttaggcaactatatacatgaaaactcctatcttcctgcctaaaactgtcaacatattcttttgtttatagaga

SEQ ID NO: 29347 - DNA, 2300 bp, Homo sapien
ggatcagcgcctagtgggtagctttgaacttccctgccagcccactggccacatgctgtgcgagttgagttgcattgcctgtatttttctggcattgcccactctgctctccctcttccccaggctcagctacacacagctccatgccctccgggctgactcagtcctgcattgttcccacacacatacgcatacccacaacctgggctgttctttctaacttcagtggggttgaatctggtttccccaactaagcctggggacactccagcactgagggtagatacttagggaaattgagagaaaacccatgagctgtcttctagaggcaggggcatagctttgctgaccttgtcaggacccaatcccaaatatgtgaaggatcactaagctctgcccttgctgggtgagcgtctccagactcctgactcacccctggggcatgcatttctggcccaggagtcaactccccaataactcagtccctccctccagaaagcctgccttgacctccctgaagtgaagctcctactgcatgcccctcatcaggaccaagagagaaattctgcctctgcctagctccacctgttcactcccaccaaccagacaactcctgatcgataggaatcttgactccactacaccaaatcccctctagttccctgcagatgctaaattgtctccacctcctggcctttgcaggctttctgtctggaaagccctttcactccctcattgctctagttaatgttcaagttcaagcctcagctctgagcagccctgtgggcccaccagacagctcttcaaaccactccttcctgccaggtccagtgttgccaggtgcccacagctgctcacagagctcaggctctgccctgggactccccagctgatgagctgcaggccagagaagcaagaggggaacagccgaggccttcagggagactgagtgcctccccaccacctgtcccctcccttctcacccaacctccagccctttctgcagcttgactgctggagctaaggccccagcaaggccccatagggccagcatcactacctcagtcacgctggccacaccctctgtcaagctttggcttggcagtgggcctagcaatgtcccatgcagctctctctgccaggcttcttccagcccgtggaggggtcccttctccccacctccccttcccctggctcctgatgctgatgcctaagtgatttgtcccgctctgagcctcagagtccttatccaaccaatgggcacacagcccctccctaactaactcctgggccggtgctaggatccactgtgagtcagatgaggaagtgggctggggaggaagaggcagaaggcagccctcagcgggctagctggtcagaagcatgtaagctgctctggcctggccttaacctggggcctctgggagctgggccagctgtctgtgcacccatgcaggtacaggatgtctgcagcagctgccaggggcttccagatgccccaggtttggcccctgagacattttctccctagctctgggatagccttatcctgaggccctacgtattctggcagagagtgggggtgggggaggaggcccttgcaatcttacaggacagaccatcaggctgtttcacagcacctgcctaataccctggtctctcctccatttctcctctggcacctagaaccaagtcaccctgagccagcgccagagttcctgcccactcgtgagtaggacaacatacccaggagatactgctgcagctggacatggacttgtatgtaaacacaagcgcacatatgtggggaggggtgtggaatatcaggatgggggcaacatgagagtgacccaggatgggcagtagtgagcttggggtaggaggaggggatgtccacagaggcctctcctctacaatggtggcccagtcaccatccagaccttgccaggtctagtgccccgtggtccccaccctgctgcctgctcagcctggcagccttcctttacagcctcctgccaacagagccagccccctgcccccacgggtgtccatgccagagcagcattccgcaagcctggctgcatctccccagcagaggctgagcaagggggccactcagcagtggtcaggtcacacggctagaggggcacagtggggcctgggcctctggtccctactcctctggtccctctgtctcctggccctgggccagtcaccttagatgatttgatcgctgcggttgtagtcctgggatttaaatctcctgccctgggtggccctatgcagcatgaggccgccag

SEQ ID NO: 29348 - DNA, 2300 bp, Homo sapien
cccagatggtgtggcctctaaggcagggctttcccagagcctgtggacatggaccgtacctgacctggggtctgggggtctaccgggaaaaggatctggggcaggccttgggggcctcctgcctgcaagcatggtaggcaggttccacagctgtgtccttccacccctgcagagcccctgagtgagagagagctgctgggggctaggcctgaggctgcaggcaggggttgggggcagcctggcccaagccctggctgtgatgaggagacctcaccaggcagtgcagcaggaccagagtggggagaaggtataggccctgagcctggatttcttcacaggtttcaacttctgcagcagccacatggctgttgcgatgaggggttccctcaggtgctaccccttggattctgtagccagagactgggcagtgagcagtgagcccggcttctgttcttgaggtgtttggggctgggcaagcttgcttttattggtatgtgtgagtgaatatgtggagagaatccacggggctgaggaaatgctgaaggaatgcctgtggccctcctggggtgaccacctggtcccggtgtgcctgcgatggtcctggttctagcactgaaagccctgcaccccagaaaatgcccaggtccctggcaaacctggatggttggtcactgtggtctctctttcatcccctttccttccctttcccttcctgggatgacttttcccatttcccaggagatgacccagaggcccagaaagtgacaggacctgatcttcagcctcagagggtcacgagtggagcctgagctctgaggcagctcactcaggcttgaatcccttccttgctagtttcggctctgttgctgtaaagtggagccacgagtgatgggctgcctcctggatggctggcaatgctgggagtggtgctgggggaagggcgggcaggggcccactggccttgacccactcctgtgccctctgtccccgcagttgctggttgagaagacaactgactccccggcggctgagttctcgctggtggaggacgtggcgctgcactttgcctgcttgatgggccgcctgaacgagcagcgcctcttccagcctgacctctgcgacgtggacttggtgctggtgccccagcgcagcgtctttccggcacacaagggtgtgctagccgcctacagccagttcttccactcactcttcacccagaacaagcagctgcagcgtgtggagctgtccctggaggcactggcacctggtggcctgcagcagatcctcaacttcatctatacgtccaagctgctggtcaacgcggccaacgtccacgaggtgctcagcgccgcctcattgctgcagatggctgacatcgctgcgtcctgccaagagctgctggacgcccgctctctaggcccaccaggtccgggcactgtggccctggcccagccggctgccagctgcactccagctgcgccgccctactactgtgacatcaagcaggaggccgacaccccaggcctgcccaagatctatgcccgcgagggccctgacccttactcggtgcgtgttgaggacggggcagggactgctggtggcacagtgcctgccaccattgggccagcccagcccttctttaaggaggagaaggagggtggtgtcgaggaggccggtgggcccccagccagcttgtgcaagctggagggtggagaagagttggaggaagagcttgggggttctggcacctacagccgcagggagcaatcccagatcatcgtggaggtgaacctcaacaaccagacactgcacgtgtccacggggccagaggggaagccaggtgccgggccaagcccagccaccgtggttctgggccgggaggacgggctgcagagacactcggacgaggaggaggaggacgacgaggaggaggaggaggaagaagaggaagaggaaggtggtggcagtggacgggaggaggaggaggaggaagagggtggcagtcagggagaagaggaagaagaggaggaggacgggcacagtgagcaggaagaggaagaggaggaggaagaggaggaagggcctagtgagcaggatcaagagagctctgaggaggaggagggggaggagggggaggctgggggcaagcaggggccacggggaagccgaagcagccgggcagacccccctccccacagtcacatggccacacggtcccgggagaacgcccggcgccggggtacccctgaacctgaagaagctgggcggcggggtgggaagaggccaaagccaccccctgg

SEQ ID NO: 29349 - DNA, 2300 bp, Homo sapien
gggaagggttcccacagtctttgtaagagggcagatctgcttcaaatcctggcgcagcccatgtccgctgtgtgacttggccaaggtgcctagcctctcaagcctcgtctcctcactggctgtgcttgctagcaatgccctgcagtccagggctgggctggaagctcaccacctgccctccctgagtgagcccttgccttttcagcaagagggacaggaccacctccagagcttgctcaggtgctgtgtccctctgggacctgctggtggggtgagcaagtgatgatcagatgcaccatttaaaagggacagaggccaggcgcggtggctcacgcctgtaatcccagcactttgggaggccgaggcgggcggatcacctgaggtcggaagtttaagaccagcctggccaacatggtgaaacctcgtctctactaaaaatccaaaaaaaaaaaaaaaaaaaaaaaattagccgggagtggtggtcagcgcctgtaatcctagctactaggaaggcttaggcaggagaattgcttgaaccctggaggcggaggttgcagtgagctgagattgcgccattgcactccagcctgagcaacaagagcgaaactccgtctaaaaacaaaagggacagagagtgatattgctgagatcacaaaagggaggtgactcagtcctagcccagcctgctgtcatctctcctatacccaccccctcccccactcccccgcctgacgttataaacaagtgactcagaggaatgatgggggtgtgtctcataatagttcattccaatgtcctgggggctaaatttaacacacagctgcagcctctggcactttgggaacaagttaatcttggtgactgaggctgatgtgtgtgtgtgtgtgtgtgtgtgtgtgtctggtggtggggcggggtggggagggtgtggggaggggtgtcagtagtctagaacaaggtaggcatcaagactggctgtcctgggcttcaaccctggtccctcagaccatagacaaggtgcaggggccccatggccaggcagtctcaggtctggcctaatatgcaccaagaatagtgagtatagatagctaaagtcctgaaatattaaacttgtagtgttactttttgaacactagaattcagaatgtcactccctagaatgttaaaaccccgggggtttaaaaacctagaatagtagaatcctaagaaattaatttgctagcacatctgacaccttagaagtgttaaaactaatagtgtactcccaggacacagtaccttggtgcttctaaacttccagcagagttgaactgaggtccttagcatctaactttgccacctcctcattgtgtaggaagggaaactgtggcttaacagagcgacatgccctgccccaggcctcataggaaagtggcaaccttgtttacctaaggtaccttcttgctttcttgcaaggaggagggacagaaagaggaaaagctcttcccattttaaaggtgaggcaacgggggtggtgtcttatgtctgtaatctcagctacgagggaggctgaggcagaagaatggcttgatcccaggagttcaagtccaggctggacaacatagtgagaccctgcctcttaaaataaaggcagggcaacagggccgccaaaaagtgaacaccatgtccaacttctgaccagaaaacccaagcaccctgtatccaggggtagctggagtgagacatattccgggggggaagatggaggcaccaggacagaagttcccagaaagcatgaaggaagggagaccctggaagagaggctccagtgctttcccgtctctggactgagggtcagagcttaggccaccttctcccctaggggcatctcctgaccaaagaatccagagtcaagacctctccgtgctccatttagaaatgaggcagccaggccctcatctttcagaagggcccagacaccccacccccgtcccataagcccccggggctgagtcaagtctttctctgggagggggcctctgcccagctgtcccctgtgcgtcatgtgcaggaggccaggcggctcgccttacagggacccggccacctctatatatagcccctcgaagacagctgctcagtctaagcaaaccccagcaggaaagcaggggtacagagaggagcccccttggcaccgccaccgcaccctaggccacccaccatggcgctgggcttggagcaggcggaggagcagcggttgtaccagcagacgctcctgcaagacgggctcaaagacatgctggaccatggcaagttcctcg

SEQ ID NO: 29350 - DNA, 2300 bp, Homo sapien
cccctagatagcacagacacatacagctgcccgagacttggcctcaaccgaaggggcactgtcagaggttcttaatctcaggggcaccttcaggatgcccctcccctcaggtatccagggctgaggccttggatgctcccttccagaatgagggccctgtcctaccaggactcccagttggttaggaacacacctgtcttcctgtctgcctccactctgccaccgagaggataccagccattccaagtacccacaagccttgccaagtgaccctgctagcacccctccatccaggacactccctatgggacagggctgacttatggggatccctctcagccacatgtcccatgccagttccagtcccatcaggcaagtcagccctccctcaggcactgatgcatggccagccaggactcacggcataatgaaaaggaccaggtcatggggcgagacaagtctgccctgggatagcccttaggaggtcatatgtaaaggtaggagctggagtccctggagcccaagcatgaaagtgtttgcatgttgtgactgtgtgtgtctgtggtgggggcagggcttacaagcctggagaggctggtgggaccaccaggagtcttcctggaagagggaagtcctgggtagcagtgagagagaggcacaggctctctaggagccaggggaggcaggctgaagagaggcccaggtgtccctgtctgagcctatgctactggacaccctccccccacccagcacccgccccccttcaaggatcctccctgcggctccctgtggccagcagctctgcagcactcggctctgctccactctgctcagctccgctccaggaaggccacctcctcctccccctcctcctcccgctgtcaccactcaccgctcataacctcaagggggtggggaccccagggctggacacaccccaccgtggccccagagctcagccggtcgcacggacggacagttggaagccggaccccagagcctgaggtgggcagtgtgccagggtcccttgcggcctcctcaaggtcagtgccagctggggatgcagctactctggggctcttgagacttgtggggcacaccccaggccctcatcccaaatcacaggccccaaaaggggctttacccccggggcatctggggcaggcaggaccaggggaaagggtatgcccccgtgtccacaggccagccctggtctgggggtctatcaggagaggccccaggctgggggccagctccttgcagaggcctcactggggacaccccgcaccggccatggggagctaaaattggaaagtggcgagtgggaggcagctgacaaagctatttcacgggctcttcaccatgctccggtttcaagctcctgctccattaacctgatccccagggcctctccacccccacccaactgatgaggaggtgcctccaccctcaggccgacagcacagccatcaggctggcagcctctgctgtgggcaggggcagtggtggtcttctcttaccccagattccagaggggggtcactgagaaacccaatcctgaagggaggcaggcagaagtctgtcccaggtctgccatgtgaccttgacaggtccctgcccctatctggcccatgacccctccatctgtacgaggagaccgtcggctgctggggggcccaggggagatggctacagggctggggatgaagatttaggggaggatcaagggtgggcaaaagggccacatcagccacctcttggccccgtcagcccaagagttgcctggacatgttccctgcttcctccctttaatttgggtcctatgtctgtatccatggagtccttgggaagcccctgagccaggctgaagcgggataggaagggtaaaggtgctagctgagccgtagtacggcccagcagttctccaggggacaagctaggcccccgctggagggagtggtgagactcagccggggcctgattctggtcagcaccttggacagcagccagtgccctccctggccccgcctggccccgcctggccccacatccgctactcctgggcacctcctcaaatagcacagcctccagctggtgcccagggcctgaatacacagagcgctgagagagtggggcagtgtggtcacggacacaggcagggactgggatgtgacaggctggagctcagggacttgttgggggaatgggggtcagtgacaggctggaggcttaatgcgaggatggaggcttggctctaggggcagcacctggggtggtcatgggatctcagggaggggagt

SEQ ID NO: 29351 - DNA, 2300 bp, Homo sapien
cccccctcagacacagtggagctggcctcaggctgtccaaccacagatccatgggacttccctagccctccacccctcttgccatttccgcacaccacactccctgcagaccctgctgtgtgtgggtcacccagggaaggcctcacttctgagtgtgaatccagcctttctgggcctctgggggtcagggtgtctgtggctctctaatagcctctgtttatgagcaaggctcttgtcatggagtgaatcaccggatgccccctgccaccccagtgagggccagggccagcggtatgcccattttacaactgaggatctgaggccctaagaagtgggtcacaccagctcagggtcaagtaaattggctgaacctgtgttcttaactctggggtcaaaccaccctgtctgctcccttgagccattttcttggagcctcgtgagggccccagtgtgggtgcacggggttgtcgcccctgcagggcagtcagtgccaggagcttacagggctgatccaactacttggcttcctcatgtgccaggtccttcttctcccaactgcgtacagtggcaacatcttccctatgggctgtggtgacattaaaaagttaatccatgtacatcctggctactatgattaacttactcctaacaacctttgactacccctccctgaggaagccctccttaaccctgaagtctggctcaggtatccttcccttcctgatgctggcctctctagtgcccattacccaccacagctctaacccagcacccacactgtgcagtagtcaccattcatgcttctcagggtcggggaccacagacacgggcctctgtgtcctgtgtggagtgtgtaggttgggcgtctccttgctgttctccaggccagcgtgtctatgtgctcgggaggcagctccctgcctaagtgcagtctctccccttcctgggccctgatgggtggggagcagcacctccctcctgcctcctcaactgagcctgaagctggggtcataggatcagcaggggctccaggagctgtcctgtgactgatcacagccacaaagctccttctacccccgagagcctccccacaagcacacaggtgaacaggtccccctagatagcacagacacatacagctgcccgagacttggcctcaaccgaaggggcactgtcagaggttcttaatctcaggggcaccttcaggatgcccctcccctcaggtatccagggctgaggccttggatgctcccttccagaatgagggccctgtcctaccaggactcccagttggttaggaacacacctgtcttcctgtctgcctccactctgccaccgagaggataccagccattccaagtacccacaagccttgccaagtgaccctgctagcacccctccatccaggacactccctatgggacagggctgacttatggggatccctctcagccacatgtcccatgccagttccagtcccatcaggcaagtcagccctccctcaggcactgatgcatggccagccaggactcacggcataatgaaaaggaccaggtcatggggcgagacaagtctgccctgggatagcccttaggaggtcatatgtaaaggtaggagctggagtccctggagcccaagcatgaaagtgtttgcatgttgtgactgtgtgtgtctgtggtgggggcagggcttacaagcctggagaggctggtgggaccaccaggagtcttcctggaagagggaagtcctgggtagcagtgagagagaggcacaggctctctaggagccaggggaggcaggctgaagagaggcccaggtgtccctgtctgagcctatgctactggacaccctccccccacccagcacccgccccccttcaaggatcctccctgcggctccctgtggccagcagctctgcagcactcggctctgctccactctgctcagctccgctccaggaaggccacctcctcctccccctcctcctcccgctgtcaccactcaccgctcataacctcaagggggtggggaccccagggctggacacaccccaccgtggccccagagctcagccggtcgcacggacggacagttggaagccggaccccagagcctgaggtgggcagtgtgccagggtcccttgcggcctcctcaaggtcagtgccagctggggatgcagctactctggggctcttgagacttgtggggcacaccccaggccctcatcccaaatcacaggccccaaaaggggctttacccccggggcatctggggcaggcaggaccaggggaaagggtatg

SEQ ID NO: 29352 - DNA, 2300 bp, Homo sapien
gacagtgacaaactcggtgagccggtcacgctccacctcggcagcctgccagagggccttgatctctgacacttgtgcctgccagcctttttgttctggggagtccgagaacctgggaccagggtggagggcagagggcagaggtcatccgaggcctagaaataacacttacccctgtgatggttggagggactagaaggacattcagggcgaatgtcagccagagcaaaggaagcaaacccagtccctctaggtcctcccctgctggcttctttgcccaccattcctggtcctgctgaagtccctaggctccaaagctgaacctaccagaactagagttacactggtacctctgtccatccaagccctgtgggggcctggaattagtctggtgctgtggcaggtggctcttggggacctggggtgccctgggtatctgtgtggcctttggggcctggctgccctacccagtgtcaggtgtgcccagtctctgtgtccctgccagtctctcccagccctcctgcatcttctggcttggtccccaagcccagcccactttcctggagcctgtgcatttggctttgtgacttgttcaattttctccagccctaagccaacccatcactgcttccctcttacctgctggctggagccaggacagaaggtaaactctgccccccaacttcaaccccccagagcccacatgtgagttccaagctgctctccgctgtgcccccacttttcccagtgagaccctgagcttacttttctagcagtacagggcatagggaaggctgcagagctgggcagtgtactgaaaactgggctggggcatgtgatcctgagggctgacttctcggtggtcttgggcaggtctcttcctctctcttggccccagttcccccactaaacattgagaggggtggtttagatgggctccgagaactgcagacccctctgtgactcctaaatatgctctaaggccttgctactacaagtggtctctgaatcggtggctctggcatctcctagcagcttgttagaaatgcagaatcccaggctttaccccagacctgctgaatcagaacccacacttgacctggctgatcagcaggggctctgtgtgtgcactgcagtttggaaagccccattcatttccccagttctagaatgtgggaagaggaggagcaggagcaaagggccgattcttcactctgccctcctcccaggcaccccaccagagtcacctgaagggaatgggttcaaaccatgccagcccgaatagacatactctctgggatcactctgccctgtgaattcctgtcctgtcacctgtgggaggggactgtaagctccatgagggtagggcccacacatggtcgagtttagtaagtatttgtgtgttgtggaagaaacaagcctgacaaccagcagtctgggcagccaaggcacagagcagctcctgtatttctgtgtggcacagaggtcacagccacacaggcctggaaggggctcgaaggggtcatcttgtccatcttcctgctctctttactgtgactaaaacctcagagaggcagagcctccccaatctccctgtgctgtgacaagacctcccaccctaaggagcgtggcacatgccttgtggctcagtgtcagcccactctccccaagtgcctttatgaccccagcctgatgggtggggcagctttggcccacagaccctatgctgccaagtgtcagcagcatgctgtcccccacttttcggggatagcagcccagagaaggaccagtttgcctggagccacagagatgagggactggggccacttggaggctttgcctggaacctgagctgacctgcctgaggggtcagggtggggagtgttgacagcaggagcatggctccagtggacagtgggcagggctcgggacagggcttagaggcaggacaacgctgtcctttgtctatgggctggcagtaggaacaaagggcccatttacaccctctggcttgattctgtcaacaaagagggggcccaaggtctgaggggatatcagtgggaacccatatcatgtgaaattctccccttagaggctgattctcaatgagcaagagaagatgagggaaggtgctagaagccaggcccaggaaggttcctcaggttaattctcacgtagcaggtaggaaccctagcctgggagtcagaggccaagattctagttctgaagctgcttactctatcatcttggacaggacttccctgatcctccctgtctttatgtaaccttggaagagtccc

SEQ ID NO: 29353 - DNA, 2300 bp, Homo sapien
catggtgaaaccctgtctctactgaaaataaaaaaattagctgggcatgttggtgtgcacctgcagtcccagctactcggaaggctgaggcaggagaatcgcttgaacccgggaggtggaggttgcagtaagctgagatcactccactgcactccagcctgggctacagagaaagactcaaaaaataaaaaaaaataaaaaacaagaaaatgaaagaaaagagaagccatagagactggaagaaaacctgccagacacatatttgacaaaggactacatccaacatatacaaagaattctgataacttaataataagaaaataccccagttaaaaagtgggcaaggccgggcatggtggctcatgcctgtaatcccagcactttgggaggctgaggtgggtggatcacctgaggttgggagttccagaccagtctggccaacatggttaaaccctgtgtcgactaaaaatataaaaattagctgggcgtggtggcaggagcctgtaatcccagctactcaggaggctgaggcaggagaattgcttgaacctgggaggtggaggttgcagtgagccgagatcatgccattgcactccagtctgggcaacaagagtgaaacgccgtttcaaaaaaagaaaaaaaagaaaagtgggcaaaagatctgaacaaactcctcaacaaaaaagaaatatggatggcaaatagacatatgaaaagatgttcagcatcatatgtaatcaggaaattgcaaattaaaacaaaaatgagataccattacatacctattagaatggctagaatccaaaacattgacaacatcaaatgatggcaagaatgtgaagcaacaagaatttctatttattgctggtggggatgcaaaatggaaaagccactttgcaagacaattgggtagtctttttcaaagctaaacagtcttgccatatgatccagtgatcatatttacctaaatgagtttaacaatatatccacacaaaaacctgcacatgaaatgttcatagtgagaggtgacagcatgctggcagccctcgcagccctcgctcactctgggcacctcctcggccttggcgcccactctggcggtgcttgaggagcccttcagcctgctgctgcactgtgggagaccctctctgggctggccaaggccggagctggctccctcagcttgcaggcaggtgtggagtgagaggtgccggtgagaactggggctgcgcgcagcgcttgccggccagtgagggttctgggtgggtgtgggctccgcaggcccacactccaagcagccggctggccgcaagcccctggcagtgaggagcttagcacctgggccagcagctgctgtgctcaatttctcacggggccttagctgcctccccgcagggcagggctggggaccggcagcccgccatgcctgagcctccccctgccaccgtgggctcctgcgcgccccagcctccccaacgagcgccaccccctgctccgcagcacctggtcccatcaaaagcccaagggctgaggagtgcgggcacacagcgggactggccggcacctccgcctggggccctggtgcaggatccactgggtgaacctagctgggctcctgagtctagtggggacttggagaacctttgtgtctagctaagggattgtgagtgcaccaatcagcactctgtatctagctcaaggtttgtaaacacaccaatcagcaccctatgtctagctcagggtttgtgaatgcaccaatcggcactctgtatctagctaatctggtggggactttgagaatctttatgtctagctaagggattgtgaatacaccaatcggcactctgtatctagctcaaggtttgtaaatgcaccaattgacattctgtatctagttgatctagtggggaagtggaaaacttttgtgtctagctcagcaattgtaaatgcaccaatcagcaccctgtcaaaacggaccaatcagctctctgtaaaacagaccaatgggctctctgtaaaatggaccaatcagcaggatgtgggtggggccagataagagaataaaagcaggctgccccaggcagcagtggcaacctgctgaggtccccttccacactgttgaagctttgttcttttgctctttgcactaaatcttgctactgctcactctttgggtccacactgcttttatgagctgtaacactcaccgtgaaggtctgcagcttcactcctgaagccagcaagaccacgaacccaccaggaggaatgaacaactccagacgcaccaccctaagagctgt

SEQ ID NO: 29354 - DNA, 2300 bp, Homo sapien
tatttgatatcttgatggtcatggatacacaaactgacacgtgataaatcaaaagaaaagtacagttaaattggagaaatctaagaggagtaggttgtatcgatgtcaatatcctggttgtaatattatactaaagttctgcaaaatatcattgtggagaactggaaaagtatacaggggatctctattattttttacaactgcatgtgattctataaaaatctcaatataatttcaaattaaaaagcaaaaaacaaagggcagtgtcctacagatacttctggctagagaaacaaagtgggctggaattaacaaacatctgtatactgtacatgaggaaatactggtgacccagattggattcgccagcttcttggatgataaaatgtcaagcttataaactaaagaaaattctcaaaagaattttgggcagaaaaaaaaaatggcatgagagccttagtggtgaccgtggaaaagtaacaaacctagaggaaaatcatccctgctttttaaaaaatgggttactgcaaaaatgatatcctcgtcaaaaataatccttggattgctggagcaaatgttacccctttcccaaactttctaatacatacattctagaatgtcggttctgaaattctcttgcatccttaattttctcacagcatgttcttattttaatgaaaacctggctttctgctaggatccatgctttccagaagccctctaagtagacctggctattccttttcctatgccacatagtcccatcgtggtcatgaggcaaacgaatgatactccccactacacacaccatttaaaaaaaaccctaatcctttgaggctcacatctacctgaatcctactctttatcctgtctctctttgctgccacctgtatattatacgtctcccaccctcagctcaccaggcagcaattggagaccaacgggaaagatccatttttcctttatcaggaaacttcgggtttatacctgcagtgctgatggcagtctagtgccgtatcttatgtatgcatgtctatgggatgggtattcattcaccttatgaggaaaaaaaatagaaaaacaactgccaaggttttcaaattatgaagtcctggataaatatttgggcaggagctgtggctcacgcctgtaatcccggcactttaggaggccaaggtgggcggatcacctgaggtcaggagttcaagaccagcctggtcaacatggtgaaaccccgtctccactaaaaataaaaaaattagccaggtgtggtggcgggtgcctgtaatcccagctactcaggaggctgaggcaggagaatcgcttgaacctgggaaatggaggttgcaatgagctgagatcgcaccactgcactccagcctgggcgacacagcgagactctatcatagatagatagatagattagatagatagatagatagaaagaaatctcccttgaatcatctttcctagaaatttgcctcccacccccatattgccctgaaatatagtagtgtcttacattggaaggtgccatttaaaaaaaaaaaaacaagtattttcctttatgaaaataaacgatgttcattattttaaaaattctctaaagtgtaaaaataaaaacacagcactgctattccaccacccaaatataaccacttttaatatttctatttcggtcttgttttagtgcctagtttgaaataaacacaactttatttatttagcattgctatattgcgtcctgcttccttcactcaccatcataacatggcctttccccacactgttttacatttttcaaatatatctgaatggctactttaaatttcatggtgagatcgttcgctttttaactccccaacaggagagcggaatgggcatctctgtgcagaacgtttggtccacaaaacttttttaaaaatatactccagaagatttaaaatctccagcgcactcgagatcgtgctcgcttggatccagcccagcgcgccatcagcgcctctgtcactttcagaactcttggcgccccctcggcccccgtagagtagcgttgaaaacgcgcaagtgacgtcgcttgtttccctggtgacggttgccagggcagcgcgtgtcggcgtccggaggaggtgacctagccgccgcggtcctagaagggagaagtggagagagaccgctgtaagtgccggggagagcggaagggcccgggccggagctgggaaagcccgcagctgccgggggcgcggaaccgagcccgagcgcaaccccagcccgagcgcgctgccactggccgggcgctc

SEQ ID NO: 29355 - DNA, 2300 bp, Homo sapien
ataatttgagagtaacaaatcagatgaataatccaagccaatagccttattttacaggtggggaaagggttgtgagagggttatacgaattgctcagtacaaggaatacatgtctggtggggtaggattagaatccagctcttctgatagagagtcctgggttcttttgattgacgatatattgccaaagcatcaatcttacgctgctgatgtaaattagattaaattggcagataagaattctgattagaaaatttaagaatccattactcaacagaagcccacgttgttctctttgaatgatatatataaaaaaatcatgcctaaggtaaacggaatcttcttcagtgacttaactcatctaacaatttcaattgtgatttgaaaagacttttttcactacaccactgccagactttccttcattatcgttttctcatccacccacagtagttgtcccagatttctgtcagaaagttgaatagacgctaaaaaaggcaccagtaaccagatatttaaagtcagtttggagagcacaaattaattctgtacgcttagtaagacacgactgaagacctttccacagggaacctaaagaggcattaagggaagatgagccgtccagcatcaggagacgtaacaggttgaatgaaggatctttcttcacagtcattttgtcacgggaattactatctaaagcaacgctggcttcaaactgattttgcatcagtcgcccatcagcttgtttaaaatggctgccaaggccccagcatggagatccggattcaggtggtctggggcagagctcaaggaatctttaagaagccccttcaagtgactctggtgcacaaagagaactcctagtatacaggactccaaatatgtgtgtcatgctggagcttcatgaccaggttgtcaccgcttcaacctgttagaactttccatccaaacctgtcttactccaaagtgcctttgtacttccggaagcagggatccctgtcgtggggattactccgaagagggaaatagctgcttcccactccgggaatttaagacaaaggcgaatatcactgctgcatcatgtcggctgctcctaattctgcccttacgctgtgctttgtaatctctaacccgccgactcggcaggagaaaaatttaattcggtcacagaagcactacacaggaccctaggccttatcactttcccagggtggaggaaacaccaggtcggggagaaaagcaagaccaggactggaaggtcctctgctagtacgccctcccctcaacctcccgaccttcctcgccgcctctcttcctgtgaccttgtcgtgactccgtgaccggagcgctcgctctcctatcccgcctcgcctgccgcttagcccgctcttcagaatgttccaagctccggggaagctcccgctcctcgctccccgccgtcgggcccagtcaacaccctcctggcccccgtctctcattaccaccccatcagcgagtcttccccgctcggcaactcactccacaagcttctgctccatctcctcgctggctccgtctcccctcacccgaaggaccctaggcctcggctcccgactcctctcatccgcccatgctcgaggccgggcctgagccccggcaactccacctctcctccctcattcgagacacggactcccagcccccacccccaaagtcctttcggcctggccaagcgctgccccacttcttcccgccccgcggcccgagtccctggctcgcagtcccccggcttgtttcgcttacctagagcgagaaaacctctcacaccccaaccggcttccgatccctgcaggcgcacccagtcctcccggcttctccccacccacagccgtcccagccaatcagaggccagcggccgcaaaaggacgcgtgcgtgtgcgcggcgggtggggcagtgcagagcgggtcctggattggctgggccggtgagtgctggcccactaccccggctctagcgtactggcggagacagacgtgagagctcggcgcctggggttcgcgcccgggcacttgaggggctttggctcctggcccaaggactcctcagatttctcctgcccttttcccctcgggcagcggaggcgagcaccgcgaacgccgtgtcccgagcgccgccgcctgcggacgcctcacgggccgggaagggatgcgggtgaggggtttcggctgcgggtgaggttgtgttccccgacccacccgggtccgactgcttgttctcgccgttcagtaacgagatgcagacagactgggaaagaacggag

SEQ ID NO: 29356 - DNA, 2300 bp, Homo sapien
ataaaaatattttaccccaaaacatatttctttgccatatcttgaaatggccatacaaagctgtcctttgcggggaaaaattctcatctgtaaagaatccctataacatagctagatctttttcttccaggccccccaatcctaaagagattaaaagtctagcacctttcaaacatctgaataggaaacatttgtcatctattgtctctaaaggcagccactacaagacttcaaaagaaccttggtctccacaatcttttatcttaacttgaacattccctttctgttgatcccaggtcttcagacaaactcaaccaattatcaaccagaaaatgtttaaatttacctatagcctggaagccccctcccctctcgcctttgagttgtcccccgtttctggaccaaaccaatgtatttcttaaatgtatttgattgatgtctcatgcctctctaaaatgtataaaaccaagtgtgcctggaccaccttgggcacatgttctcaggacctcctgagggctgtgtcaggggccacggtcactcacatttggttcagaataaatctcttcaaatatcttagagtttgacttttttcgttgacccaccaattggccggattattactcattatttacttgacaaacacattaggagccctgtccccggaagctcgctgtcacgaggggcctctgacatctccttcttgagagaaaggtcgcctggcctgggtgaggtcgtagttcccgcgaccccgtgcttgcaagtactggctgcctcctactatagtgtaagctccaggaaggatcccgcgggggacctgacagctcacggtcctggccgacaaccgccctgggagcggaatggatggagcccgcagtcgtcccggcgcactgggcaagctctgctcccactgtggcaggccagatctccattagcaaccagagcagctctcaccaacgcctcactgtcattctgatgcatgtataagttaaacattggagaaactggtgccttaggagaaaggctagaatgtaaagacaagtccattaggatcccgcctgagctttttcaacccctagagtttaattaaaataatggagttgttcttgcacaccttgtaccaggacccactttagattatttccaaggctctgaagcaattgtctagacacctgaccctattaccgttaaagattggcttgagtgaaacactttggctttcgacttgtaaatgcactgaatgtatttaagcactagaaaaacttgtattaataattttgagttggtctggtgagttactccgaccttctccctgtaacctgttgcagaaataaactccgttctttcccagtctgtctgcatctcgttactgaacggcgagaacaagcagtcggacccgggtgggtcggggaacacaacctcacccgcagccgaaacccctcacccgcatcccttcccggcccgtgaggcgtccgcaggcggcggcgctcgggacacggcgttcgcggtgctcgcctccgctgcccgaggggaaaagggcaggagaaatctgaggagtccttgggccaggagccaaagcccctcaagtgcccgggcgcgaaccccaggcgccgagctctcacgtctgtctccgccagtacgctagagccggggtagtgggccagcactcaccggcccagccaatccaggacccgctctgcactgccccacccgccgcgcacacgcacgcgtccttttgcggccgctggcctctgattggctgggacggctgtgggtggggagaagccgggaggactgggtgcgcctgcagggatcggaagccggttggggtgtgagaggttttctcgctctaggtaagcgaaacaagccgggggactgcgagccagggactcgggccgcggggcgggaagaagtggggcagcgcttggccaggccgaaaggactttgggggtgggggctgggagtccgtgtctcgaatgagggaggagaggtggagttgccggggctcaggcccggcctcgagcatgggcggatgagaggagtcgggagccgaggcctagggtccttcgggtgaggggagacggagccagcgaggagatggagcagaagcttgtggagtgagttgccgagcggggaagactcgctgatggggtggtaatgagagacgggggccaggagggtgttgactgggcccgacggcggggagcgaggagcgggagcttccccggagcttggaacattctgaagagcgggctaagcggcaggcgaggcgggataggagagcgagcgctccggtcacggag

SEQ ID NO: 29357 - DNA, 2300 bp, Homo sapien
tttcttacatgtatcttaattatgagatgaacgattttcaaaatcctgagcccatgacatttagttcctatctgtatgacgagcacttggtagtctgccttgttttgtggttatatcaagaaactctaacttaatcacagatttctccatggtgcagttgtagatgctttgcatctgaggactaagctctgattttttttatcatgcccaaattcctatctaaggggtctggggagtcatgccccacaaataataagttatcatcaaatgggttttatttaactctatatatcgtgacttactttccaacttgactctggcataacattataagacaaggaagaaaataaaaatattttaccccaaaacatatttctttgccatatcttgaaatggccatacaaagctgtcctttgcggggaaaaattctcatctgtaaagaatccctataacatagctagatctttttcttccaggccccccaatcctaaagagattaaaagtctagcacctttcaaacatctgaataggaaacatttgtcatctattgtctctaaaggcagccactacaagacttcaaaagaaccttggtctccacaatcttttatcttaacttgaacattccctttctgttgatcccaggtcttcagacaaactcaaccaattatcaaccagaaaatgtttaaatttacctatagcctggaagccccctcccctctcgcctttgagttgtcccccgtttctggaccaaaccaatgtatttcttaaatgtatttgattgatgtctcatgcctctctaaaatgtataaaaccaagtgtgcctggaccaccttgggcacatgttctcaggacctcctgagggctgtgtcaggggccacggtcactcacatttggttcagaataaatctcttcaaatatcttagagtttgacttttttcgttgacccaccaattggccggattattactcattatttacttgacaaacacattaggagccctgtccccggaagctcgctgtcacgaggggcctctgacatctccttcttgagagaaaggtcgcctggcctgggtgaggtcgtagttcccgcgaccccgtgcttgcaagtactggctgcctcctactatagtgtaagctccaggaaggatcccgcgggggacctgacagctcacggtcctggccgacaaccgccctgggagcggaatggatggagcccgcagtcgtcccggcgcactgggcaagctctgctcccactgtggcaggccagatctccattagcaaccagagcagctctcaccaacgcctcactgtcattctgatgcatgtataagttaaacattggagaaactggtgccttaggagaaaggctagaatgtaaagacaagtccattaggatcccgcctgagctttttcaacccctagagtttaattaaaataatggagttgttcttgcacaccttgtaccaggacccactttagattatttccaaggctctgaagcaattgtctagacacctgaccctattaccgttaaagattggcttgagtgaaacactttggctttcgacttgtaaatgcactgaatgtatttaagcactagaaaaacttgtattaataattttgagttggtctggtgagttactccgaccttctccctgtaacctgttgcagaaataaactccgttctttcccagtctgtctgcatctcgttactgaacggcgagaacaagcagtcggacccgggtgggtcggggaacacaacctcacccgcagccgaaacccctcacccgcatcccttcccggcccgtgaggcgtccgcaggcggcggcgctcgggacacggcgttcgcggtgctcgcctccgctgcccgaggggaaaagggcaggagaaatctgaggagtccttgggccaggagccaaagcccctcaagtgcccgggcgcgaaccccaggcgccgagctctcacgtctgtctccgccagtacgctagagccggggtagtgggccagcactcaccggcccagccaatccaggacccgctctgcactgccccacccgccgcgcacacgcacgcgtccttttgcggccgctggcctctgattggctgggacggctgtgggtggggagaagccgggaggactgggtgcgcctgcagggatcggaagccggttggggtgtgagaggttttctcgctctaggtaagcgaaacaagccgggggactgcgagccagggactcgggccgcggggcgggaagaagtggggcagcgcttggccaggccgaaaggactttgggggtggggg

SEQ ID NO: 29358 - DNA, 2300 bp, Homo sapien
tactagccgtgaccttggatttgatttctcaaagtgtcacttttttcacttgtaaaatggggggtaacatgaatgatggttaaagaggaaatatatgtagcatgttagccccatgcttggcatgaaaaatgttagctattgctttaaaaattccttgctgtgtactgtgcaaaaagagtcagaccttgcccttgaagctgtaagtataagcaccttttaaaccaattactattagggctcccaatccagaccccaagagagggttcttggatctcctgcaagaagtaattctagacgaatccatagagtacagtgaaggcaagcttattagaaaagtaaaggaataaaagaatggctactctataggcagaatacccccaagggctgctggttgcctatttttatggttatttcttgattgtatgctaaacaaagggtggattattcatgcctcccctttttagaccatatagggtaacttcctgatgttgccatggcatttgtaaaatgtcatggtgctggtgggagtgtagcagtgaggatgaccagaggtcactctcgtcgccatgttggttttggtgggttttagctggcttctttactgcaacctgttttatcagcaaggtctttatgacctgtaccttgtgccaatctcccatgtcatcctatgacttagaatgcctaacctcctatctcatcctgtgacttagaatgcctaactgtctgggaatgtagcccagtaggtctcagccttatcttacctagcccctattcaagatggagttgctctggttcaatcatctctgatgattgattggtataaaggtcaaatagctagtaagtaatagaggtagaggactgtaaactaggaattttgattccgctatattttaggaatatagtatcgctcaacagcaagtaatttttaagacatagaaaggaaatacatttttatatataagctggactctattcataatattaaaaaataaggatttagacaaattataggatgacagatccacatagataatttaaggaagttagatatgcactctatggctacaactgtgtggaagatgcacatttgtcccccaaaatctctttattgaggctactggtatacactacttggtagaattgtcattagtctgacccagtttgaatgacggttgaatttaggagaaaaaagtcccatctttcgacaaaagtgtaccagccctgtcagtttaagggagaaaacataaacagaggcagtgtaggggtggaaaggggatgatccctttctttcccatcataagcgttacagctaacactcctataacaaaagacaggttaacaagagaaaattactagcctggacaacatggcaaaaccccgtctctacagaaaatacaaaaatttgctgggtgtgatggtgtgcctctgtagtcccagctactcaggaggctgaggtgagcagatcacttgagcctgggaggtcaaggctgcagtgagccaagattgtgccactgcactcagcctaggccatagagtgagaccctgtctcaaaaaagaaaagataaaaacaaaacaaaaacaagagaaaaacattataaatgtactgtatttgatcaaggtttgttttgtttgtttgtttttgagacagagtcttgctctgtcgccaggctggagtggagtagcgtgatcttgtctcactacaacctccgccttccgggttcaagcaattctcctgcctcagcctctcaagtacctgggactacaggtgtgtgccaccacacctggctaatttgttgtattttagtagagatggggtttcaccacgttggccaggatggtcttgatctcctgacctcatgatctgccttcctcagcctcctattgatcaaagttttacatgatgcaggagccttcagagtgaagacccaaagatacaggtgactctgtctcattatatgcttaggtttgatgaaacagggacagtcgtgtagaaatgtgattggacaacaaaggatatgagctaatggtaatagaaaacctagcaagacctgtctgttcagattcttgaactttctttcgattgtagcatttctcctttcaggatacagtacgggatcctttctggaatggaggtcttatgagctgctattgaacacggcaggtgagagaatttctttatggccaattcttagacaaaaagtaggggaagcggttgggcacagtggctcacgcctgtaatcctagcactttgggaggccaaggcgggtggatcacgagctcaggagtttgagaccagcctg

SEQ ID NO: 29359 - DNA, 2300 bp, Homo sapien
cttccttacacttgaacacttagatgccattgtagggttattaattggcctaatttcaaaatagctgtgtcttgggaaacaggaaagcccaaggagagatagaaagaggggagaacagctggtcagtggaacagtcagaatacacacaacatttaccaattaagtttgcatcatatatgggcccagttcatggtgccccaaaacaattacagtactaacatatcacagatcgccataacagctgtaatgataataatgaaaaaatttgaaatattgtgagaattacaaaatgtgacacagagacacaaagttagcacacactgttggaaaaatggtgccaatagttttcctcaatgcagggttgccacaaaccttcaatttgtaaaaaacatagtatctgtgaagtgcaataaagcaaagcacattaaatgagaaatatgtgtataattactttgggcagtgatttaatatctttctccctccattagaccataaactgcaagagagcagggactgtgtctatctcattcatgattataatcccagatcgtagcaacatttctgccagtaagtgcccaataaatatctagtgaatggatagatggggcttctccaaggaaggagggaatgaatagatgagtgtgggttaatgaatgaggtaagaatgaatgtgaaataatggttcatccattaaaaactaggggacacggttcagttcattggatttggcccagtttcagaccgaattctaaggttgaggagagttgatgatgccaagtactgtggtggtcctgaacaattaaagagggattctgggaagcagagtgtggacagttccaactccctgccaaggggaagctcataggcaaaggaagctcactccagaggggatatggaagttccataccctcttttgtctgaagagccgaagtccctgttctcaggtcgttaggaagttaaaaagtaatttggaggttatcagaactgattgaattgagtttgaacctcacctatagcaacaatgggccaggctgcttgactaatgccttggcgtcaatggtacagttttctccctcttgagctgctggcagggacctgggctgacatgtctcagaaggcccttagtcaatgattagcttatctcaaggccccaagccagggcagctgtcaaagagggtccccactgcgttctgcacctagatcctcattgtgaaatgaagtatgaagtgattgagtgaggtctctattgtctctgacattttacaattccaggattctgccttcttgtcagagaagtgtataggcaagcagttgggcaggtgagagggctccgggtgagaggctcagagactgagggctcagcctctgcttgaagagtcatcatctgggaggctctgtggcctcctcagatgagttcattcacactcataccccaagatggagtcaacaccccctccaccatctcagccttctcagcatctaaagccccagcatcaatgcctctttttttgggttaggggtcagagctgttgtggaagggcatacagtcattcttcacttgcctttgactgtgtactctgtgcacatggaggtaggagcagacatgacttcaacaaggtcatgcccccttggcaagcatctttgagaccagagaggaagacagactagggaaagaatgaggagataagcacgggctgctgtgaggtccaggggagcaggcaaaggtaagagaaaaggctttaggatactaactaacatatatggagcactagcatgagccaggcactattctaagtgcttttcaggtgttatctctttttgcctcacaacagcacctacaaggcactgtaattatccctacttcacagatgagggagtggagccacagtgaggttaacttacttgaccaagggggccaagtaggaatggaggcatttgttgagtcttctaaagatgaggaaagagtggaagtgagattttgtaagtgcttgattcatttctaccaactgaactggcaaataaataaaagcatgagtaaatgggggtataaatagtctgtcagctatgggggtgggagtgggctcaaggcaggcttagagagaaggtgcaagagctgtctgaaaaggtcagagcaaagcatgaagctggtgagcagctgtgaccatagctggaagcttctctctgagctttctcctggttacctcctcctcccctacgtgaccagtcagccaagtgttaagtccaggggaacattttgctgcttccaagtactgtctcactagtgttatttgccataactt

SEQ ID NO: 29360 - DNA, 2300 bp, Homo sapien
gtggacttgaattccatgtttatcttcctaccttattcaccccgagacattgaatatacaaatgggcaatggccatactacatagaaaaacaggactgtgtcacacaatctgtagcaaccagtccaggaagccaacccattttctatggtaaccactctaggaagtcaaaccactaaatcactatctgtggcaaccagtccactaatcaaaacaataaccctggtagcaattgaccccaaacagctgggatttgatctcttccttccttcctccctccctccctcccctccttccttccttccctccttccttccttcctccctcccttttccttccttccttcttcccttctccttccttcctctctccctcccttccctccttccttccctccttccttcctcccttccttttccttccttccttcttcccttctccttccttcctttctttttctttctctctctttttctttctttctctctctctctttccctccttcccttccttccttcgtctcttctttctttccctctctccctcccactctttctttctttccctccctcctttccttccttcctctttccttctcttctcttttctcttcttctctttcttctttccaggttcttgctggagtgcaatggtgcaatcacagctcactgcagccttgacttctcaggctcaagtgatcctcccatctcagacttctgagtagccaggagctggctatttttctttatttctttctttctttctttttttatttttgtagagatggggtagcaatttgattaaaaactatcagattccctactttttcccatactacttccaacttaggaccaaacagagaaagccaaaaatttccccctaccaattacataagattccctgcttctagttagcccgcctgtagtttccccatgccagcaacttccaataagggaatacctgaagccattccttttttccactgtgaagctttccccactcttctgcctgactttcagtctgctgaatgcaagtgatgagggctgactctcttgtcatatatagcaagctctgaataatagtctttgttctcatttgaataatctttattttcacacttcttaaaaaatttaatttcctggcatgttgcataatgttaggtaagccattttctctctttgggccttactttcttcaactgaaaaactggttcaacatttattcattcttttattccgtaagccaaaaataaaattcaaagccctctgaccatatgaatggatctctcctcttggctaagggcattccaaagttaacgtgaaaaactggttcaggccataatgggaaggaggagttggacatggctcattatgctcccctaccttttgaaattcaggaccagctgaccagcattaacatcaacacagaccttaagactgatagaacagcctctttaagtctcacagactatccggtagtgtgataatgatgagaaacatttgcagtctattctctgaagcctgctacaggctccatctgcatgataaaactttggtctccacaagcccttatcttaactgagacatccctttctattgattctaagtctttatacaataacttaactctttcaaccaattgccactcagaaaatctttgaatccacctatgtcctgaaagcctcctcttccagttgtcccacctttccataccgaaccaacgtacatcttacatgtattaattgatgtcttatgtcttcctaaaatgtgtaaaaccaagttgtagcccgaccacgttgggcacatgttctcaggatctcctggggctgtggcacgggccatggtcactcatatttggctcaggataaatcccttcaaatattttacagtttgacttttcgtggacaattctacaaatattccttggcagttaaagaaataactccccaggaggtgctagacatcgggcgcatgttagaggcacaaagatgagaatgttaaaagacataaaatacaggtctgctctgggaatgcaaaaactggtaaaaggagagataaaagagcaggtgcagtctagtgaagtacccgctacctcctatcagcaaatatctgtccacctagggtgcagcgagctggagaggaaggggtggcctagagcgcaggggaaggattcctccccagccgcctgcacccctaccccggtagcggtccctgggatcgtccgtgtctccaggagaaccggaccgctctcccctccctccccgagcgagaaaggaggaccacagagatgcggcgccctccgc

SEQ ID NO: 29361 - DNA, 2300 bp, Homo sapien
tccttcctccctccctccctcccctccttccttccttccctccttccttccttcctccctcccttttccttccttccttcttcccttctccttccttcctctctccctcccttccctccttccttccctccttccttcctcccttccttttccttccttccttcttcccttctccttccttcctttctttttctttctctctctttttctttctttctctctctctctttccctccttcccttccttccttcgtctcttctttctttccctctctccctcccactctttctttctttccctccctcctttccttccttcctctttccttctcttctcttttctcttcttctctttcttctttccaggttcttgctggagtgcaatggtgcaatcacagctcactgcagccttgacttctcaggctcaagtgatcctcccatctcagacttctgagtagccaggagctggctatttttctttatttctttctttctttctttttttatttttgtagagatggggtagcaatttgattaaaaactatcagattccctactttttcccatactacttccaacttaggaccaaacagagaaagccaaaaatttccccctaccaattacataagattccctgcttctagttagcccgcctgtagtttccccatgccagcaacttccaataagggaatacctgaagccattccttttttccactgtgaagctttccccactcttctgcctgactttcagtctgctgaatgcaagtgatgagggctgactctcttgtcatatatagcaagctctgaataatagtctttgttctcatttgaataatctttattttcacacttcttaaaaaatttaatttcctggcatgttgcataatgttaggtaagccattttctctctttgggccttactttcttcaactgaaaaactggttcaacatttattcattcttttattccgtaagccaaaaataaaattcaaagccctctgaccatatgaatggatctctcctcttggctaagggcattccaaagttaacgtgaaaaactggttcaggccataatgggaaggaggagttggacatggctcattatgctcccctaccttttgaaattcaggaccagctgaccagcattaacatcaacacagaccttaagactgatagaacagcctctttaagtctcacagactatccggtagtgtgataatgatgagaaacatttgcagtctattctctgaagcctgctacaggctccatctgcatgataaaactttggtctccacaagcccttatcttaactgagacatccctttctattgattctaagtctttatacaataacttaactctttcaaccaattgccactcagaaaatctttgaatccacctatgtcctgaaagcctcctcttccagttgtcccacctttccataccgaaccaacgtacatcttacatgtattaattgatgtcttatgtcttcctaaaatgtgtaaaaccaagttgtagcccgaccacgttgggcacatgttctcaggatctcctggggctgtggcacgggccatggtcactcatatttggctcaggataaatcccttcaaatattttacagtttgacttttcgtggacaattctacaaatattccttggcagttaaagaaataactccccaggaggtgctagacatcgggcgcatgttagaggcacaaagatgagaatgttaaaagacataaaatacaggtctgctctgggaatgcaaaaactggtaaaaggagagataaaagagcaggtgcagtctagtgaagtacccgctacctcctatcagcaaatatctgtccacctagggtgcagcgagctggagaggaaggggtggcctagagcgcaggggaaggattcctccccagccgcctgcacccctaccccggtagcggtccctgggatcgtccgtgtctccaggagaaccggaccgctctcccctccctccccgagcgagaaaggaggaccacagagatgcggcgccctccgccgtcctagagcaaccggagcggcccgagccccggcctcccggatgctggggcctggcgggtgtggagcacggggagtcgggcgtggggcgggcagggagtggagtcggggtcttactccggtggctgcagggcgcagggtagccgtgtcaggcctgcccaggtgcagagcgctcttccgcgaccccaacagcctctggtccggtctggcgcgccctcgctttcccagagggcgacctgggctatggcggccgtggcgctggcga

SEQ ID NO: 29362 - DNA, 2300 bp, Homo sapien
agatctttattgtgaaggcttgagttgatctaatcaggagttaaactgtgtttaggtgtttttgttgctatggttatccacaggcttcaaattcttctagtattaccttaagtttagtgtgtgggatggtttgctaaaggagattttctcaatgtttgcaccactcttacctttaggccttcccttcattcctgtacctcagagaggggtctttctccatgtttttatccttcttttagcagtagattgctgttcttattgactcagcatttgatattttggtggtggtagaagggatggcattttctgttgtgattcagctttaatcttaggtaggcactgtgtctctgagacttaagggtggggtctattaagtgatgttgccctatcctcagctgtaggacacctccatggtctggaaccaggatgcaattctaccgctatttcgtgaatggagagctttttgttctctttattcccttcagttccactggatcttaaccagtccctaagggtgacaagatttgctttttcatcctcagaggcttagggcttttgttctgtaggggaaataggagagaaggacctggatggggattcatgtcttttctagcgggaaggttttcataagattcttcttgccttaccttcaattgtatgtgtgtatgtgtgtgtgcacacatttgatgatgtccatagagaagaatatacaagtgggtggaaattctgcttgtgtctgtggttcacaggagttctgtagtctctatattctcaggctagccaacacttggacctcagcaactcattaaacattttagctgatttctccttaacagcttacatggcatccaatggcatctgtcctatgtaaacaagtgcttacaaccatctcttcttgaaagtgcctgtcttacatcagattttagattaagtcgtttgcccccagatcttagctttctgatgtgttcaagagaaaattttagattatctggctgttttttgttgttgtaagggtgaggccatgcacttttcagttttctacatcgtgagaaggtgaatttcttgatttttcaaaaagaatcacacttttaaaaaccctgaaaaataaagaaaagagactgagctaccagaacggcagtgactttgggtggctctcacttatgccaggcacagggtgaattcagggctctgggctatgaggggtcgactgcaaacccctgcagcagatgtgagctgcatgtgtgggcccctgtgtcagcctgtgctcatttgtcttcctacagtgatactgcatgtgatacacaacacccaaggacaatggaggtgggggcaaatgtcccttattcttcacacccttcgctgttggcatcaaagcagttactctaccttctccacaggctttggcacagcatgtcaggaagttctctggggtggccacacctatttcctctaagtgctttcaacaggtttttcatcatgataggtatcctttcttacctctgattgatgtagtcatgctgttttcctgggacagtgttaagctctgctggacaggggatgaatatttcttgggtaaactgactgctctcactttgcccatggtccattgctaatcctctctgctagtggtaatgtatggaagtgagaggcgtcagcaacattgaaagacatcacattctaggagtgcaatcattacagcaattcaagagaagtcctggttgtataatgtgtgattcgttcattatgctataacaatccaaatgctaaatttaacaagatcaataaaacgtataaccattcacattttcttgcatattctgggtaagacttgtagttgcagttattgtagcacagtaataaaggcactggaagccagtattcaaggttggtacgatgatgcagcgtcatgagcaaggtgcctcaactcagaactgggctctggaggaacgccaagagcctatctcgccagcgtgcccttttcctcacgggaattaggagggaagcaccaagatgtggggtcctccacgagtcctagagagaaatccagagagtgtatgggttcaccagtcagtgtgatgacgcacttccggggccgccttcgtttttgtcgcgcgaggttttggtttgtgaggatcggcgagtggcgcccaccatctctgcttgctgaaaagctgcagaggccgccaggagcccacggtgagcgggtctgaggaggacgggaaacagccccgagggaggcgggtgtggctactgctggtactggggtcctcatgccgatccccgagcttggctctgtagcg

SEQ ID NO: 29363 - DNA, 2300 bp, Homo sapien
cagtccctaagggtgacaagatttgctttttcatcctcagaggcttagggcttttgttctgtaggggaaataggagagaaggacctggatggggattcatgtcttttctagcgggaaggttttcataagattcttcttgccttaccttcaattgtatgtgtgtatgtgtgtgtgcacacatttgatgatgtccatagagaagaatatacaagtgggtggaaattctgcttgtgtctgtggttcacaggagttctgtagtctctatattctcaggctagccaacacttggacctcagcaactcattaaacattttagctgatttctccttaacagcttacatggcatccaatggcatctgtcctatgtaaacaagtgcttacaaccatctcttcttgaaagtgcctgtcttacatcagattttagattaagtcgtttgcccccagatcttagctttctgatgtgttcaagagaaaattttagattatctggctgttttttgttgttgtaagggtgaggccatgcacttttcagttttctacatcgtgagaaggtgaatttcttgatttttcaaaaagaatcacacttttaaaaaccctgaaaaataaagaaaagagactgagctaccagaacggcagtgactttgggtggctctcacttatgccaggcacagggtgaattcagggctctgggctatgaggggtcgactgcaaacccctgcagcagatgtgagctgcatgtgtgggcccctgtgtcagcctgtgctcatttgtcttcctacagtgatactgcatgtgatacacaacacccaaggacaatggaggtgggggcaaatgtcccttattcttcacacccttcgctgttggcatcaaagcagttactctaccttctccacaggctttggcacagcatgtcaggaagttctctggggtggccacacctatttcctctaagtgctttcaacaggtttttcatcatgataggtatcctttcttacctctgattgatgtagtcatgctgttttcctgggacagtgttaagctctgctggacaggggatgaatatttcttgggtaaactgactgctctcactttgcccatggtccattgctaatcctctctgctagtggtaatgtatggaagtgagaggcgtcagcaacattgaaagacatcacattctaggagtgcaatcattacagcaattcaagagaagtcctggttgtataatgtgtgattcgttcattatgctataacaatccaaatgctaaatttaacaagatcaataaaacgtataaccattcacattttcttgcatattctgggtaagacttgtagttgcagttattgtagcacagtaataaaggcactggaagccagtattcaaggttggtacgatgatgcagcgtcatgagcaaggtgcctcaactcagaactgggctctggaggaacgccaagagcctatctcgccagcgtgcccttttcctcacgggaattaggagggaagcaccaagatgtggggtcctccacgagtcctagagagaaatccagagagtgtatgggttcaccagtcagtgtgatgacgcacttccggggccgccttcgtttttgtcgcgcgaggttttggtttgtgaggatcggcgagtggcgcccaccatctctgcttgctgaaaagctgcagaggccgccaggagcccacggtgagcgggtctgaggaggacgggaaacagccccgagggaggcgggtgtggctactgctggtactggggtcctcatgccgatccccgagcttggctctgtagcgtcgagatgcggcgctggcagaggcctggaacgctggccgcaggctcccacccccctcgtttccctgtacccagggcagcctgtggcccactcagagtcggatactgacacacattcgcatgttaacttcgaagcccacaaaaagttttaactgtccacactccagaatcttctatcaacagaacatgcccctcggtcgctccagcccccttgtctttgacccggatgcggaaaccccaaccctacccctcagcttgtcagtttccacgttttcagttggtccctgaaaatcagttggtgatcagttattttcgcctgccatagtgtacaccagtcttgaaacttgttactgtcgtagagcaaccaaaaatttgagaataccgaattgtattccctacccgtccccaggatgtcccattttggaaaatatggagccctgcgatctggattggctcataagaatgttaaatctaaaaagactgatcgtatccgtcatgcaccta

SEQ ID NO: 29364 - DNA, 2300 bp, Homo sapien
ttattcctttctgggtaaaggtaaaagtctcaggtgctgaaggtaaagaaaaaaaacattaacgataataactttattgaccataagtcctacaaacaacctctgacccatctgttttgaaggctatatcaataaccgttcattagttattgcttattatcaatctcacaaaggcgagatagcaggcatacagagaaatgcaaaaaggaggtagaatcatccacggaatgagtgatgaaaaagtggactgagaaaactataatttcagctaatccatagaatacatcacaggacaggaaacagaaaaggaaactaaggtagacagtggacagagtgttataggcagaaaagaaagttggaattctaaacagttaagatccctgaaatccatacagtacagataagaatgagttatgtagtacagataggaatgagttatataaaagaaatccattaaacactgtaagacctcagcatgtttttcctcctatgctacttaatattagaacaagagtttctatgactgaagtaatgaaagttgaacagactttgaaaatagttatcagaaatattttgatgcctccctactactatttttcccctaaatacaagatactcattcagttttataaaggtgtttggagtgggtgatgagaaagaaaacattaccatattaaaagaatccatcaacttcataacatgtcccaaatacttcaagttccaaatgttatagtataaggaaacaaaacaatttcatttctaaactagttccaactctcattctgggtcatttaattagttcatcattaggaagtaagtcttttgcctttcaagagtgaatcatcaatatttatgcattaaagacaacacctgaaatacaaagagctgccaacagttggatcagagatattcaaaaagcatataaacaaacacataaaagtgcatatactcatagaccttaaaaacaacttccgttccaactccatatctgcagtttgctgtaagtcttagggtactgcaacagcatcagacaaaacactataaagccagtgcactgcccctccctccaatgactcttcttagtgaatccagaaagccattcaggaaggtagaggaagctgaaggtgtcagagaaacagctgtcaggagacgccagaaaaggcatcttggaagttaacagggagtccagtaaggagaaatatttatgagtgtaaagagaagtactttaaaagaaaacacaatgtaaacctacacaagtaatgctgctaaattcatggatggtttctgtccaagaaagggtaacaaaagcagtgattcatactaagtaaatagttaacccttgtaattgtggaatctaattctctaaaatcatgatactgtcattgtatcggcagtaaatgtcccttacagtggatacttaataggattagcgtatcaaacaaaaggacttaagcaaaaaggtctgatctgcacagctgacaatctgcgaaagggaaatcatctggaaatagaactacaacagaggtcaccctacaaaacacaaaacactccctatggaagtgtcttcctatggggaaagctaagtggagatgaaacataaataacaagccacattggagaacaaatcacactcccaacatagttgactaatggcagggacatcgaatgttatcctatgaaccttgacaattaaattatgacagtggagtaaaagttcagagaatctaaagaaaagaatataatgaacaatgttaagaggtcaagaaatctttcgacatctccaatcctgtacataggaaactatgttaaacactggacacacattaggtgcatgacggatacgatcagtctttttagatttaacattcttatgagccaatccagatcgcagggctccatattttccaaaatgggacatcctggggacgggtagggaatacaattcggtattctcaaatttttggttgctctacgacagtaacaagtttcaagactggtgtacactatggcaggcgaaaataactgatcaccaactgattttcagggaccaactgaaaacgtggaaactgacaagctgaggggtagggttggggtttccgcatccgggtcaaagacaagggggctggagcgaccgaggggcatgttctgttgatagaagattctggagtgtggacagttaaaactttttgtgggcttcgaagttaacatgcgaatgtgtgtcagtatccgactctgagtgggccacaggctgccctgggtacagggaaacgaggggggtgggagcctgcggccagcgttcc

SEQ ID NO: 29365 - DNA, 2300 bp, Homo sapien
atatctggggcattctagggagagggataacaagtgcaaaggtcctgaggtgggatcttgcctgtaatatgcaagggacaataagaaggtgagtgtgtcctggagcacagtgagagagagtgtgcagagataatgttagagaaccaatgagggccaaagtgtgaaaggacttgtaggcccctgtaagatgtggcatgttacactgcaggagatttgaagcctctggtaggttttgagcagagaaatgacaaaaatctgatttatgactcttttcaagtaattcttcttaaaagtaattttattcatgttattaggatggaccaggatatgctataacaacaaacaattctttacagcttagccatgttcttgtgtgacattttatttggctgggctagatcctgcagcagcttttcccaagtgtgttccatgagtcattggagctgcttcttttgaaaaacagttctgcttccagtaatcctggaaatactgggcactctcttcctgtctaagttagtgatttgagaccatcattaaaaatacataaaattggaatagaatagaaaatgtcagagtgcatcacatgaagtaatgttttataaaacaatcttttagttacatttatacatatatgtttaatatatatcttgtgtggggtcacagtcagaaaatgagactcaaaagatcacagcgtctccctaaacatctaaataaaaccctgaatggtttgtactgtcctccaccctcttccctcatttcccaaccagggctcaaactctctgtcctttcagtagtccatatgcacagacaagctgcagtttgcagtgctacatcctgcctcctgttcctgccatatcaagtcttcctctttgtttcatgttctggcaaatagacttggatttgctaaactgtttactggcgatctggtctcaggaaagttacttcacctccctaatcctgactttcctaatttgcaaaagttttccttttaggatcgtttgtggttattaaatgaaataatgtacagaaagcatctggaatgttaaggaccgaatactttcccttcatctgttcctcctgcccatacacacatacacaatttaaggggactctctggatctttgcttccctttagaagcactgccatcagtgataacctcagatcattctggggcaggagactgctgggaagatgcctgtcttcatctagctaatgatgcttcctgttagtttcagtactggaggctaatttttcagcctggcccccaaattctctcagagcaccctactgctgactctgcctcgcctccatccattgtctacaggctcttaataatcctggggtccaaacattgggccactgggggacacaagtcataaagacgtctggggactggtcgatggtcatccagctgttaatagtggggctagccctgattttgggactacagaacccctaagcccaggacattccccaacggggaacggatagactctcaggtcttgctctgactgtgcctttgttggcagtaggtgactcaggggacacaaaggcactgtctgtgcatccaaagcagagaggtatcagccacttacttcagtgactttaacagtgattagttctcaaggacaaaaactcttcattgttaattagcttagtggtcaacggattttccttccaaatcctcttggggactgaacccaaacaaggcgaagaagtgacagtaaaaaaagacttgtccttctgacaagcgacagtaaagaaaaagacttgtcctgcttggcaggagagggtggcagtttgggcaacactcagccatattgctgagttgcagcgaactcaccaagcaccctcacaccttagaggcgtccctcaccgtccagccttggtgcatcacccgtcaggcgggcagtcagggcgtagacctttccttcctagcacctgggcccctactccagaagaccagaagactgcggctggccgagcccccggcagggcttttattgtgaagggagcttccccctcccgcgctttcaggggaatggggaagctgggccgggacgcgcggcagggactttgcaaactctgcaaaagtcccgagtagaccgcagaggctcgcggccgcgggtaggctccctcagatccccgtagatctcagtagatccggcgtgtattccccacccgcggagtatcccggtgtgcagcgatctcccgagagttggcgcagggccacttggctgcagagaacgtgtgcaccttcagtccgggaaacccgccccagccgagtagccgcgcatcc

SEQ ID NO: 29366 - DNA, 2300 bp, Homo sapien
taatatttatagagactcatgttctcagctgggtgtggtggttcacatgtgtaattccaacactttgggaggttgaggcaggaggattgcttgaggacaagagttcaataccagcctaggcaacatggccagacccctttctctacaaaaaatttaaaaattagccaggctggtggcccgtgcccatactcctagctatttgggaggctgagatgggaggatcgcctgagcccaggaatttgaggttgcagtgagctggtatcatgccactgtactgtagcctgggcaaggccacagtgagaccctgtctcaaaaaaacaaaacaaaacaaaaactcatgtttcttatctaatttattttaaaaatagataatttaaaataacttttttattttgaatacattttagacttacaaaaaagttacataaaccatttctccccacttcccctactaataacatcttacagagcacaatgtaatgatcaaaaccaggaaattcacacaacacattaaactgcagaccttattcaaaatcatcccactaatattccctttctggtccaggacgcaaaccagaatcccacactgcattaagttgctgtgtctctttagtctcctccgatctgaggcagctcctccatcttcccttgtcttttatgaccttagccctgtcaagtactggccaggtatttggtagaacatcccttaaattgggtttaagattttctctattagctaacctacagaccttattcagagctagaactggagcgagaatcacgaatccccatttagaaatgtagattgaagttacgcattttgggcaagaaaaccacagaagtgaggtcttgtctcagtgcatcatataaaggggtacattacgtcaataggttattacaggtgatgttaattttgattacttggttcagggcatgtctgccaggcttctctactgtagtttctatttttacctttgtaattaatatgcacctcatgggaagaatctttgagactatgcaaatatcctctcatcatactttttcacccactaattttagtatctatcagcagatcttgcctgcaacagttattactgtgatgtttgccaaatggtgatctatttccatgattgcttctacattttttaattggaattctctaaggaagagctgtcctttctctcctaattatttattcatatcaatattgactcatggatattttattctatgggttataattcattactattactttttaattttggtactaaaattatccaagatttagctgttgggagctctttcatgctggctcctgtgccttttcactgtctccccatcattttttttttaatacttttacattctggcactacaaaatgttccaagcttgtcttgtactttccctgccctagccctggaataaaccatttctccaaggagctctggttcctttttgtagagaaagatttttagaaacacagatctgggtgctgggtatactgattgctactgcactgtcattgcttccaggccctcttggtgaactgaactaggaacgcctataattccaaccatttccttagctatgacagttatcactagatactttgtgggaggagaatcagtgtctgaaattagcaccttgatattttgtgtatacaaaaagtgtttgaactgtgcttgacatagttcctcttacaactgccagtccagtcattcctttagggtaaacactcacaaatattcccactgttcctcctgctcatgttcctccctggtgccttcctccctgccaccccagtgtgagttcctcttcagttccctggtctagatctgagctgaggatctcagggtggtctcccttccaccccctggtaagacagtctctccttgctgtctttccattctctttttaaaccttttgtcccttttcttattttatcctttttttttccttctcctaacctcaaatgtcaatgaactctccctctttctggtttctttctagctcctggcttctcttctttcctcctagagatcagatgtcggaactccagctgagggcatgtcttactgggcacgcaggtgtcctctcttgagaagaactgtccataccatggtggtggtaaggttagttggttcttatggcaggaccatgggacactggtcaaaaatggtcatatcagcactttaatgtagttcagcacagtagttcttagttggtggggttgtatggagaatgtccagttgggggcatgcctatttgaaagagcatggcagtgatataattttac

SEQ ID NO: 29367 - DNA, 2300 bp, Homo sapien
aagaatgttatacaaatggcaaccagagtatgtaaccttttgagactgactttttttcacccagcataatgcccaagttgtggcatgtgtcaattgtgcctttctattgttgaatgatattctttatatagatgtaatcacagtttatttaaccattcacctatcgaggggcattttgtttgttgacagtttttgacaattacaaataaagaaagtaggaacaattgtgtacaagtttgtgtgttaacataagtttccatttctctggaatagatgctcaggagtgtgattgatgagtcatatgggaagcatatgtttagttttttaaaagaaactaccatgatatacccatctgtgagtaatatatgagagatccagttctgtgcatactcaccagcatttgctattttattttttaagctgttttgtagttgttgttgttgtttgtttgtttttgagatggagtcttgctctgtagcccagactggagtgcagtggcgcgatctcggttcactgcaacctccgcctcctgggttcaagtgattctcccctgcctcagcctcctgagtagccgggtttacagacgcgcaccaacacatccagctaatttttgtatttttagtagagacgaggtttcaccatgttggccaggctggtcttgaactcctgacctcgtgattcgccagccatggcctcccaaagtgctggcattacaggcatgagccaccgcgccctgcctttttaagctgttttaaataggtgtatggtgatatctcagcatagtcttaatttgcatttcctttatggctagtgatgaacatctgtccttatttgccatctgtataactactttggtaaaatatatattaatgtcttctgtatatttaaaaacttatgatccaggatacagtttatcttaatatatataccaaggttgcttgaaaagaatgtgtattctgttggtgggtgaagtattatgtaaatatcaattagattaggatggtattagtgttgatcttttctatatccttgctgactttctgtctagtgttctatcagttgttgagagagggatgctgaagtttccaattacagttgcagagttgtctatttctaattatggttctatcatttgatttatttatgttaaggctatgtcgttaggtgtatccacatttagaattatgtcttcttggtgaattgaaccttttatcattatataattatcccttttttattcttggtaattttccttgctgtcaattctactctctctgaaagtaatatcaccacttcagcctttcagtttattatcatctaaacaacactattcagcctttgcagtcatccacaattattagaatttcttggttagaggcttttgactacatgtttttaaaggtttttggctgtattgacaaattgccctgcaaaaatttaccaacttaataccttaacatttgggctaatttaaaataatcataaattaaagtcagggctttcccaatttgataggtagaaatcttataactctatggaggtggagttggtggtggtaggtgcatctctagatgacttaagttcaaaaaaagtcaagagatctaaaaaagaagtcaaaagatctaaaattcataactcaagaaataggggcatatgtatattcggagaatccgcgggaatgccagatgccacagccataagtagctgcccttgaggactggacagccaggactggacggtgggataaggtgacagctggttaatggaatggtgccgcagaggactggtgcttttgtaagttctctgtagcattacaatttttaaaagcatgtaaacgtattaattaccttgactttacaatgacatttggttgttggttaaacttgcatttaaatttattatcagaactgccataactgtgtaatcctaacactaagtaaaactcagcctctcggcgcaaattatcactcccaacattccgcaggctggtggcggcgcgggctgtcctcgtacgcaaaactacacctcccaggattccgcgagccaaggttgtggccggggccagggcaaccgaactcgcggctctgcgcaggcgcacaggctccgcgccgggctcgcccgccgggcaggcgcacggcggacacctgcgagcctggaggtggcggtcgctgcgaacccggcggcgcggccaaacctgtgctggctgcctgggccttctgggcctcctgggccagaagctggcgctgggggcggcggcggggtgggaaagcggcgccgccgtggggcctcctggacgcgtc

SEQ ID NO: 29368 - DNA, 2300 bp, Homo sapien
tgtaatacaagcaagcatgcttcatcttgtcgttttgtagaatgctgtacatctaattaaagcttcttacaggtccataaaaagacccaacattaaaaaagcagtgtgttggagaaagccccagggcagagtggaaaaggagtttcttcattaactataagcacatttgcttaaattccaacttaagtaatactattaatttgtacttgaatatcttaaaatattgccgaagcataatcaaatcatgtcaccacatttatggtgtggaaccaaaactgggtcatattcttgccagcagcacttcagctacccaagaaatactggggatgaataaatgatttaccatgtggccagtactgcgtccttctctagaagagtattgcagccaacttcatttaaatcaatttattattttgccctttttcatttgttttgctcttttatgccttgttttccttagaaaatttattcaaaacctagttaaacagcagcaatataaatactttatttttcaagagcttatatattatcgtcattgttctgtagttactgatataactcagggactacagacccaggggtggaggccttcgaccactggaaatcccttgggagaccattacagtggtattttctccctttagttggctacagagttccctgaatagtgatatctccctgaggagaaaagtgcatggtcttcctgatttctagcaacaaaaggacaaattctacaaatccaagttaggagctcttgcttaatatgctgctacagttacgatttccatgtcaaaatgagatgactcttttatggtcttttcaggtcagagtgatcccaggtgggaccctaaggcgcagaggcctaatctgaggctttccctggtgctctcccaccacctgatgcaagggtattagggtaactgggagtccccttgatcagaaaaccctatgttattaccctaagaatcaaactgtttgcacctcccaacaatccactcctgcttcccaatcatcttcagacatgcaaagttgatgcatagaagctaaaaggcttttgacatttgcaggtcaacagagatttgctaaaaccatctagatttctcttcgcagtccagtcaattcaaccaagcctgcagcatctccgcagctcttctggcttgtgtccttccttgctaggggtcctttcttggggaagggtggacacaacgtgggaacagaaggggaaaagcaggttgaagaaatctggcgtctggtttgttggtgttcccttccaggaaccctgaagagctggtctctattgcatgccatgcttccaggggtgggagtcgggagtcccctcccaccctctgcggccatccctaagctcccttccagagcaacctggcctggcgaccataccactgaaccatcaagggctatggttaatgcccggcgtgttttgaatctctgacttcacgtgctttgatgtgtccccacgaccgtttacttttctatgctgttgccagaggctgcctagcagggcctgtgtctcccgctgacctttaaggccagcactgcattcagatgttgggcttttccaattttgcttaaataacaacaaaatcaaccgaattttttcaaattagagtcccagggagaagaaactacagagaaaaaaatcatattatgtatatatatgtatatacatatgtgcatgtgtgtatgtatatgtatttttacaatttttttatccttgtttaaacctgggcgggaaccaaagagtaaagcgcgtgcggctccctgccccctgccgccaagacgcagtcctgtacagacgcggtcccttccctccgatttcccctgacagctcgcgctactttttcccggccattgttccgtgtccctggtgcttcctcctcccccgtcctccatcctccttgggcgccttgcccgctttgtcccgccagccgcctcagccccgactcgccggggtcagaaagccgccaggatgccctccagcagcccgcgcgccggccgcaggtgcgcgccgccccgccctgcccttcccgcggccccgccccagcgctgacgtcacagtgacgcgcagcccgcgcaggcgcagctacccggcaccccctccccgcggccggcagcccgctcggtattatgattagcgctgggtgcggggtttcggcggccgggagggagttgtcggcgccgcggccgctgcggacggacgctcgcctgccggctgaggtaggggcgagcgcggagcgcggcggggcgcggcggccgtaggcaggggtgcggggccggcctcc

SEQ ID NO: 29369 - DNA, 2300 bp, Homo sapien
ggggttaataattcctgtctttgaggggaattgtgaggattgaatgaggataatgtgaagtatttggtatgtgactggtgtgtaatactcattcagtaaatggtagtgctatttattattacaataattactaaagtgcaaaaaatatattagtaaacatattaacattgactttttgaacttataatttaacatacataaattttttgagggggttctaggtatgcaattcagatcatttctgaagtggtataaatataaaagtgactttatgcttcttttatagttggtattttaactctaaaaataatattatcctaaatggggcattgattagagtggccaaatgtttataaacaatgtgggctttgaaatgtattaattaggtgtgaatcctaggttttgtagttaatgtcacttgtacctagagcagcctattgccttagctataaaaatgagaccagtgctgactggccaggcacggtggctccagcctgtaatccttgtactttgggaggccaaggcaggaggattgcatgaggccaagagttcaagaccagcctgagcaacatagcaagaccctgtctctaataaaaataaatagcagtttttaaaaattaaaaaaaaacttacctattatatgtcaaatttcgttttttgggatatttttatctaagtggactcaataattaatgctcttaatatgtaactgaaaatgtgaaactgtatattgagagcagtagaaaaagcttcgtcaaagggatagatactgactaatgggagagagctagccttaggaggttgctatattccttgttggattttgttactcagttctattaaatgttggtcagaacaaaagtgagggttcagcctgtgagatataaagttgcatcttgtttaattttatacacgtttgtttttctgagtcattgtcatttataaataggaacctatttctattcatttattgtaaaagttgaaatttttaagtacagtacgaaatgtggttcttaaaaaccaaatgatttttaagacttaaatcatctgtaagaatgcatgcctgtttactcttggaatataatcacgttatgctgggttgtgattgacagttggaaaacaatcattaaaaatcagcataactgctgagtaccagtaaattaacaaatatttactaagtacctactaccatatacctagaaccccctcaaaacatttatataaattcaattataagtttaaaaagtcaatgttaatatgtttactgatatgttaagcacctactatgtgccaggagcttatcctaaacagtagtgatgcaagagcaaacaattacctcctaaacattttggaaaaagttgcatttcaaaatttaataagacagttttgattatatgctatttgtaaccactgttctaggtgttgggggaaagtagaagaaaaaaaaatagaaccttagaatagaaaatccctgagaacctgctactgtcaggttagaggagatggtgtacccaaatacctgtagaataagaccacatagaatagaggtgtcccaaggtgctctggggatattgaggagagaaggtaattccagctgggagagttagagaaaccttcacagaatggatttttttttttttttttgcacttaaaggaagtggtgttggtcttggggaaactgaaaagttgttgggtttctgtgcaaatgtttattctttgtgttttcccttgtcaactgttgcgttattttttaagacactaaaattccttttagaaaatgtttgttttttaaacatgcttatcaaacttgccagttttcttattactcacatcaccaaaaaattgcttccaatgaactaatttttttttcagtttgcaaaaacttgatatggtatttaaattcagcctttgtaatataaagtctaaatgtaaaaataggttttattaatgaccctgactcattttttatctcaatttattttcttcaagtttctcttaaaatgaaaaaaacaaaaaatgaagtgattttaaagtttgtgaagaaaagtcgcagaaacttaattttgtttctcttcttattttgtagatatccatgacgacattgaaaatgaattttttgtattcaccagatattcttatatgagaagatctattttaaacagtctaaatattttttcttctgttggaccagcatggcaggatttaagcgagggtatgatggaaagattgctggattatatgatctggataaaaccttgggtcgaggccattttgccgtggttaaacttgccaggcatgtc

SEQ ID NO: 29370 - DNA, 2300 bp, Homo sapien
aggccaaggcgggcggatcacttgaggtcaggagtttgagaccagcctggctaacacagtgaaaccccatctctactaaaaatataaaaattagctggatgtggttgtgtgtgcctgtatctcagttatttgggagacggaagcaggagaatcacttgaacccagaggtggaggttgcagtgagccaatattgcaccattgcactctagcctgggcgacagagtgagacactgtctcaaaataaataaattaattaattaataaaaaaaggttatgccagtttctattccactaaaaatggctgggatgcctttccccacacactcactgtgcctatttgggtcttccaaacaagagatgggatttgatgaacaagaagtttattgagagaaatatttgtggaaagaaggaggagggggcaagagtgggtctagagagccttcagactttgtcaatttgacacttgggaaaggagagaggaaaggaaggagaattgagtaggaagagcctcagaccacagcccagttcggagaaactaacagccaggcttaaagttgccctttaaaggaaacttaacgttgtgcaggaatggccttgtttcaggtgtcccctccgtgcccagctgatggctggaagcagctgggggaaggatcttaaggtgtggcaccaggagcctggcggtcaaccctgttcttcaaagcagattgtcttgaagggagagctggtggagtggggtaccttcacggctaccacgctcaccaacctattaccaaactttccatctttgcagtgtgagaagtgagaaacagcatattggtatagtttttacatttgtcttaatatgagtgaggttaaggatcttatatttaagagccattggtattttctgtaaattgaatataccttttactaaagtctttaatagctttactataaattacctagatgatagtgtcttaatatattaatccatttgataaaagaaatataaattctgctcatgatcctgttatcatctgattaatattttcgtaattcctgtcaaccatctctagagggtaaatagtaaagaaataaatgtacctttaaaagtttgaggccgggcgctgtggctcatgcctgtaatcccagcacttgggaggccaaagcgggtgaatctcttgagctcaggagttcaagaccagcctgggcaacatggtgaaaccctgcctctacaaaaaatagcttggtgtagtggcacacacctgtagtcccagctactcgagaggcaaaggtgggaggatctcctgaacctggcaggtggaggttgcagtgagccaagatcgtgccaccgtactccaacctgggcaatagagtgagaccctgtctcaaaaacaaacaaaaattgatgtaggtagaaataatcttttttctttataatcttttaagtaataattatatgtacattatcaaatcatgatatctctttatgtttggtaacttatttcagaaaattattaaaccaaatagaacatagaaatttatgggaaaaatcactgaaaagttatattgctttttgttatttagtatttaacattcacaaaatctgttatagtccagtgtaattgtattacatttttggtttttctttttactgaaacattttgttccaaattaattttcttaaattttcgtctatttatattaaactgcaatctttgttctatatttttatttggtgcacttttatacctagagctcggaaatattgaattctcgtctcatctacttctcatttgaataagtggcaggctacttagtggtacatttttcagtttttccatttattgaaaaactataaagaactgccatccctaatgtacttatgttatttacttggaagatggatttaaattgctaatataatttctttttcttctaccagactagaaacattatatttatttagaaagtttttagttttgaaacttttatgtttgtctaagattgtgcttatcttttgtttttgaaggtgcccagttgttgtttagaccattgttaaataaatatgaacaagaaacactagaaaatcagaacttatatcttgttggtgcctccaagattagaatgttactaggggcagaagcagtgggattggtaaaagagtgcaatgataacaccatgagagccttcacatacagaaccagacagaacttcaaaggttttgatggtaagccctaagttctttgtctctgttagaatccatttatcaaaaagaagtttatgatgaatagatcagggatcagcaaacttttttcagt

SEQ ID NO: 29371 - DNA, 2300 bp, Homo sapien
agggatctatgtcattaactcaggtttgccatttatgctgtccaacaatttgctatacttaacagaaagttttaatttgttaattgtggagatgaaataagattatacaagagaaaatgacttttatatttccattcatttttcttcctaattcctccagccacataaatataagaaaatgaaattatatggaggatggccgtgcgttctaggatgagaagataagaagagtacaatttaaaaacaaaagtctaaggagtaattcatgtctaaacttattgaagttcataaataatttgtcctgattttcagaagaaagagagaacttctgaacataaccacacaggacctacaaaaagatagctgcacaaaaactggttaataatgttgtgagctgccatgatagcatcggaggactagaaagaatgacaaactgctcctaccaagtaacgagtcttctgctcctttcttttagtttccctgcctcctgcctggaacctggaagacccagagaagggtggggagtaaagaacagaccagccttctccgcactgcagtttgttgaggcattgatctggccaaagctggatgtatggaggcagaaagtgttcattcattttttaaatttttcatttcagaattattgcttgtctgctatggacctaacactgttctaaacattggggctggtaatcctccattatctgtgggagatacattccaagatccacagtggatgcttgaaactgaggatagtataaaactctatgtatactatgttttttcctacacatacatacatactatgataaagtttcatttataaattaggtacagtaagggattaacaacaatgaataataataaaatagaacaattataaaaatagactgtaataaaaggtgaatatggtctctctctctctctccaaatatcttattgttctggcctcacctattttcagactgtggtagaccctgggtaactaaaaacacttaaagccggcagggcgcggtggctcacgcctgtaatcccagcactttgggaaaccgaggcaggcggatcacctgaggtcaggagttctagaccagcctggccaacatagtgaaaccctgtctctacaaaaaatacaaaaattagctgggcatgatggtgcgcgcctgtaatcccagctactcaggaggctgaggcaggagaatcgcttgaacccgggaggcggaggttgcagtgagccgagactgcgccactgcactccagcctgggtgacattgcgaggctctatctcaaaacaacaacaacaaaaagtcaaaaagtgtggtggacagaagaaataggagagcaggtaaggaaatggtggggtgaggagcagatgagaacaggtattaagtaggatggtcagaaagggcctcagggagaaagtgagagcccagcaaacactgagggaggtgaggaagtgagccaagcagccaaccgagggaagagctttctgggcagaaggaatggctggggcagactctgagcctggaggtggaaaggtgtctggcgatttctaggaggagcaagggttttgggatttggctgtggttggatgttaggttttaattataaaaggatctgcgtttttcacaacttgaaagtgagctacagttaaaatgagacttgttcttatacctgaaagtgaccagaaaattaggttctggtctttaagagatggaagagggaaatgtgaaggggcgtattcctttcccctgccccgaccgctcgcggttggagagcccagccacatgccgccccggctcggagtgacagcccaaccaggcctctgccttctcggccgcgcctctcccgctgccgtccggatttcgatgggtggtacagtacgttaggcacgcccctccctttctcccggcctggtctcctgttccaggcgacagcccaatgagggctgcctttttttcttcggaccggttccagtctaggttctcgtccactacgatcgcccagtgaggccccgcccctcccaccgcagttccgcccctcccggagctaccgcccagtgaggccccgcctctcccgccgcggccccgcccccctgcgtgtgaccgcatctaggccccgccgcgtccgccacgcccagcgctcggcggcgcccgccccactggcctggcccgccccccgcaccgagcactctttcgcccggcctccggttctcgccggctctcggacccgcctccgaagacgtggagcgctgcggcggctggtgagtcggggagggcacctcggaccccccagctgtccgc

SEQ ID NO: 29372 - DNA, 2300 bp, Homo sapien
atagagagccaagatcatgccactgcactccagccagggcaacagagtgaaactccgtcttagaaaaaaaaaaaaaaagaattacctgggactgggtaatttataaagaaaggttaattggctcatggttctgcaggctatacaggtgctggtatcagcttggcttctggaaaggccacagggagcatttactcacggcagagggcaaagcgggagcaggcatcttacatgactagagcaggagcaagagagtgaggggtaggtgccatacacttttaaacaaccagatctcacaagaacttactattgcaaggacagcattaaggggatagtgccaaatcattcatgagaaattcacccccagaatctaatcaccacccatcaaaccccacctctaacactggagatcacaattcaacatgagatttagagaggacaacacccaaattgtatcagagcacatacttacctacctgcccttaggtcaaaacaaccttagtctgggagggtaacagcacagagatttacctgtcttgctgctgtccaagaccatgcttctgtccgtaagttccctaataaatcaccttttgctgacaagctggatttgtctccttcattctttagtttctcagctccttctgtatttggaggtcactttgaatatacggccctttcatgaaacaaccaggaattcctgtaaaaatgttttttatatgttctggtcttccctaaaatattttatgaattagatcaaacacaataaaaaatgtattagttattactatgcctaagagattataagtggctttcccccctctaaattacagaagacaccattcctatcctagaggactttctcgtgtagttggaaagatattcgataatgtttatttaaaagctgtaacaattacacaaggctgagaacctgagagctagatgggtgataaagacaggtttacagtggggctcagaggagagaaaaagagggaggagagtcagggaaggagaacaatgaactgagtctaaaataaaggttaatatattcgcgtaggatctatcaaaacaggagcagtatttcaacccattgttttcaagcacctagaacaaagtgagcccatagtagacacacaccaaacataaatggatgagtagtagtgggtggcagaattccaaaagcaggttgcacctgattgctaaaaggcttgaaaacaggtcaagaaatactgctatttaggttagtcatttcacctcaataactcgaagtacctaaacatagacttttttttttttttttgagacggagtttcgttcttgttgcccaggctggagtgcaatggtgcgatctcggctcaccgcaacctccgcctcccgagttcaagcgattctcctacctcaggctcccgagtagctggaattacaggtatgcgccaccgcgcccggctaattttgtatttttaatagagacggggtttcttcagctcaggctggtctccaactcccgacctcagaaaatccgcccgccttggccgcccaaagtgctgggattacaggcctgagccaccgcgcccggccaacaccgactcttttcaccctcccaggtatctagagagtcgagtgggagggaaattgctggctctggccactacagtaacatcagcacctagagcagtgctcaactgactgaaggctcctgtgagtcgccctctccccctggccccccaacccgcggggaaaggctggcgggacgccacacagcacctcgattacgccatttcatttgccactgcaccatctatcggacactagctaggctcttccaggaccggacgcacctccgtccccaaggtgccacctgacagccaacaccgacggggtgatgcatgaatacagtcattattcaaattagctaaaacacctaactcattcgggtgagtctcgccagtccctctgggctgactgtcccgccccgcgcttacacccgggagcgtcgggcgggagaactagtgcatgctggctggggatggcggacgcaaagccggaggcaaggccgcgcacgcgcaaacgcgggcgcgccgccgggccgtgctagtgcgcggaagacgcatgcgctggcggcctgcgccgccttaagtgccgcgccagcccggggcggcccagtcggcctgtcagccggcttcgagataagtcccggcgcttgcgcggcggcggctatggcggcggaggaggaggaggtggactctgccgacaccggagagaggtaagcgcagccggcagggggcttcgtgtgtctccggcgcgca

SEQ ID NO: 29373 - DNA, 2300 bp, Homo sapien
gcagtgagctgtgttcacaccactgcactcctgcctgggtgacagagtgagactctgactcagagagagagagtgtgtgtgtgtgtgtgtgtgtgtgtgtgtgtgtgtgtgtgtgttgaagtttttacttaacaaatctatttaatgtttataatcaactaggcattattctaactgctttacaaatattggcacatctaattctcatgagaactctgaggacacactatttcattttacagatgaggaaagtgatatataaagtgaggcataaagtgaatgtggaatgagcctgaagtgcttatgataactttttataaattctgctagtcttaaactgattttccttttactaagggtacttacaaagagaaagaaacaaggataatttctgtatcttttacacctcttttacttaagttctattttataaaagctcctcagaatacttgacctgagcttctcatccaaactgccatattagtcacactctatgcatcatacctaccattctttaatgcattgtattcaaattcaccaggtccttctttaaacacacagaaagcaaagattaatggaaggtatctgcacttggttggaaggaagctactaagggagacacacaagtaaatagttgaactgtgtgttcgcagacaggaaggaacactttacccctcaaagtgcaagaacagttgcaggaaggcttccttgatgggtgatccttgcatgaatcttgaaggggaaatatgtagtttaccaggcagacaagcaaaggaagactttccaggactgtcaggtacagaagcacaagcataacaaaagtatatgaaatctggggaacttcaggtagtagtccaacgtggcttatgggcaggctatgtgtggtgataagagataattttcaaaaaagagaaaataatggctgtcatggatgaacatgtattaaagattatattctcccatcaggcagattttataaacattggttcaaagggtaagtccaaacaacaaacattctagaccaggaatgaagtgaatgtggaaatggaggcaaaactagcttcttccacagtgaaaatgggaagtcaattaaacttctattggacagaatttggatttctatagaccgttattttgtgttgctatcgcttatctataatttacagagttgtaaaataactcccatagaatcagaatcagataattcagaagggtgacttctatgtagttttccatcaaagcacaacttttaccctacagtggcagtaagagaaaactagttaatttttcagaggccacatcagatagggtcacagataccacaccagagtttggatttctgttagttttagtctttgagcaaaagaagttcatgaagggtcaaactgagaagtgctaggatctcctgtcatcggagaggcatggcctggcaaggaggtggacgtttgactggaatagctcaaggatggattcagaggcttgatgcagtaggtcagtcaagaaagtctgagggccagagccacggtaatggcaaacgggagagtggctgacaaacaaaatacagtcaagtagatctagtgaaagtggatgtgagggatgaagtagaaagaaggttgtctctgatggtttctaggtttctggcttaaacaattaggcgcatggtggcgcatccacctatgtgaaaggagcaagcttgtgaggagcgatgagctggtttgcccatctgagtgtgaggtgcctgtggaatatggaatatccgggtgaatatatcaggaagacagttagacaggggcttctaggagacttggtgtggagttacaagccactgacagtggcctttgcgagcagccaaggcgcgaagagcagcagctgggagaatgagccctgaacggttccaggaagctcagcctagtggaagggccaacggaggcctgttatgtgatgagccccactacagtccctcgcaatgcaatcgggcgcggccactgcctccctcggagctccgcgagaggccctccaaaaagacgctggcacggaactcgcggctctcctgcccgttggatcccgaagcaccagtcggggccccagacacgaggccccacttccgcttacgcgccccacttccgcttccggccccgggctgtggtgactggcggtgtggggtgggtcagagggcagtaggtacctccaggcgggagcagcgtttgcaccgcggtgggttcctgcgagctggtgcagaggggccccagcgggccggccccggggcacatgcgacgacctccacccctgggccccacgac

SEQ ID NO: 29374 - DNA, 2300 bp, Homo sapien
tagaaggagatactttgtacccacaattagcaagtttgttgaatactaatactgtattttggtctggaacagcctggttaggactacagattagtaagtcatccacatactgaagtagattgctatctgggagaagctgcaggggctcttttggtgaagtgttaatacagctagaaggtggggccttagctgtaaattagcttgtaattttgtaaatcacaacctaatagaacagggctaaaaaggagtaaaggaatagcctttcattttacaagggaatggctgtgtgaaacagcctcattggggttttccatcaatatccatgaggaaaatggaggactggcacattgggccatagtaaatgtttataaagctgaataactgtcccgtgtatctatgagtaacattatctgttgttcagccacaatcagatttgccctgggatcatccacagagatggaaaagacagggccgtggatggcttcaaggccccatctagaggatggatgactgacatttcagaggcttgatcataatccaggaatagaattagaggtgtttgcccttgctctcgccctcaccctcaccctcgttctgcaggatccccttgtcaggtaggttggtgagactgtggctgtcatagcctagaaggaagaggtggcccccccttcatgagggagggacactcattcttccaatttgcagtgaggacagggtcccagggatggcttgcaacctggaggtttgggacattctcaacttcagtgtccttaaaggctgcttttaataaagtacaaaagggagtttgtgggccttgctctaatttttggagtttttgtctgatgtctggggaagcctgacttataaaatgtatggccagaagggattggccctcagggctttcaggatctaaatctgtatatttatgcatggcctccattagtctagcttggaaaagggaagggtccttggtcctgagtgatctctcataatttagaaaaattaacaggttttatttcattccttccaacaaacatgttataatcttctcttcccctgtctctgtttgggctggcattggcagcgtggtattgccaattgggttctgtgttggggacagcttctgccctggctctattattaggattgccaacatgagtttcgtctgcccaaactcgagctaaagaccgtgattttttcttcgtgggaacagcaaatagttaataccacaaatgtgtcttgccaggttaaatcaaaggcaataaagcccgaaattcttgaatgaacttagagggatcctggctaaatgaacccaacttggattgaatttgccaaagttcagacaatggaaaagggacatgaactcaaattgttcccaaatctccgtttgccaccttgtggagaggcataacacttgggggattttctgaggactttgtactagtggcatatgtaactcctgtgcaagtatgtgagggtaataaagtatctggatggtaggggacaggggttgattggggcatggagcagatggcaaggggtgcacaatgagttttgacatgcgtgcattacggagatgcatagaaattctagttacttttaaatttggagggaagaagtctggtaccagatgctggctttaggtaacagggaagtctagttacctctaaattcctcaggtaaggagtttctgcctaaggatggtcggcttcatggccaccaggtgatctttgctttcaattctattggcttgatttcatctgtggcagtttctggggggaatcaaaattataggaacaaaataaaactaacagtaaaactttcatgctgactggggaatgcttaacgtttaaaaataggtgctgaagggtccaaagcaaacaacacaagccggaaaagaaatgtttaaaagttagctatatttatacaaggaaaaccaaaagaaatacttaaatgagacttttaaaattcgaggctctccactgagacttgttccctggcgccagctccgggagttccgcagagcctcgccccctgccagggcgcccggggcgaaggaccgcacggcgcatgcgcgcctcctccagcagtccctttccccttcttccccaagatccagcgcgtgctcggttgcccttctccgttccttgcaggcccttgggtcaggacccaccacctgccggaccatcattttccgagtccctccggcctagtcggagtgctcgctcgcgcctcctaaagctctcagccgagcgcgccgagacccctcagggcggccggtaagaaggcggaggggcggg

SEQ ID NO: 29375 - DNA, 2300 bp, Homo sapien
catcaatatccatgaggaaaatggaggactggcacattgggccatagtaaatgtttataaagctgaataactgtcccgtgtatctatgagtaacattatctgttgttcagccacaatcagatttgccctgggatcatccacagagatggaaaagacagggccgtggatggcttcaaggccccatctagaggatggatgactgacatttcagaggcttgatcataatccaggaatagaattagaggtgtttgcccttgctctcgccctcaccctcaccctcgttctgcaggatccccttgtcaggtaggttggtgagactgtggctgtcatagcctagaaggaagaggtggcccccccttcatgagggagggacactcattcttccaatttgcagtgaggacagggtcccagggatggcttgcaacctggaggtttgggacattctcaacttcagtgtccttaaaggctgcttttaataaagtacaaaagggagtttgtgggccttgctctaatttttggagtttttgtctgatgtctggggaagcctgacttataaaatgtatggccagaagggattggccctcagggctttcaggatctaaatctgtatatttatgcatggcctccattagtctagcttggaaaagggaagggtccttggtcctgagtgatctctcataatttagaaaaattaacaggttttatttcattccttccaacaaacatgttataatcttctcttcccctgtctctgtttgggctggcattggcagcgtggtattgccaattgggttctgtgttggggacagcttctgccctggctctattattaggattgccaacatgagtttcgtctgcccaaactcgagctaaagaccgtgattttttcttcgtgggaacagcaaatagttaataccacaaatgtgtcttgccaggttaaatcaaaggcaataaagcccgaaattcttgaatgaacttagagggatcctggctaaatgaacccaacttggattgaatttgccaaagttcagacaatggaaaagggacatgaactcaaattgttcccaaatctccgtttgccaccttgtggagaggcataacacttgggggattttctgaggactttgtactagtggcatatgtaactcctgtgcaagtatgtgagggtaataaagtatctggatggtaggggacaggggttgattggggcatggagcagatggcaaggggtgcacaatgagttttgacatgcgtgcattacggagatgcatagaaattctagttacttttaaatttggagggaagaagtctggtaccagatgctggctttaggtaacagggaagtctagttacctctaaattcctcaggtaaggagtttctgcctaaggatggtcggcttcatggccaccaggtgatctttgctttcaattctattggcttgatttcatctgtggcagtttctggggggaatcaaaattataggaacaaaataaaactaacagtaaaactttcatgctgactggggaatgcttaacgtttaaaaataggtgctgaagggtccaaagcaaacaacacaagccggaaaagaaatgtttaaaagttagctatatttatacaaggaaaaccaaaagaaatacttaaatgagacttttaaaattcgaggctctccactgagacttgttccctggcgccagctccgggagttccgcagagcctcgccccctgccagggcgcccggggcgaaggaccgcacggcgcatgcgcgcctcctccagcagtccctttccccttcttccccaagatccagcgcgtgctcggttgcccttctccgttccttgcaggcccttgggtcaggacccaccacctgccggaccatcattttccgagtccctccggcctagtcggagtgctcgctcgcgcctcctaaagctctcagccgagcgcgccgagacccctcagggcggccggtaagaaggcggaggggcgggggctcaaagcgcgcggcgaaggtgcagcagttaccagggtgctgacgtcagctagaggcagggcaccgcggaaggttgaatccacgccctggctgtgcgcaggcgccgtagggggaaggcctggcacgctccagccaaccagggcgtcacctgcagctcgtccccctgcccgggcttgcctcgagcgccctgccgccgccggagcggggagggtgttgggggcaggtggagccgggagggcccagctgagaattcagggttgggggctcagagggcactgcggctaggagcccgtcaaagcctgtcgccca

SEQ ID NO: 29376 - DNA, 2300 bp, Homo sapien
tgagcccctggataggaatgtttctgtttgcctgaggcctttgaccatgccagatagtttatgctaacaatgtgatttatagtgaatacctgttttcctgtgtctaagaccctgggctgcactgtattaatttgaccttgggtatttggggagctgagactgagtagctgaagtgagtcacataagcactaaatgcttacctgactgacccccagtaaaactctggacatccagacttggatgagcttccttgggtggcaacacttttacgtattgtcacacaccattgctggggggattaagcactgtctgtaaaactccactgtgaaatgacaactggaaacttgcacgtggtctctcctgattctgctctattcaccttttccctttgctgattttaatctccattcttttgttgtaataaaccataatggtgaataaaacagcttgtctgagttctgtgaatccttctagtaaatcgttgaacctgagagtggtcttggggacccctgacacaatgtgcctagagtttaatggttctgataagtttacattttcgtgttatctttaacttgtatttattgactcctcctttgtgtcaagcccttgccctagctgctgcctctgtttagagcatccttttcccagatatcccagatatggcttgtcctttactttctcacctttcagtgaggctctcccagactacactattacttgtgtttgttttgttttgttttgtttttaaaactaccctattttaaattgccatctctgctttccttcctagcattccgtcccctctttaccctgcagtacttgtttttttttcctttccatgtaccctatttccttatttgtgaggtttgttgtttatttttctcccctcactaaaatgcaagctccatgaagactgttcactcttcttgtcactcttcttgccaccacatgttcagttcagtcttcttcctactattagagaacacccttgccccttttcttaggaagagtggcttaaagtcccatctattcatagcatcgaactcaaagtccagggtttcccagtgatgcacaggatttttgggttttttaaaaaatcctctttaatttaatttaaaaatctgcaaaacattgtgggtttaaaaaaaaaatcaaaactaaatacaaagtttaatgagaagtctcattcctatattcctgtttcgtttacccagttcctattcacttcctatatataatctttttttttttttaatttttttggagacagagtcttgctctgtcacccaggcggggagtgtggtggcaccatcaaggggctcactgcagcctcgaactcctgggcttaagtgatcctcctacctcagcctcctgagtagctgggaccacaagcatgtaccaccgtgcccaactaatttttgtattttttgtagagtcgaggtttcaccatgctgcccgggctgttctcaaactcctgagttcaggcaatctgcctacctcagcctcccaaaaactgctgggattatagacatgagccaccacgtccagccttcttgtgttgcttttcagcaaaaatagaaatatttatcaaaaaataatgatgaagatttagtcttacactggcaataattatcccacacttgcctgcaggactcatatggctaagaacatcatattagaataaattaaacaaacaatcatttattactttgggatatttagtcattggcattttctacatttaggttataaaggaattcaaccatgttttcttctattacttatatggttacatctttttacatcttacccatatggagttcattctgttacatgttgtgagatgtagatccaattttatcttttaccaaagagctatgaaatcccaacatttttaaatactaaattatttaatactctcaatgtgtttaaaaggttagatagatatcatttctgatatttccttgttctattttgtatgtaaatgcccttaatgtttttttccaggaaatcaatgaaaattctcttaaaaggttaagtgtctacctagaaaacctccagaaaccaggcttcaagtctttgaaaccaactcagcttacattttatgtaagagaaacagaccagagttcctccgatggccaggaaccttttagtacttccggtacgttttttatttctggtgtgtcccttgcaagcttaatgttaaatgtgttcattaattttgacattgccagaatacctttggatgaaaactttggtgatagaaaaataatagcatttaattgattgttttcctagaa

SEQ ID NO: 29377 - DNA, 2300 bp, Homo sapien
aactgatgaactctgagtaagattaatgaattgtatcaatgtcaatttcctggttgtgatattatggcaataattgtataagatgtactattaagtgaaaggtatatgaatctacaattatctcaaaataaaaagcttttaaaatgtagttaccatatatacatgagtaacccatggaaaaattgaaaaatagggagtaaaattattttccacaagatgttaaaagtagattataaataatttgtagaatttttacatagctattgcttttattatagcagagtttttaatgccttccaactcttctaaaaggccctggcttttaatagaaaatcttaagtccttagtggtccttccctgacccagcccctacgtcccccttcagcccttctctttccactcaatcgcagcaggtcacatgccagccataccaaactccttattgtttccaaacatgctgttccttttcatggttccatatttgcacatgctctttttccttcccccaaaacatcccttacattcatgtgccatttctaaatcttacttaatgtttaagattgattaaattagactcccttagaaacctttgcctgaacctcctctgtatccactcagcctgatttggcatttagcatgctaaattcggatttttgtttccttgtaccccaactgtgagtcccagccaaacagggacaaactcttataatctgtacacttgaagtgtccagctcagtgcttacgtatatggtaggtgcgcaatcatatttattgcacttaattgtatttagttgctttaaagtaaattttgaaggaatagactgagttgaaatacatacactttatttctaaaacttttctttatgccatttaataattctaaactaatttaagattcttacctaaatatttaaatattagtgcttaggattaggacttactttcatttggagcatatttttttttggaacctcacaaattcccatctaaaaatcccaaagatttacagtggcttgttttgaatattaatatttccagcattacattaagtttttttatctcttacttgaactttccttcaatgaaaatcattttcttgttaaaaatgtcttaatgccatttattggaattctaaaattaaattattatagtaacataaaactaattatttctttccctttgttaacactgtagctttttgaaagattgccaagttattttgaccttcagaggaggctgatgattttagaagaccaaataagctatcttttaggtggcatacaagttgtttatattgaagaattacagccagtattgacacttgaagaatattactctcttcttgatgtgttttataatagactgttgaaaagtagaatactatttcaccctcgaagtttgcgtggtttacaaatgatccttaacaggtaaatatctaagatagaaggattacttttattccttcgtctaggtgggttgtgtgtgtaaatgcattaaattgttttgtatttcaatgggtagttcttaggaattaaagaaaaaaatgccactacttgtgttagcaaccctcttctacacactagaaaagccagcatgggaggattgaaggatttaatgtctagaacattctttgaatatattgctgagcagatttactgggcaaagtcaatccaatggaaaacattataagattaaactaatagtaaatcagtagccaacatttgtggtgtatacactgtttgccgagcactgtgctgggtacttatatgcattctgtctttagctctcacaacctcactgtgcagcaggtcacccctggcatgtgacagataaggaaggtcagagggcttgcaagtaggtcgtgatcttctgaagaagtgtgtctttgggggcagcaaagctttaagtcaatgttgctgtacttttgaggtggcttttcttgatgatttttttttattttcctgaagactaataaaatattttctctggtgggggagaggagagggtcagtggtttttcctttaatgtatattttattgcagtgacagatatgctccaagcttgcatgaactcgggcattttaatattccaacactctgtgatccagcaaatctccagtggtttattctcaccaaagctcagcaggcaagagagaacatgaaaagaaaggaagagtaagtactgccagtcttctgtaaagtcagatcattcagtctaactgaaaacctcagatatttggaactcataaatatgggacctggaaacagtatgaagcttaggaaattgactaattattagat

SEQ ID NO: 29378 - DNA, 2300 bp, Homo sapien
tgaggaggattctaatctgcagcaaagttaagaaccactgatttacatgcacagttctttgcttctccaagtgtggtccaagaactgcaatatgggtacacctggaagtttgttaaaaatattcgttggtccctccccagacctcctgaatttgaatctacagtttaaccagatcccaagtgatttgtattcatatgcacatgagaatttgagaatcttacctagggcttttactaagcaaactgccccgatctgaaagagtacagtgctcaggaagtacagctagcaagaatatgcctcctaccagaaaagtgaagaaacctcatggttataggctcgagtgctgtggcactcggagaaatcaggtattagcagaacttcgagattcaagaagctgtataggtcttaaaatcagagctgcactcccagtggctgcttcccgaactttgcaagtgctggtgaagccaatttggttgatctgtttgatcacactaaatgtgggtgctatccatgctaaccacctatcacgttgaaaaacatccagtaagtacatcccaaacacagagaacctgctcaaactcttctacgatgggaaaattttgttctcaaacaaaacttgaaaactcttctcaccactatgggtggttctgagtcactcaagaacattatatcgagtggaaattaatggacaaattaggcattgacaagcagtttctattttcctttttgtatgtgttggatattttccaattgcccctccatattcagtctcagtcctcaaccctgctgtgacacttgggagactgagtttcctggattgccctctggcttccagttgagttgggccaatgggaagccctggcaggagatcagaagagagctgggttcaggttatttattacctcagcttcctttgtgctggactatggcttggatgtagccctcaactgaaagccacagtttctctcagatggcctgctcctaggggtgagaatagcttctaaattttgctagccatgggattctgcaccactccgtgttgcatttccttaaccctgtccactttgtgtaaatcgccccttgtgaactctccccacttaccttgtttgaatgtgccatctgtttctctatcaccttgtcaccatcttcctggtgttcaggatctattctctgtttccatctttggtgactggggcattaaaaaggggtggatcagatgagtaaagcaaagcctcagggcacagatgggcatcatcaatgcccatctgaaagatcaatcgtcaacatgttgcagcctgccactaggaagcacaaaccagaggactaccaggacagcagcttgtagcatgccctccaatggcagcagatggccttatggctttggctgtgcaccctcaaggttctctggcactggcaatagatgacatttgctcctacagggggtgggcaacctctccaggttgcttcacctcctcttcaagcagcccctccaccccctacccccaacctactcctcccagattccacatattattgggcaatggcatcattgttcactcaccaggcgagcctagttagaattcacccacaggagaaaacgagtgaaggccgtgggaagctaaagtatggtgcacctctgagctggctatgaacaagtattcctgggtatggtgatgatggggatgagctcgtcttggaaaggcaggagttctggcacctagcttcccgtaggatctggttcccctctttgaagtgtacccaggcgaagaatgagtggctcccttaaccccttctcctggccaggaccagtctgctagatactgctggccctattttcacccctagctttggatccctttcttccctggagggaaagaggccttcagggcagccccgcagacacgacaggagggatgcaagaaaacaggcgcggctgggcatccgagcgtggaagggaaatgtccaactgagggaggtgagggatgttggacaagccccgccgcccgccgcaccggagccggagagaagcagagacgttgggcctcccagtttcctagagaggccgcggagggccccgggcgccgacgcgcgtgcgcgactggagccgccgggaggtaggcgcgggacgggcggctgcggtggcggcgggtggaccgattgtcgctcggcggcgggagtcggtgagaggcctggcggggcgcgggggtgggggtggcggcattgcgggcgcggggctccccgaagtccgcggcattctcgggcctgcccgggcggcggacggggcccggcctggaggctgc

SEQ ID NO: 29379 - DNA, 2300 bp, Homo sapien
tagccaggatggtctcgatctcctgacctcgtgatctgcctgcctcggcctcccaaagtgctgggattacaggcatgagccaccacgcctggcctccatcccccagatttcttaacaggctgacaggatccgcagtatgacaaaggtggaggaggaggctagaggggcaatgtcagtcatgtaacctggaggggtgattttgtgcactgtggtgtatgtttcagacaatgcaggagaaaggaaagagagttgaggatcaagaaaattagaattaaatgtgattgttggggagatgtctcagacaaagttagaaaggattactgggggcctaaagtttttcagggccttttgaaatttctaaacttgtctgggcacagtggctcatgcctgtaatcccagcactttgggaggctgaggcggtcagatcacctgagtccaggagtttgagaccagcctggccaacattgtaaaaccccgtttctactaaaaatacaaaaattagctgggtgtggtggtgcacgcctgtaatcccagctattcaggagtctgaggcaagagaatcacttgaacctggagggcagagattgcagtgagccaagatcacaccactgtactgcagcctgggcaacagagcgagactctgtctcaataacaacaacaaaacaacaaaccggagctcatgacacggctggaattttaccatttgtgaatatgtattttaaatgttttcagcttgtttttttgtatttttttccattttcttttaaaagatatgcagataggactttttcctctttaactgtcttattttgggagcccccagatttcagggaagagccccacactatatgagcacatgagttggacatttctggttccccgccctgagttggacattgccagtcatgtctgcagaagaaccatcctgcctgttggaagctgcagttttaccttctggttcttgcctgctcatcccctaccatactaagcctccagagtgtgggaatgtgcaccatttcctaactatattaactcactgccaccagtctggtgtgggtgctcagtacaagtgaatcctgaaaaagcctcaggctcttggatggaggaaaactggctgcatttgaaagccatacttcaatttctattggtcactgctagtataaactttaattattgatttaaacaaattttatctggatccaattatgttgataaattatttttaggtttaataatttgttagattcatttcctagcttttctaggtttagaataaataatgatttatttgtcttttgatgtcacttatgttgtgcattagcaagaacttcagaaaacatggaacagtagatgtctttctcttaacgcttgggggaatgtttttagtattctgcagtttcatatcgtgttcattgttggattctgatgttctgttagatttaggaagtttccttctaatcttatttctagaagaagcagtgtagtttagtggttaagagcacagattttgttcccagtgccctaggttcaaatcctgagtccaccactttgttaggtgtgtgatcctgggcaaatcacttaccttccttgtatcttattcctccatctataaaatggagctacctcatagggttgtgaagaatacattattgtaacaatactgggcacacagtgcacagtttcccaattattattatacttacagttttgttttctgtttttttttttgacaaggtctccctctgttgctcaggctggagtgtagtgatgtgaccataggtcacctcagccttgaactcctgggctcaagagatgctcctgcctcaacctcccctatagttaggaatacaggcatgtgccaccatgcccgactaagtttttatttttattttttgtaaacatggggtttcactattttgctcaggctggtcttgcggtcctggcctcaagcgatcatcctgcctcagcttctctaagtgctgggaatacaggtgtgagccaccatgcctggcctatacttaaaaagtttttattaggattggttgctatattatatcaagtttaaaaactccatcattgtaattttatgagttatggttttttctttttgtaattcattttcttgacaagtttgcaaatatttgcaatttccttgtacttttcaagtaaaatctatttgttcatagtgaatttttattaagtacagaagtagattcaatttggtaatgctttgctagctttgcaaaagaatttggaaaaaattttgtttatcttattgctatggagagtttgtataacat

SEQ ID NO: 29380 - DNA, 2300 bp, Homo sapien
aggagaatcacttgaacccaggaggggaggcggaggttgcagtgagccgagatcacaccactgccctccagcctgggtgacagagggaggctccgtctcaaaataaataaataaataaatgaaggaattcctaatgctaaatgccacataatcaaactgaaattttatagaagtatgtgaatcccctaacagaccagtttttcctgcaaacaggagattcatagcaaccattcagaaagggcccagttaaccccagtcagcataaggaaggccccctctgctttaatccttaaaagaaaagtaacctgatgttaatcaatctatttttgctattgtttggttctcttgttcccacctttaaaaacccactgttctgccacatgctgttagtctactttatagaagtttttactattttgtacctgcttctccaactcataatgttacacagcctctccaggttgtagcccaagaagcagcctgctctttctcgttctctctctttcttccttctctctttcattccttttctctctttctcacttccctccctcccttcctcccttccttccttgggtctcgctctgtcgcccaagctggagtacactgccccaatcatagctcactgcagcctcgacctccccggcccaagcgatccttccgcctctgcctccacagtagctaggactacaggcgtgcaccaccaagctcagctaatgctctttctggtctgagttttgaccctcatcctaacctgttgttctttgagtacactctgggccttgatgcgttgggtcattcctgctttcccaggtggtaaccgttcctgggcagggattttagttttccttggaatcttgccctcctcactatcctgcccacaaccttctacccctagcttctgggatctcagctaggagccatgctatccccaactctccctctacagggacgtgggacgggagagcttttatgaagcacagtagtgaaaagaccaaaagatttggattcagtggctattccagttactgactctatttccttgggcaactcaaatcaatgcatggcagccagtgtgttatgagctaccggaagtatacagaaaagtaccagaaaaaatacaagcattatcatcagtcgctgtcaattaaataactctgttacatttcaacagtgttcgtaaccacttgacattgatgtatttgtgtaatttctattatctgtttttcccacaaagctgtagctccatccaaagtgggcaactgagtgtcttggtcagtcatgtgcagcctgatgacccttgaacagttgcaaaagtgcgcctagggcttgtagcatttacttaaaaggggataataaactctcacggccagtgctgggcttattgccttgtttgggaatttctccattcaagggttttatgtttggggatgtgctggccctatttttttgtttgtttgttttttgagacggagtctggctctgtctcccaggctggagtgcagtggcacgatctcggctcactgcaacctccgcctcccaggttcaaacgattctcctgcctcagccgccgaagtagctgcgattacaggcgccgcgccaccacacccagctactttttttttatttttagtagacacggggtttcaccgtgttagccaccgatctcctgacctcgtgatccgcccacctcggcttcccaaagttctgggattacaggcgtgagccaccgcgccaggccgctggctctattttcaccgctagctttggatccctttcttccctgaaggaaaagaggcctccagggcagccgtgcagaaccgatgggagggatgtaggataatacgccaaagccgatagagttctggagcgcgcctgggcatcagagcgtggaagacaagtgtccgcggaaggaggcgaaggatgctggacaagccccgccgcccgccgcccgccgcccgccgcccgccgcccgccgcccgccgccagcggccctgggcccagggagaagcagagatgttggccctcccagtttcctagagaggccgcagagggcccggggaggcgacgcgcgtgcgcaactggggaagctgggaggtaggcgcggggcggtcggctgcggtggcggcgtttggatgattgtctctcggcggcggagtcggtgagcggcccggcggggcgcggggtgcggagcgggggcggctgtgcgtgcgagagtggcaggtgaggccgggcctggaggctgcacccggggcgggggtctggccgtggatcccgcccggccgcgccgagggcatacc

SEQ ID NO: 29381 - DNA, 2300 bp, Homo sapien
tgctatagatattctctttttttattattacatacatatagggcaaacgtggcaggccttaacattaatggatacaggggatgaactgagaggaaacaaggatagtaaacacaatactagaaaacacctataatacttacaatgtgtcaggcaccattctaagtgctttatgtattttatctcatccaatcctcacaacaactctacaattcaagtatattattatccccattttccaaataaggaagctatgcacagagaggctaagtaacttgtccatggtcactcagctcatgggatgacacccagggttctagtttgggtccctgggtgaatgataatactttttacagtgatggggatatgggttggagcttcagggttgcggatagatggtaagtttcgtttcaggcatgtagaatttgagttacctatttgttagctctcataccaaagcttgagtgatgattttcaagagaaatcgagttggagtacagaattcctaaaagccttctgtggttgtctttggcccaaaggtaggtgtcctaaggtgctatatcgaggcatcatcaagtgtcttgcccactggggcccaacccagtcatggtagatcgggccaggcccacagtgttggtcacagaagtgcctctgaagtctaaacacactgctcagatgggcctggtccttacagccaatgaaagccaaccacttgtgcatgaaacagctctgaagaataaaaaacctcaatcttggtttccaaatccttgtgtctcctataataggaagccaggactgcaggacaacacgtggtcaaggagacctgaaaatcaggtctgagagcatttagcctggccttgggagatttcctcctcaagaatcctaagcttctggggccttgatttgccttccacctcaagaatcctaagcttctgaggccttgatttgccagtaggcaatgtctagcatcaatgtcaggcagaggctggggttcctggttttaaatagccaaaacctccttgtgagatttccaaatggagagggggaccttgatgacaggaaaccaccattaggatcaatggacaaagattgctccaagagattacttttaagcttgtggaaactctggagcaggacttctggtgtctttgtttctatcttggctcacacagatatatgaggaacatatgtcagggccagggttaggcccagggcacctttgaaatattgccatccctagacagtccaggagactgtttactttgggccctgtaaaggacctatctcctgtgctataataaagatacacagttaacttcatcacaccctttgcccttcacccgtggtcattaacacacagggcctgctcaaccatgtttgtaacaaggaccagttcatatcctccttctgtatgcaaaccattcttcaaagtgaaagtcacctgggtaccacctgccacccagaggctagacaactgcctactaggttacaaactgtccccacaccttctcagtttatctgcttcttggtctccctaggaacctctacatggacaccagaatgctggtgctgtcttacgaaatattaaccacatttatgggccaaaatatcacaatttctagacatgcttcttcatttttaagatgggagatgcttgctgctcccttcactgagacttcagattgggcatcacacatggtataactgactgctcaggatatgccaggccttttgctatgtagtgtctgttaacctcatgcggtgctcccagccctgtgaggtacgcattatgctctgcatttttttcagatgagaaaacaggcttggaggttgggtatctttcccaaggacacctggaggagaaggtgtagagctgggacgcgtctggatcccccgactatggcctgagagcgggatgtgagtggcctgggccctcgcgagaccccgaccccgcccgcggcaggtggccgggcacagccgagaagtaagccctgccagctctcccgggtgcggggacgcgcgcgcccaccttcgcaaacgagacttccgggatcccggagggggcggaagtcgaggcctctctcgcttccggctcggccattgtttttggtctaacgggcagtagagtgtccggcttcggtgccgagtgccaccgcgagtgggccgagacgcggagggaggcgcggccggagctcgggtcgccgacgctggccaggaccgcgcttcttcccggcggcaggcggcgcggtccccgtgactctcagaagccgcccgatgtagagccgcttctttgtctcataccc

SEQ ID NO: 29382 - DNA, 2300 bp, Homo sapien
aagtaagttaaagatcacagctcccttaatgtacatgaatattcgtgtgtgtgtgtgtgtgtgtgtgtgtgtgtgtgtgtgtgactgagtttcactcttgtcttccaggctggagtacaatggcgtgatcttggctcacttcaatctccagctcccgagttcaagcgattctcctgcctcagactcctgagtagctgggattacaggcgcctgccaccatgcccagctaatttttgtaatatttagtagagacggggtttcaccatgttggccaggctggtttcgaactcctgacctcaggtgatccacccgcctcagcctcccaaagtggtgggattacaggcgtgagccaccacacccagcctattctttttaagtttcttgatgtagtggcagtagtcttgtgctcttcaggagagtgtcccgagttctacgtcccacatcaactgagggtgtgaacttgtggaggacttttgtctgaatctctttttcaatctctatacaatgtggcggagttgtgccacctacatgagccaatggagaagaaagctcctggtatactttaagtactcaacaatattaaatactgaatatttgtcaattgacgaagtacttcaaaagcttgattctcagactccttcttagataaatcattccctagattgtctcatcctgtcctgacaacttccaaatttatgtctttagctgtgatctcttcacggaagtccagactcctattccaactgcctgtttggcatttcatcttggatgtttaattggcatctttaacacatccaaaacaaaactattaatccctctccctaaacctgttcctttcaagctactcgatttctaaaagaccatcccatgctagttgctcagatcaataaccatggagtcatcagtaaccaacattcaattcattagcaaatcatgcaggccatgccttcaaaatatatgcagaaccatttctcactacctgcatcacttctaagcctgtccaagccactatcagtcctcatctggaatattgtaatggcctcttaatctccctgattctactcttacccaccttcagaccgttctcaacaagacagccaaagcaaactaaaaatataagtcaaagagcaaaattcatgcaaggtttatgttagaatggctaaggacagacagcaaagaattcacagaatttatagtaacaggcttcttggcttctttcatgtctcatagctaacaagtctttgaatatgtggtaagggaaaaaaagttagatcatgtcgttcctctgtccccaagccctccagctgttatgcagagcaaatccaaagcccttatcatagtctacaagatcctaaatgtgcacctctccaccccactcctgattaaagaattttgctcctaatggcccactatgggaatactctttccccagatagccacatgcttcaattgcccacttcctgtctctgccctccctgtcatctgtaaaatagtcccaccactatctccctctctccccttactccctctctccccttactgctacgttctacatatttatttatcattgtctccttgacttgaatgtaaactcaatggggcagagagttcattttcttcactactgtatccgcagcgcctggaacagtgagtgacatagtaggcacccaaaacgtcttttcatatgctgccaataaaccatagctgatcctggctttgaggctgaatgacccagatctgtggaaggaaagatgacctctctgctcagcaaccggagctgggggtgtaactttagggagtctcagcctgaggctggcagcctggccacccagatgctcggtctctttccgccctaaccaagccccctgcccagcttccaccacttccagggccctcctcacattggctgaagtcgccaagcccttccatccaatgatagggcaaagcccggaagggaggcagggccagagcgtcggccgaccgcgcggggcttctgaggggcggggggactccagcccgcgggcacagagatgtggaaacctcacgaagcctagaagggccggagggacaggctgggagttagctgggagttgctgacgcagttccttctgcgctttgttcaagatgtgggtctggcgctttcggtgaggggtgctctacagtctggcgtggggggtcgggccgggttctgggagcgtgtgggagacgcaagccaggaggccagggctcctctgcggctgcccgctgctgagatgggcgcggcagccaaggggtcgttgtgggcctcccctttctctcgt

SEQ ID NO: 29383 - DNA, 2300 bp, Homo sapien
gaccaccaggatggctagatagtagaaaagaaagttggccggcacagtggctcacacctgtaatcctagcactttggaaggccgaggcgggtggattgcctgagctcaggagtttgagaccagcctgggcaacacggtgaaaccccatctctactaaaatacaaaaaattagccaggcatggtggcgtgcgcttgtaatcccagctactcaggaatctgagacaggagaatcatttgaacccgggaggcggaggttgcagtgagcgagatcgcgccactgcactccagcctgggcgacagagtgagactccatctcaaaaaaaaaaaaaaaaaaaagaaagaaagaaagaaaagaaagttttattcacaacatcagtttacaaactcggagagatagtctctggcttgaactgaaagtggtgctctctctgaagaacaaagagaaggttagaggttttacaaaaaggaggaatgttacatattgctctttgagaaagttcattggcagtagtaagggtgtggggagctgacaagctccagttggtgagcaactgcggtgggcaaaattagtcctagagttgcagcaacttatctcagaagctatagataaaactggttttggcttataataagcagtttcagcagtcaagcttacagagaataacattcctggagcaatgttgtgtaccctgagtgcttcccccagctaatttctcgactttcttttattaggtatgacaaaaatgacccaattcttatgatcagctttcacatttcttagcatttaccaccacctgacacatttttatatttgttttctgtttatcccactagaaatgtaagccccatgagaacagagactttacctctttatctatgtccctagtgcccagaacagtatttggcatatggcaagtactcagtagttgaatgaatgaatgaatcaaggctgaagtttaagtatgttgtttaatgaatgccaggagagaacataaagaaataaacagaataagcctggcacggtggctcacgcctgtgattccaacactttagaaggccaaggtgggggtggatcacctgaggtcaggagttcaagaccagcctggccaacattgtgaaaccccgtctctactaaaaaaaaaaaaaaaaaaaaaaaatagccaggcatggtggcacgtgcctgtaatcccagctgctcaggaggctgaggcagaagaatcgcttgaacccgggaggtggagattgcagtgagccaagattgcgccactgcactccagcctgggcaacaagagcaaaactccatctcaaaaaaaaaaaaaagacataaacagaataacatgaaccttgctcattgaataaacattcatctacaacctatatggcttcagctttgtactaggtgctaaatacatgggatccatgcagacatggcctttgcccttttggagacttgtttcagccatagtcccatataggggtgtcagttccagaagtccaaacttaagagactgaagaccaaagagaggatcagagtgccagtttcctttatatacacctgactttacccagggcgatggacagctagaataacctcttctttcaggggagagatgtccctaccatttgcacattaccttgcaccatcaacttgattattatttaatatcatagctccaatatgtcatcatgtgggcaagagatacaccacagtaagcgaattcacaagagggtgatttataagtcatgttattatttatagtgagaattgcataagttcaagaagagaccagaaaagtcacctaccaggtcattcagacgtgaaggtcactccctatcaacctcaattgaaatgcaaatcaaaatagaaatgtccaactctcttaggaggcaacaggcatcctgagaccctgggtcctgtctttcatctctgcacccttccggtctgaaacagcggccagttcttgttcgatgtaaggaacactagtacccaagggctcaggagttccgcctctcttccccagttctgggaaaagaaacgaaccatagagatgtggcttcctagagatccgggatgaggggcggggtgcaaccggaagtcgcagtattctcggctcggccattattctgtgcctcggctgccggaagggctcgttcctgtgtcatctcctagcggcctggcgccgaggcggcggtacgcaaggctggagccgcagcgggagcccccggtgagcggggtgggctcgggggcgggtgggcgtgcagggaaggcggcccgggacgcgggcctgagcttgctggga

SEQ ID NO: 29384 - DNA, 2300 bp, Homo sapien
attatattgttggtaataagaaatgattgaaaactacccaaacattccatcagtgctggcatgaataaattatgatacatctatgcatccataaaaatgcggagaggggctgtgtattgacaggaaagatctctaagacatattattgagaagaggaaaatgtaccacgtcattcatggtgtcctaccatttgtgaaaaaaagggaactagaaaacaatatatgtacacacatatgcagaaataactggaaagatagataagaagctaacggagaaggaaactttacacagtatacattttataattttaaattttgaaccaagtgaatatattactatttttaaaaataaggaaaaatgtaaagtaaagcctctttaatgctgaaatgtaagtaaaatcacttcacttacaggacaggatcatctcctcagaatactgcctctcaagagcagtagttagaatttaacttctgttcacctctctgctctactcctacactcttgcctctgaagtttactttccttctctggtcttccttcacagagttatgtgtccttccttgcttttgaaaatagagtttctttcttcctggaatggctttcctcatagtccaatgatccttttatttttccttaaaagcccaatccaaaagtacctttcatggctgggtatggtggctcatgcctgtaatctcagcactttgggagtccaaggcaggcagatcacgaggtcaagagattgagaccatcctggccaacattgcgaaaccccgtctctaccaaaaatacaaaaattacctgggcatggtggtgcgagcctgtagtaccagctgcctggaaagctgagacaggaaaattgcttgaacctgtcaagcagaggttgcgctgagccgagatcatgccactgcactccagcctgggtgacagagcgagactccatctcaaaaaaaaaaaaaaaaagaaatttcctttcatgaatcctttctgtagttttatgttctcctattacttgtacttaaacattatattgaaattatgtttatatttctggctcccctgtttgttataagcaagctctctttaagggtctgtgtgttcaaataaagaggatgttttcatatgtcactgatggtgatataactgttataaccttaaaagcttaaaaatgtttttatccttcagcccaacaattttctcctaggagtttatcctgaagaaataagcagagatgtaactaaaaatttgttatcaaggatagccgttgtgaccttattaataataggggaaagttagaatttatctatgataattaaactatggtaaggacatagttcagaataatagcagtgattgttttctggttttgtgtgttttctggttttataattagaaaaatgttatttctaaagagcagatgatttctagagagcaagtctaagttctgtataataaaactctattcatatttatccatctgtgggactagatgtgaaaggaaaagaagaaaaggcaaatttatccaaatattttgattaacagaaagaacaattttcagagaattaaaggcatgtagagcaaaactacacagaacttaattcatcctttctttgttaattgaggaggtggttaggattttctctcatatgtatcatgattaatgattacttgttaactctgcggaacataggaaagagtactagttacagaagggtaataagtaacatttaaacccgtataccaggcactgttcaaaaacttgaaatgtattatacatcaaattctcatgacaaccccataaggtaggaactgttactatccctattttacaggttaagaaactaaggctcagaagtgaggtacttgttccaggttacacaggagtagtcaggatgctcattgttagagtggtaaagagtctattgtaattagctgaagggatcctatgaacaaagaccaaaggaagttcatgtgtttggtttcagcagtctcgtgcgtaacatgagtgtttgtatcccagagccttaggcagggggtttctgtcagaggaagcactctctagagcctggaaccttgcactcacaaaggttctctttattactgggagctgactgggagctgactggggcctggaaagctcagttgtttctctgggctaactttaacaatgatttcttgaggtcttgtagatgatactctccaagctgtaaggaagaagtcaaggattaaggagacctggactggagaggagcctttttcaaaaaacaacaatgacaagagaaaatgtagcccacaatgctctg

SEQ ID NO: 29385 - DNA, 2300 bp, Homo sapien
tttattataccattctctgcttttgtgtatgtatgaaaatttcgatatgaaaggtataaaacatggatgaggaggcttgtttttaaaagataatactagagagccgttaggtactaagaaccagaaatagactcacataaatggccaattgatttttgacaggggcaaaagcaattcaatggaggagggatcgccttttcagcaaatactgttggagtaattggatatccataggcagtaaaccaacaacttcaggacctaggactgagctaagaaggctcagatgactcaaaagcatgctccttagaaggaaaaaaaatgttaaattggacttcatcaaaattaagataatttaccctgtaagagacctttttacaaagatgatattacaggttgggaaaaaatatttgcaaatcatatccaacaagggatttgtatgtaaactacataaagaactttccaaatttaacagtaataagtaaatacaattagaaaataagcaaaagacagacatttcactgaagtatagatagcaaataagcaaatgaaaagatgttcaacatcattaggcatgagggaaatgcagagtaaaatcgtgagatatcacctatcagaatagcttaactttttttttttaatggtggtaactgctggcaaggatgaagagaaacaggatctcatacattgctgggaatgtaaaatggtacagccactctggaatataatttggcagtttcttgtaaaaccacacatgtatatgtcatgcttcaggaattgcacttctgagcatttatcccagagaaatgaaaacttgcgttcacacaaaaacctgtatacgaatgttcatagcagctttatttgtaatggtcgaaacctgtaggcaacccatatatccttccttaggtggttaaaacaaattgtggtttatgtattaccatggaatacttgttactctgcaataaaattgacttattgatatccataacaactcaaataaatttcaagggaattaatgctgagtgaaaataatcacaaaaggccatattctgtatgaaaatattcatataacattctcaaaatgataaaactatagagatgaaaaatggattaatggttgccaaaggttagggatggtgggaggaaaaatggggagagggttggatggaactattaaaaggtagcaccagaaaggtctttgtggtgatggaacacttgtgtatcttgattgcagtggtggttacacaaatctataggtgctatacctatacacacatactgtaccaatgttgatttcctttttcattttatgtaagatgtaaccatgaggggaaagtgggtgaagggtgctatctttgcaacttcctgtgattctatcatttcaaaataaaaagtaaaaaccaacaatggcaacgaaaacccaaaactaaagagctgtaaccaactaaagtgtgtgaaactgatttgaaaaaaagttataaaatacatgttttaggacagttgggaaatttgaatatgactggttattagatggtattagggaatttttgttgattttcttacctgtgacggtggtggtagtttgaagaatattcttaatcttaagggatgcatgttgaagtatttggaatgaagtgttctgatgtttacaactttcaaaaaaatgattttaaatatgtattgagagatcaggcaaacatagcaaaatgttcattgttgagtccacatggaaaatacgggtattcaatgtgccatactttcaactcttctgtactctgatattttcaaaataaaacatttgaggggaaattatcagggctttctacagattaatgctgtgtagcttcaggctcttgggtgcgcgcctcgcctgagtgtctcatccctgcttgggatgcgcccctccctgaggctcacttagagcttccaacagcacaatcctcctaagcgcttctgccccatccctggtctggggcgacattggacacccatcgagaggaaagcacctccgaggttcctagagaggccggcttggcgacttggggagccggaagcccatcccgaggcacttcctgtccggtcattgttctcgtgccggtagaagctgaagtaccggtcagccagcctcctgctgcagagccagtgaactcaggtcgggcttctcagctgcgcacagtgagtggggtcggagggggtgggcacgaacgtcgagggagaaaaaggggctctcccaggggccatggccctaggagcggcccctgcgtcctttccccggggacaccagccttgtctgtcggggtgcg

SEQ ID NO: 29386 - DNA, 2300 bp, Homo sapien
taggaatctcttcgtgcaactcttgttcctggggtaacacaagaatcattatccttttcgatgcttatttcaacaatttgaggaatttcggtggcacaattttgatttctctttgaagaattatttgaagggcttaatcccagttgtaaggcaacatcttctcttaagggacggttttggtgctgaggagttgagtctcctatgctgatgtttttctctttgacagacagacatttgtcggagttcatgttaacattttcactacagcttcctccttcatgaccgaagagattctgacacctgtacttgaagttattccacattttccccactttatccattgattataaaatcatcgggggcgcacggggcagcctcatccaggacacctaaggccaggcaggacgggcctggacggcgcagtcacctacagggcgagtccacccaccctctggtgcgtcccgtcccctccgactgcccagcgagcgcagcctcgcttcctccggactgagcctggggaccccagctccaccggatgcccccaccaggcccctaccaccttccctggtgcctccccctctgcaccggtttccccttccctctcctctcaacccgtccccgaccccgccgcccagaatggaaaataccttcatataatctcttttggtgggggtcaggtaaatataatttagaaggagtttctatttctcacagggaagcaacattcatctctggaatgtacactttaggtaatctgggggaagaaagataattttccagcagttttagctctcaaacaagcagtatacatctatgtggagtaactatttcctgtaacttgttggaagttgatggtgacctagtcattcatcaaatactgattgaatgcctagtatgtcagccatgctctaggtgctagggatatagtatgaatgaaacagagaaggcccctgccttcatacagcttacattctaccaagggagataacaattggatagagtgagccaaagaaacgggaatatgccagctacgtggtacatcctttcagatgtgcagagagcttgctttctggatttaatctatggtatcctcatttttcagtttatcaaaaatgccaataatctaaatttcacctgtttctgattaacgaattcaacaagtatttattgaatgccttctctaccaatcattgtgctaaacattgagatataatgataaataatagctccatatagctgattagagttgtataaaaatgaactgattgggtctttcacagttgtccttgggtgggatgctacttgtgtgtatcttcctaacaatacctacgaaagaaatacaagtgtatgcatttaggggggcactgaatagaaggctagctagagctagaataactaatagtgatatgtgagtgtaaagacccataagggcaacagtctaggtggtcaagtgagaattggcattgggatttgaagaaccaggataaattggatagctgaggttagggagagcaggtagaaggaagggagagtattccaaagggaaaatcctgggaaaaagatctagagtcaggaagaggcaagggatttcagggggccaatgggaattcagtaactttagagcagaatgtatatgatagccaaataagagatgttgatattgaggtcagtttgtgtgggcctagattgggagtttgtcctttattctaacataacaggggatcactcaaggttcttaatagagactattttaagcaggtagaatatactagtttcttgttgagatggcccattccggctcctacccagcatcctttccatccctaacgtctccctctacagttttcctgagggttgaggtagccactgtgtttcaggccaagatagttgttaatgggatatcaggaacgcgactgggcttgacgggaagcaaggctggagttacaggctgggcttggcgggaaacaaagctggagttacaggctgggtttggagggaatgccttcttctagggtcccatagagatgttcctcccgcttcctagagaatcagagaatggatgcgcgagctcgctgctgacgcactaccggccgcgccaccattcttccggtttcagaagttaaggctggtgtcctggccccagtccacctctgggagcgcctgcgccgctccgcggagagtccgtggatctcacagtgagcgagttgggacccagggaggggaaaagagaggaccccggcgagccattgctggggcggcgggctggagggttatctgggaagtcagccccggcctcggtc

SEQ ID NO: 29387 - DNA, 2300 bp, Homo sapien
aaacctaatcttgacgatatgtggcattagtttcatttatccagtggccacatcagggctaaggttattttagtgttttggaacgtttttggtgtccatccctaccatccgttttccacctcattgaaagaagctcagcccaaactgctattaaactccagattacggtttctagtaacctcaggtgcctccctccagacttaatgtcctccacacactacaccctgctgatttggagactctttgaagcctaatgtttggggaatgaataattagacctagggtctctggcctgtgagatgttagggctggagggaagaacttgctatctgattccaaagaagtgctgagaatgtgacacctggagagggaaacttaacattattgttacatggcatgtcaactgacaattttacaaagggtcactttttagccaaagatagcgatggcctcagtctgtggcaccagcattcctgatttgtgtccaaaagggactccattttgggaaaacagccaatctgaagattggaatggatatttttttttttttttaagatggagtctggctctgtcacccaggctggagtgcagtggcatgatctcggctcactgcaagtccgcctcccaggttcaagtgattctcctgcctcaccctcctgagtagctgggattacaggggcacaccaccacgcccggctaatttttgtatctttagtagagacggggtttcgccatgttggtcaggctggtctcaaactcctgacctcgtgatccgccccccatggcctcccaaagtgctgggattacaggtgtgagccaccatgcctggcctggaatggataatttctctgctgcatctcattaatttatacagcaagtgttcacttctatatgctgcacactagggatatgatggtgtgcacacagccctattgtcctgagattgcagatcagtaggaatgcttggaagtgaataaggtactctccactcatgcctttatctctggactttacctgtcaagatgagcccatgtgtgcaaatatttcctgagttagagccagcaagatctgaagttttgtagaaagggatgggtgtgctaccttgaggccctgaaaggtcagtgaagtcagggcagaacaataggtactggagctgggatttgagacacagacaatagtcctaacatttactgaagatttaaaaaatactagatgttcttagtaattcacacgtattaacctcacttaatcctcacaacaaccctgtggtaccattattatacctggtaagtgaggaagcaggcacagagaggtaaagttgcaaagttcatacactgagaatcagggatttgagcccaaagcagtgtttgatttgttttgttttgtttttgagacagagtctcactctatcacccaagctggagtgcagtggctcagtctctgctcactgcaacctccccctcccaggttcaagtgattctcgcgcctcagcctccggagtagctggaattacaggcgcccaccagcacacccggctgatttttgtatttttagtagagacagggtttctccatgttgggcaggctggtcttgaactcctgacctcaggtgatccgcccgcctcggcctcccaaagtgctgggattacaggagtgagccaccgcgcctggcctgcagaactttttcttttggccacctgaacaaagatcctgggtcagtaaggtgtcaggggtttctgtgaagaggtcagttttcttccagatgaggatgtgtgtgaggaaggtggaagccagttttgtgaaaagccttgagaatccccaaaggacagtaacataggaagctaaatgtggcggacttgcaggatgaactgatgcacagtaagagctccttgtggtcgacccttctgacttccatcccgtttccctgtgctggaagacgcacgccaggtggggtcgcaggttgtttctggtgccggcttaaccggcgcagcaccgaaacccgtagctgcgtgcgggaaggaaccaccgagcggaagccgctcccaccttcctagagaggagacggtagtggttattagccgaggcgcggactgctgacgtcacgccggctgggcgcgtccgggacttactcctttccgcagggcagcacccagggacctgagtgttgcaaggtgcgagaggggagcgccgcggggagcgccgcgggaagcgcatggtgagcggtttctgctgtgcccggctgccgcgggtcgattccagctcctccctcgggaagcagggcgtttttcttcctggagggcc

SEQ ID NO: 29388 - DNA, 2300 bp, Homo sapien
agaccagccttggcaacacagtggaatcctgtctctacaaaaaaatacaaaaattagccagatgcgttagttcatgcctgtagtcccagctgcttgagaggctgaggcaggaggatcacttgagcccaggaggtcaaggctgcagtgagctgtgattgcaccactgcactctagcctgggcgacagagtgagaccctatctcaaaaaaaaaaaaaaaaaaaaagtcctagatggcatcttcttccaatagaaggctgtttcatctacattgaaaacctgtttagtgtagccaccttcatcaactatcttagctagatctgaataatttgcttcttcatctcatacttttatgttatggagatggcttctttccttaaacctcatgaaccaacctctgttagcttcacacttttcttctgcagctttctcacatgtctcagacttcacaggatttaagagttagggccttgctctagattaggctttggttaaagggaatgttgtggctggtttgctcttctatccagaccactaaaactttctctgtatcagcaatgtagctgttttgctttcttgtcattcatgtgttcaatactgatccctccggccctagacaacaatagtcaggtgtggctctttcctgaagctcctcttcttctatttagacccaggatatttacggcttctgcttactcttcttttttttcttttttttgagacggagtctcgctctgtcgcccagtctggagtgcagtggcgcgatctcggctcactgcaagctcctcctcctgggttcacgccattctcctgcctcagcctcccgagtagctgggactacaggcgcccgccaccatgcctggctaattttttgtatttttagtagagacgcggtttcactgttttagccaggatggtctcgatctcctgacctcgtgatctgccgcctcagcctcccagagcgctgggattacaggcgtgagccaccaggcccggctttttttttttttttttgagacggagtctcgctctgttgtccaggctggagtgcagctgcgccatctcaactcactgcaacgtccacctcccgggttcgagcgattctgtctcagcctccggagtagctgggactacaggcatgtgccaccatgcccggctaatttttgtatttttagcagagacggggggtttcaccatattggctattggctctgctggtctcgaactcctgacctcaggtgatccgcccacctaggcctcccaaagtactgggattacaggcgtgagccactgtgcccgaccttctctatattatttttatttatttttaattaacaaagcatagaaacagattcaggacattcctccgaagacgttccagactcgagtcctaggacatggttggggcgggggtcatttgatcgagtggcctgtgtccttatctggaatacgggacgacgctgtaactctaactcaccctgcgaactcacagcttttgaggtaaacaagtgagaaagaagagacaataaagtgatctttctttaccatctaccaaggaccaggtggtttacacgtcagttcattttcaggaacacagcagcgctctgaaaactacagagcttcctgggcgtagggggctgtggtcgcttgaaaagaaccagcctgggggtccgagttccaccggaattgggttcgagcgcgggtgaaaagagggacccgacagcacccaccctccaagtagaggcaaaagttgaaagtggcgggctggctgcgcttccgaagaaacacgactggcgaaggctcaccttagtctctacggtgggtccctccctgtagccgacccgttccttgaagcgggccagaaacgccggctcggctggccgcacgtacgatacctggttccgcttgctcatggtagctctgggtaaagacagaagacaggttccgcgacggattcgcgacgatacagaggcgcttagctgtgacgtcactgggccacgcccccgatgcgtaggccgggcaacatggcggcctccatgcgggcgtcaacgtccgatccaagcgccaaattcaaatttgcggccatcttgagcgggcggaattcagtcgcgcgcggtgcagtcgggaggtggaggcaccggctgcattgttttcgggatcgaggggtgagggcgctatggcacccggctgcaaaagtaagtctgggcccccggcttcgttaccctatttttgcccccaaatacagctgtgaaaggatggcagcctcggaccgcccgcaaggttcttgctaggcatgaactgca

SEQ ID NO: 29389 - DNA, 2300 bp, Homo sapien
tgagccaagattgcgtcactgcactccagccagcctgggtgacagagcaacactgtctttaaaaaaaaaaaggggggaatcgtatatttcactttttcatttctctgatttcacagtcagcaactcatggtgtcaatgatgtcactagagatagccttcatggggccgggtgtggtggctcatgcctgtaatcccagcactttgggaggccaaggtgggcaaatcacgaggtcaggagatcgagaccatcctggccaacacagtgaaaccccggctttactaaaaataaaaaaattagctgggcatggtggcgcgtgcctgtaatcccagctacttgggagactcaggcaggagaatctcttgaacccgggaggcggaggttgcagtgagccaatatcgcaccactgcactccagcccggcaatagagcaagactctgtctcaaaaataaaaaagagagagagagatagccttcggggcacaaagtaaaagttgcaaagaccactgcacgggctctcttctcccatgtgttcccacttcatgctccaggcctctgggctgctgggaatgcaagaagcactttaactgggaagtcatcaacctcaattttgccaacaaacttaaaggagtggaaaagttccccatggcatcaccaccatcataaaggagagtgctcccaccactttagaaaggttctcaaatttggttttcagacaagagccctcagtcacatacatatatctcattaaataagcagatgttttacttatttaacaggcatcaaattttttgcttgagtccagatttagtgactgatccataaagtggaaacaaagaacaaacagtatgattgttcagaaagcaggatgaacatttctctccaataaggtaccattttgtgagctcatagtccttgaatactgaaaatgatgaaaggaaaaggaatattttatatgcaaaaaggtagcataaggaggtgttccgattaggtgtgatcgacctaaaagattaatgaaacaacaaacccatcaaaaacgactacaattgacagaaagctagaaacattaacggcgttggaaagctcaaatgacagaagttcacaaattcttaatcatctaatccaggcctctcctcattaccattcagaccactcacaaagatcccattaaatcagctcataatcaggtttacaaaaataagactccttaagagatgtggcaatgtgagaagtggagcacgtacacaggcacagcaaatgactacgttagtgaaaactgtagggtttatcataagcaaaatgacagtgctctcctccgtgaaaaagagaaagaaatcggacgggtctcctttaagtgaaaatagagactgtgagaacataaagacattgctgacatctgtgttttaacattccatttatttaaggaaagaggagaaagaaatgtttggaatataaataaacccttccctataggaaggtcagaaatgtagaaatacgcagaagctggtgggagcaaaagccgatcctgagacaaggatatctagagaggtagccctggtcgggatgtgggaagaggcctgcgaagaaacagcagaaccaagggaaagaaagggaagaacgtcaggtccactgctcatcccgagcgcctagaactgcgccagactcctggcatgcgcacaggacactgaaggaagggatgagcttttcggctagcgtattgtctttgagcgacagagcgggattcccaaacgtccccgccggtcactcagctcctgcagttcatgcctagcaagaaccttgcgggcggtccgaggctgccatcctttcacagctgtatttgggggcaaaaatagggtaacgaagccgggggcccagacttacttttgcagccgggtgccatagcgccctcacccctcgatcccgaaaacaatgcagccggtgcctccacctcccgactgcaccgcgcgcgactgaattccgcccgctcaagatggccgcaaatttgaatttggcgcttggatcggacgttgacgcccgcatggaggccgccatgttgcccggcctacgcatcgggggcgtggcccagtgacgtcacagctaagcgcctctgtatcgtcgcgaatccgtcgcggaacctgtcttctgtctttacccagagctaccatgagcaagcggaaccaggtatcgtacgtgcggccagccgagccggcgtttctggcccgcttcaaggaacgggtcggctacagggagggacccaccgtagagactaaggtgagccttcgccagtcgtgtttcttcggaag

SEQ ID NO: 29390 - DNA, 2300 bp, Homo sapien
ccaagctcaagtgatcctcccacctcagcctcccaagtagctgggactacaggcatgtgccaccatgcccagcagttttttgtatttctttgtagagatggggttttgccatgttgcccaggctggtatccaactcctgagctcaagcaacctgcccacctcggcctcccaaagtgctgggatgactagcatgagccacagtgccagcctgtgtttgtcttctaatactaaaattacagtgtacatcaaataggaaaaggttagggatagttcagcacttcttttttatttgttgaatagttgttctttattaacattgtccctgacttgccttttcatccagaattttcctctgctagatatattttcattcaaaataccaaagagtaaccaacgtacctaaatttttgttcttttccgtcaacactttaggaagcaggtaacataaatcgatcattgagctgcctgggccaagtgattacagcacttgtcgacgtgggtaatggaaaacagagacatgtttgctacagagactccaaacttaccttcttactacgggtaaagtagatccttgggttcctgggctccttttggttatgctaaagttgatagtgggacagtctctcagccttggtggcaagagtatacattttctttgcttaaaaaggtcttgtgatttctcaccgaaaatatgttcattcctatcattaaacaggattcccttggaggtaatgccaaaacagccataattgcaaatgttcatcctggatccaggtgttttggggaaaccctatcaacacttaactttgctcaaagagccaagctgattaaaaacaaggtaaaatactggcgtatacttcattaaataaatgagaaaaatactaaagcttacagtatgccatttttgtgattgccctaatattaacattaacttttatttatttctcattgtatgcaaaatttctattttatctttcctacccttctatatcacacatgtaattagagacctaggttagatcttatggttgttattgcttgactagttttttctttttttttgagacacagtcttgctgtgtcacccaggctggagtgcagtggtgcaaacacagctcactctagcctcaacttcctgggctcaagcgatcctcctgcctcagcctcctgtgtagctggaactacaggcatgcagcaccatgccaggctaatttttttatttttttaatttttattttatttattttttatttatttatttttttgagacagagtcttgctctgtcacccaggctagagtgcagtggtgcgatctctgctcagctgggactacaggcgcccaccaccacgcccggctaattttttgtattttttagtagagacgggatttcaccgtgttagccaggatgatctcgatctcctgacctcgtgatccgtctgccttggccttaatttttttattttttgtacaggtaggatctcactttgttgcccaggctcgtctcaaactcctaggttcaagcagtcctcctgcctcatcctttcaaagtgctgggattacaggtgtgaaccactgtacccagctgacaaattttttcttaagggaaagcaaattaagtatgtgagtctttcttcctgccaacagccaatcaatcagttctgcagcagacatcagctgagtgtcttctgattcagttccatcctgacactttatgtctggagatagggtgagatctcacaggttcagggctcagtcctacaagactgcgcccaacttctgatgccaattgcaagccccagcttgtcctatctgtgctttcagaccaactggctgtaaatcaggaggtccatgttgcccctttccctgggtaaatcagaagactatagatctagtcatttattttatttccttggactatggagtactagtaagatgaggaggaaaaatcattagagcttcctgaccctaagtctcttaagatttactagaagtctttggagatatagaactgcagcaataattagaattatgaagtcactgatgggacagtgatgtcagaagtgcagtagtaccttgtaatgaggctggccataagaatcagaagcaactggaaatggctgcttaacacacaaaagaacaaaaccaagagccttctactagtcactctcaatggtaagccctttgcagcctatcagtggaaagtgccagagtatctgggacttgtttaaggatgtgctatttaaatttttccgtgagcaaattgggcttacagcgagaatacagaagaccttggggctgt

SEQ ID NO: 29391 - DNA, 2300 bp, Homo sapien
gctactcaggaggctgaggcaggagaatcacttgaacccaggaggcggaggttgaagtgagccgaggtcgcatcactgcactccagcctgggtgacagagcaagactctgtctcaaaaaaaaaaaaagaaacaggttaatgatttggagtgcatcttagcatgccagtattccttttccagtaaatttatcttttttcccaaagcttttctcatcagaaagaattgattggaccaaacagcaggaagagcttctctcacagttgaatgtccttgaaaagcagcttcaagagactcaaactaaaaatgactgtaagttattctatcaggagctttgtgacttgaaggaatactgtaactcaatatctttttacttttattaataaatgctgttcctatgtttttggatggttgctttgttgttgttgtttgtttgataaccagactgcagtttgcatgcagtggtaagtaacagtaatatatcataaaaggtaaatttctctatcattgcccacaaacaaatgatacaaatgtttgcttaaagttttttgttgtttgtttgtttttgacacagactctcgctttgtcacccaggcaggagtccagtggcatgatcttggctcactgcaacctccacctcccgagttcaagcgattccccacctcagcctcctgagtagtagctgggattacaggagtgcattaccatgcctggctaattttttttttctttggtcattttttttttgttttgtttgttttgttttttttttttttgaggtggagtcttgctttgtcacccaggctggagcgcagtggcgggatctcggcggctcactgcaacctccagctcctgggttcaagcagttctcctgtctcctcccaagtagctgggattataggcgtgcaccaccaagcccggctaattttaggagagacacggtttcgccatgttggccaggctggtcatgaactcctgacctcaggtgatccacccacctcggcctcccaaagtgctgggattacaggcgtgagccactgtgcccagcctgcttaaagttttagataagctgctttgaaaatgaagtgtcttgaattcatgaatgttttaatattaacaaagcgtaggttatatatttgtatatgtttgtagatgtgggaatatcatttgattcccaattttttcactttatttttcccttcattaaagtatttgcagtggtttgtaataaagctaaaacaaaaagagatagccattctattttctttgaactaaaaagttaactaatactatttgcagttgtagttgtcttagaagacctgaagtagttaacccatgttggaaagtttaggcaaatttccaagggattttcaataactaagatgagctcactcaaaatatgttacatcttttaatttttttttcttatattaagagttttgtttgtttgtttgttttgagacagagtctcactttgtcacccaggctggagtgcagtgggtgcaatctcggctcactgtaacctccaactcccaggctcaagcgatcctcccacctcagcctcctgagtagatgggaccacaggtgctcaccaccacagccagctaattttttgtatttttggtagagacagggttttgccatgttgctcagtctggtctcgaactcctgacctcaagcatttcgcctgcctcagcctcacaaagtactgggattataggcataagccactgtgtctgcccttatattaggagttttgaagcacattttacaggagaaatctagcaaagtcaagtgacctgtaagtcagggacagatgttaatgctttctatttcagtagaaatttacgaaaaaccatgtgcaagggagaggaagaaaatagaaatctcagtgctgctaggtacccgccacttaattctttaacatttttccttaaaatagtctcttcgacttgattttgctaattgtgggactagtacctatcagatttatttgtctgctttaagaaacctactgaggatatgttttctttgttttttagttttgaaaagtgaggtacatgacctgcgagtagtccttcattctgctgacaaggagctttcttcagtgaaattggaatatagttcattcaaaacgaatcaggagaaagaattcaacaaactttccgaaagacacatgcatgtacagcttcaattagataatctcaggtagagttgttcttttatggtttcaagttgcctgattggctgtaacctacgactgtttgaagttggaagtgttataaactcaactcaaagcagt

SEQ ID NO: 29392 - DNA, 2300 bp, Homo sapien
tgacagagagactctgtctccctctaaaaacaaacaaaattcagtctagctctagacctaatgagaatcttcatcttagcaagatccctaggtgatgtgtgtacacaggagtttcttagaggcagaaatcacttcccagcagtgtctgaggatggcatcacttcagccatcatcaccagggctggggacctggagattaacaacgatgtagtccctgccctcaaggagcttgcaggctagcagagaaacagacaaccagaggaacaaccacaggactggtacaaaggtaggggagtagcagagacggctttacagaggaggtggctctgagatgcttaacctttagtgctagtagaggcatcgtttgttctaagaaaatttgctttacattctttaaagcatgcagagttgatcaatgcaacacctcttgatttcctgataagagctttcagagggtatcatctttgagcagctccttactcaatggagtggtgcagtgagacctctgagcctcaatttcctcatctgcaaaatgggacagtttgtaccatattggcgttactgaaattatccgtgtttttttttgagacagagccttactctgtcacccaggctggagggcagtggtgcaatttcggctcactgcaacctctgcctcctgggttcaaacaattctctgcctcagcttcccaagtagctgggaatacaggtgcccgccaccacacccagctaattttttttgtatttttagtagagatggagtttcaccatcttgaccaatctggtcttgaactcctgacctcgtaatccacccacctttggcctcccaaagtgctgggattacaggcgtgagccaccgtgcctggccttatccgtgcttttatttgagccacaaaaccaccctgtgagagaagcagcatggtgtggaaggacttccataaaaacttgctaaacagaagatacaaaaagaatgctgctaaacagtatgttcaactgtgaaatcatttttgtttaaaaaatgcatatacatattctataatttttttaacattttaactatatataactaaatagacatatagaaaaatgctctattaacactgattttcctggagagtggaaatagcactttatacatttcaacactttattttcaaggacgtgtactttttaaatgggaacattttatttttatttttattttttgagacggagttcactcttgttggccaggctggagtgcaatggcatgatctcagctcaccacaaccttcacctcccaggttcaagcgcttctcctgcctcggcctcccgagtagctgggattacaggcatgcaccaccacgcccggctaattttgtatttttagtagagacggggtttctctatgttggtcaggctggtctcgaactcccgacctcaggtgatccacccgcctcggcctcccaaagtgctgggattacaggcatgagccaccacgcccagccggaaacattctaaacatacgtaagtataacaggagattagaagtcatgttgattctgcgtggcttgattatggatcattgtcttcctctcatcgcagatcctcattttttcggttttctgtgatgcgcttgtccccatatggggctctggcgtctttctgggtctggaggtccccagcgccctctgccgaggcatctcttggtccggcggtcctcaggctggagggtggagcggagaagcctggtcgacgtggatggactcggtgggccggcgcggggcccgttaggcatctttaataagtttcaccgggagccgggtggccgggatggagacggctaagccgcgagaagtttaccttctaccacagcgtccacagtacccggcttggcctcaggcctcgggtcccgacgtcctccccagagcacaaacctactacaggttaggccggaggccgccacagcccagggtctctgccacctggcccgccccctccgaggcgccggagagcgattcccaaggggcctgccggagcgtggcgtcacaggagcgtcgcgtcacgtgaggctgccatccaatcgcggcgcgcgctctgccctgcgggcagcgggtgccaggcacggtgtcagcaggcaacatggccgagaggccggggcctccgggcggcgccgtgtccgcgaccgcgtaccctgacacccccgcggaattccctccgcacctccaggcgggtgcgatgcggcgccgcttttggggcgtattcaactgtctgtgcgccggcgcgttcggggccctggccgccgcctccgccaagctggc

SEQ ID NO: 29393 - DNA, 2300 bp, Homo sapien
gttctattatatttagggatgcggtgctgagatgcttgcctgcagaacagcaaaaacctctgacttcattattgttattcagagtaaccagggtcattgctctctggcttgccttaaagccagcaaaggcaattgcccatccctgggcttttggtctggaagagaccgttggcatcattattcagccccctcacttttcaggtaaggagctaatgaagacaacattcccagtgacacacggcaagttactgtggtgttggggtttcagtgtcaggagtctcctctcttcctctggcatttctgctactatgccaggctggctcctttcagtagacataacatcattgaaaaataccacaagtgcccctgtggagagcagagcagatagccattaaaattacaaaagcttatgctttttggcccaacatttccacttcaaggcattcaattcttcctatagatacactcatgtgagggtaaaatgatctctgtataaccttattctttgcaacactgattgtaataaggaaatattggaagcaacccagatgcctatgggtgggaggtgagttacataaattagggaccatccacacaaacagaatatgtgcagctgtgaaaagactgggccacctctccatgtgcaataggaacagctccatcttgccaggcgtggtggctcacacctgtaatcccagtactttgggaggtgaaggtggggcggatcccttgagcctaggcattccagaccagcctgggcaatgcagtgatatgctctcattgtgtaaataaaacaaaataatacattatttgctttgcagatgccactgccgccaggagccctgtaacatcagccatcgtcaaccccaccgtgttcttcaacatcaccgttgacggcaagcctttagacctgcgtctccttcaagctgtttgcagacaaggttccaaagccagcagaaaacttttgtgctctgagcactggagagaaaggatttggttataagagttcctgctttcacagaattattccagggtttatgtgtcagggtggtgacttcatacgccataatggcactggtggcaagtccatctatggggagaaatttgatgatgagaacttcatcctaaagcatacaggtcctggcatgttgtccatggcaaatgctggacccaatacaaatggttcccagtttttaatctgcactgccaagactgagtggttggatggcaagcttgtggtctttggcaaggtgaaggcatgaatattgtggaggccatggagtgctttgtgtccaggaatggcaagaccggccagaagatcaccattgctgactgtggacagctcttataagtttgacttgtgttttatcttaaccaccagaccattccttctgtagctcaggggagcaccctccaccccatttgctcccagtatcctagaatctttgtgctctcgctgcggttccctttgggttccatgttttccttgttcccttccatgcctagctggattgcagagttaagtttatgattatgaaataaaaactaaataacaaaataataataatagtacattatttgcttctcagtgcatacaacatctctggaaagatctaaaagaaactggtagtaggattcaacaaggtggacagggggcatttttttccattttgaaccatgtggatgcattatatattcaaaatgtaaaacaaaaaactcacaagcatctcttactttttcaacttgaagaaaagagaagaagaagaaaaccctaaagtcagtaaaggttagcctgggttcctagacttaagcttgatagtaaccagaatgtcaggccacatgtggtgtaggtcatagggtcctggcttttggtcacccactgttaggctcatataacagacaaggaggtgccattgtccgttgtctgtcccttttacatcagctcatcttggctcctgatttcctgggtctgatatggaagattccgggattttattatttctaatcaacatcgccttcccaaaccccgccccttggcagccatagcaaggccacatctagcccaggatcacataaaaagggctgtttcctcccctgaggaccgactgtgtggaagcaccaggcatcagagatagagtcttccctggcattgcaggagagaatctgaagggatgatggatgcatcaaaaggtgagtgggtgaaatctccatggagccccacatgccccttcagccagctggccctaaactgctctcttgcctctgccgggtgcctggggccattgccctctcaccctgac

SEQ ID NO: 29394 - DNA, 2300 bp, Homo sapien
aatgcattacatattgcaggataagtattgttttatgaagcttagggagttgtgtgtatatgtgttctggaatgcaacagaaaaatgtttcctcttgtgggttacaatatagaggtatgaaatctctgatgaggagagacagtgttatctggcccgctatgaagagacacatttgcataggctgctccctgaggctctggctttctacatctgatgatacagggagcagggaacagcctgttctcgttctgtggggctcagctgagtctgttctgcacagactcttccttcctcgggagccttagtcctaatacattcattttggagtgttggtgagtttgttcacagatcacagctcatgtgtcacccagactgacctgggccaaaaggcccatcacacaccctgcaagagcttctggtgtcgactatgacccccttaccaggcatcaaccatttttgttcgttctcttgagcctgaagctactattactgctcctctgcaaacctcaagcttaagaactttgcctgcaggatccctttaaatccacacaaaactcaaaattgagtcctaccaggaaaaagcagccctcagcccatttttatacatcggatttgtttgcaatattttctttctagactcaaaagtcaacactccctgaaagtttgtcgactttactgctgaagacctctggtagacaggccaggctctgtctggaatactttatgaggttggtgaggaggttgagtataatccaagagtgcctatctgggagcatgccacatgaatggcaaataatcatcctgtgggctcttggcttcattccccttctctctgactgagctcagcctgggcacagtggtgatttgcagtagaactggaaacctgttgggcagaaaaaaagacactagttctggttccagttctgatacataacaagctagatgagccttggccaccgtcatggcctcttggaacttctgtttcttccccatctgccaatcatcaatactcatacccacctcctcacaaggaggccataaaaacctatggtcatggctttgagtccaagtcagtgtggatgcagccagtctgtcatttttgggtgtttcctctgtagccgggtctgccatatggtgatgtcccagctctcgtgctatgaagttaaagcctctttctcaacaggctgcagatgatcacccaggaagagaatgcagaatgcccaaagcaaaccatctcagctggtcactgcttctgtgccaagaagggaggcctggcgaggggccagtcaggaagcagcatggcatcacatgctcatgacccacatgaaggtccctttagacttgtgtcaacaagatccattttctgaaacaactatttttgttctgattataaaagtaacattggctcattggtaaaacttggattgtgtgagaagtctacagaaataaatacaaatcctctagaattccatccccaaaagtaaccactcagacaaatgttctaatgtcatgtaaaaccatattaaaccatcttttctagctgcatagtgttatagaatcatttgcttaaccatcattattgggcatttctcatttccagctttgcattattataattcagtgttcaagtttgtattgcataaatctttgtctcagattattgattatttttaaactttttgtgaaatcagacttacaaaaatgtgacaaaaacagtacaaagagttcccatgtacctttcagtcagtctcaccaaaggtaaacattttatacaaccataatacaaatataaaaccctggacattggcaacaccatacccttaactaatgtatgtaccttattcacatttctccagttgtcccattaacacccttttctgttccaggatcccacactgcatcatttgcgatgtctccttagtctcctccagtttgtgacagttcctcagtcttcctttgtctttcatgaccttgaccctttttaaaaatcgaggtgaaattcctgtaacacaaaattagccattttaaagtgtacatttaatgcattcacaatgttttgtaaccaccaggtctgtctggttccaaaatcttttcatcaatctttgacccttttgaagattgtagggcaggtattctgtaggctgtccttcagattgtgtttttgatgtttttctcatgattagattgaggttaggcatttggggcaggagcactgctgaagcaatgtgtcctcgttgcaccgtatcaggaggcatatggtgttgatacgtttcattattgtgatgttaactttgatcatt

SEQ ID NO: 29395 - DNA, 2300 bp, Homo sapien
attaactatatagttcataggacagttaccaacgccataacaaaattgggatttccttcaccaaataatctggtgaatgtaataaaacctggggggaggctgtgtaaggtgatggttaggagtatgggcaggagagctagactgcctggtctcaagtcctggttctgccatttaccaatgatgtaacctgtgaccctggttaaggcatttaacctctctgtgcctcatttcccaatctgtaaaatagggataagaatacttgcatcacagggctgttgcaaggattgaatcagttattttttatttttatttttttttgagatggagtttcgctcttgttgcccaggctggagtgcaatggcgtgatctcagctcactaaaacctccgcctcctgggttcaagcgattctcctgcctcagcctcccgagtagctgggattgcaggcatgcgccaccatgcccggctgattttgtatttttagtaaagatggggtttctccatgttggtcaggctggtctcaaactcccaacctcaggtgatccaccggcctcggcctcccaaagtgctgggattacagatgtcagccaccgcacctagcctggttaatctttataaagtgcttagaacaatgcttggcatacaataagcactatgtaaattagtgttgaaaattagagtataaggttttagaatacacaaacctacagaatagtatgccccaattcatttattcattcaataaatgaatctaatagtgatggaaaaacaagacggtttaatactgtgccatccttgacttcttgatttttttggttatcatatgttctttgaattacttcaatacactaaaaaagaactcagaatttatggattttaaagacgtccaatgcactattacagcaaaggtgataaaaatgttctggcagcatttaagccgaatgattagtgaagactgtcattgttttagtagacaatttaaaaaggaacattctactgtttacatctctcttacctacttagcctaatatataagacatcgttcataacattatttagcaaatactgcagacccttgtccagtatggaattcccgtcaattgtgagggggggacagttcaaatacatgttctatattttaagacattggaaaatctttatataaagataactccatggtatctgaactcaggcttttcttcctgtgtctttctgatctgtccatttgctgtcacctcttaaatcctcagtctcctcagatatcctagcttctaaaatcccacttccagggtctctcctttctgagcaatctctagcacatctagaaaatatcatttataacatcagcaatctcatgttatcttatcacaacagagctcctcacataaaacccagccgtccaaccacacacaaacacatctaagtgccacaacaggtggggcacctgtgccttcattagggaggaaatccttccggcttcacctctttcagtttccctggaaggcaaagtccaaccctgcaagctgtcttccttttaggtgcccctgtggagaattacgtagagacataagaaacatctaatgtccagtctacgaagaactgatcatcaattttggagctcagcagtttaatgcttaagaatgtgagcaagcacttcctctctataaccttatcagacgacctcccaatcccactgtgcccactgatgcgaccatcatagctctaaccaccatgatctgtggttatgttggccctggagccttcatctgcccagggaacttctctgggcatagtatgttttacttgtcttgtgttctaaaggtagcacaaagcctatctatagtaggctcccaatagttatctgaaactgtatttgaacccactatctgataaataccatttttttttttttttggctgagggtcctcaaaaatggaacatcaggaaagtcatcagaattgctttaacctgccctccttgcttcaactaatttgggttaactttctcccatttatccacacggctcctttaaaacttgcaccatactttgtcagccccgccttaatgagttcctttggtgaccccagcttcaccttgcagatatcctctccgggtatccaatgcccatactcccactcggccatcgcaaggggttggggttggctttttttcgggcaactgctcacagctcccagtaatcacttccatcaagccggggtttccagttcccgctaggaagcgttggggacgtccgggcactgcgcacctcgccagtgccggttaccaagcgcctcctcccccg

SEQ ID NO: 29396 - DNA, 2300 bp, Homo sapien
acatctctcttacctacttagcctaatatataagacatcgttcataacattatttagcaaatactgcagacccttgtccagtatggaattcccgtcaattgtgagggggggacagttcaaatacatgttctatattttaagacattggaaaatctttatataaagataactccatggtatctgaactcaggcttttcttcctgtgtctttctgatctgtccatttgctgtcacctcttaaatcctcagtctcctcagatatcctagcttctaaaatcccacttccagggtctctcctttctgagcaatctctagcacatctagaaaatatcatttataacatcagcaatctcatgttatcttatcacaacagagctcctcacataaaacccagccgtccaaccacacacaaacacatctaagtgccacaacaggtggggcacctgtgccttcattagggaggaaatccttccggcttcacctctttcagtttccctggaaggcaaagtccaaccctgcaagctgtcttccttttaggtgcccctgtggagaattacgtagagacataagaaacatctaatgtccagtctacgaagaactgatcatcaattttggagctcagcagtttaatgcttaagaatgtgagcaagcacttcctctctataaccttatcagacgacctcccaatcccactgtgcccactgatgcgaccatcatagctctaaccaccatgatctgtggttatgttggccctggagccttcatctgcccagggaacttctctgggcatagtatgttttacttgtcttgtgttctaaaggtagcacaaagcctatctatagtaggctcccaatagttatctgaaactgtatttgaacccactatctgataaataccatttttttttttttttggctgagggtcctcaaaaatggaacatcaggaaagtcatcagaattgctttaacctgccctccttgcttcaactaatttgggttaactttctcccatttatccacacggctcctttaaaacttgcaccatactttgtcagccccgccttaatgagttcctttggtgaccccagcttcaccttgcagatatcctctccgggtatccaatgcccatactcccactcggccatcgcaaggggttggggttggctttttttcgggcaactgctcacagctcccagtaatcacttccatcaagccggggtttccagttcccgctaggaagcgttggggacgtccgggcactgcgcacctcgccagtgccggttaccaagcgcctcctcccccgtctgtgggacaacgctctggtaagcacccgaggcaagaggtcccagcaaggtaatgggacagcgttcggtcacagagagtgagcgagccagcgagagatattcctgggtggaggggtggggacgccttaggactagtgtcccccattcccggacccttcccaccaagaactacctagggagggctgcatcgcctctccagccatcctagggactagagaaatggaggggagaagagcagggaaacagcacccccgggccaatcacgacgtccgcccctccttagtcggggtctctctctctctctctctctctctcacacacacacacacacacacacacacacacacgctcctaagtcaactccagctctgagcaactacgccgcacgcctctcccactgggagtcccccggcccgtgaggctcgcctcaccccagcttcttcacccctaccccagtttcccttcccaactgaccgtgaagccggaggcagttccccagtcccagaccccggtggggctcccgccgccgccgccgctgccttcccctgcagtccccaacccgggacccggcctcgggcttcggcgatggctcctcggaacgaggcgccgcggctctctggactcggccagacaccgggcggcgcgcaggagaagcccatcgagctctcccggcagtggcggcggccgcggctgcaggagcggccgccgcgcaggttgatgacgcgctgacgcggggcgggggggggtgggacgtgggggcgcggtccagaggaggggacgcgcgcagatgacgtgcggctcgtggggcagctcggcagcatggcgtccgtgacgctgagcgaggcggagaaggtgtacatcgtgcatggcgtccaggtagctacagcagcggcgttgggtcggccgccgggttcagcctggccctgcgggtcgcggcctgccctgggtttgccagtgaggaggcagccgagctgcggcgactctccgtttaccttgtga

SEQ ID NO: 29397 - DNA, 2300 bp, Homo sapien
cctttcaaagtgctgggattacaggcgtgagccacaatgcccggcccctggtatactttaacttcaacctccactaactataccacttccttggcatagatcttacattacctttgtttttattttattcacttttactctctgtttgtctccctcctatctttcatttatttcacaaccatgttttggcatccctgctgtttcccacataacatgccaggagctagatatatgttggtaaataaaattaactaatgaccatggtgggactctgctgctggatagctaatgaactgccgtgggaattaagggtgctggggagaaagctctaaccttgaggttacagatatatccatgcctcagtgccactttcagggatgaaatgttgagagaaaataggacacatgacagagtcactacatcatggtaagctccggtaacaaagaagaccaaaggtttttaaatttagaggaaaacggttatccgtaatgtgtccctaaaaaaatactttgaggataaaaatcacctgaacaaagtgtatacaaaaatatagcagggaaagacatatctaactgcttttgggcatttttatgccccctcacacacaaataacatacatgttaccctgtaatacacacatatgtcccactgttgttaatcctgaattataactaaaatatgcaactgtgagttctgactttattatccaggcataatatgctaaatattggcatttcttcatatataaagggcccagaagataacggcaggtcacgatttttaaatggacatgtccttaactcacgttgtgggacttcaatgatagctggccgcttcaatccgatggctacatcacgggaccactgactttgcagttggtactgacagaggaaaggcatgaggaaaagaggtaggagctgtcgccagaactctgccaaggatgggatgaagaactctgataggaggaccacaccgtaggttaacaagtggagacacagccggaggaggatacagggtagctcgttaccaggtccaacatttttcaaccctcgttctggagtggtcataaccagggatttaatatagaacacagaggacattaggttatagctgcctagggatcttagttcttcattggcaaaatggaaacagcacttaggctatcggctgcctagccgctttttttttgagactcggctcactgcaacctccgcctcccgggttcaagcgattctcctgcctcagtctcccgagtagctgggactacaggcgtgcgccaccacgcccagctaaatttttttgtatttttagcagagacggggtttcaccatgttggtcaggacggtctcttgacctcgtgatccgcccgcctcggcctcccaaagtgctgggattacaggcgtcctagccgctttttaaaaacccttccccctttatttgtacggcaatttgtattttcaaagtgcgttcacctcgcatgcgccctcctaaccacgaggtgaggaaaagcaggccagaagcccacctccaaactcccatttcctcgaagagaaaactgaggctcggacaagatctgtgcgcgaacgccgaatggatggccctggggccgatgctctctcactaagaaaaggcctccgagactgcccaagcttcctgcccgggttcggaatcttatagacccgcaaaactgcaaatgcgctaacagtcctaaaaacgtccacgttgccagctctgaattgcaaacgccggcagcagaaccgtttaatcacaaggtaaacggagagtcgccgcagctcggctgcctcctcactggcaaacccagggcaggccgcgacccgcagggccaggctgaacccggcggccgacccaacgccgctgctgtagctacctggacgccatgcacgatgtacaccttctccgcctcgctcagcgtcacggacgccatgctgccgagctgccccacgagccgcacgtcatctgcgcgcgtcccctcctctggaccgcgcccccacgtcccacccccccccgccccgcgtcagcgcgtcatcaacctgcgcggcggccgctcctgcagccgcggccgccgccactgccgggagagctcgatgggcttctcctgcgcgccgcccggtgtctggccgagtccagagagccgcggcgcctcgttccgaggagccatcgccgaagcccgaggccgggtcccgggttggggactgcaggggaaggcagcggcggcggcggcgggagccccaccggggtctgggactggggaactgcctccggcttcacggtcagttggg

SEQ ID NO: 29398 - DNA, 2300 bp, Homo sapien
gtagctcatatgtgaagataacagggggttttaacattgaaaatggtgacatctaacgttaaactccagaaaagatagatttcgtgaattaaaactacatatatacgtatattctgtatttattttttgtattgttatttttataaatagacacctaccatttagaaaaatattagaaaactacagagaagccaagaagagtagacaccacctacaggccaactatccaaatactattactgggtgaactctatgggggcaaggattttgcctgttttgtacttgcctatattcctagcaccatgaacagtacctgacacatagtaagtgcttgcatattgcttgattgtacacatgtgtgttctaaaagcagggtaacaggcttccctttggtttaagaagaggaaatggctattccacatggttcagctttccaaacaggttgtgtagaagggacaagttgctatgcttttttggagttgacatttattctgactgattgacctttcccccttttatgctccaagtactttgaggaaaatttgcagcatttatgagtaaatacgtgggatagggtgttcatcctatgagagagcctacattaaggtaacagaggatcctattaaaaaacgaggattagaaacttctagggatataacctaaggacataattgaataaatgagcaaagatgtttattctaggatgttcatcacatcctagaataaacattacactgctttgtaatggtaagaaactggaaacaacctgagtttcacaatggaggggattgaagtccacacagcagcctatttaaaggcatgttaatatggaaaatagttcactaaatgcagtcccctcatcctggtttttgtttgttggtttgttgtattttactttggtagttcttatatgtaatgtgtctggaaatatgtacccccaagtaatcactgtaattatttttcagtgctcatattttggccaacataacatttacctgttttttagagcttttctatgatgagtttagactccctgtgtaatttagagcagacaaaaattgcaggctggaatatttgctgagaatgaaagctgtagagtcccccacccctagctgtgccactaggctccttgttgagactatttgaaatgtgagcctggcactcttggccaccgtgggagcttgcgtgccagatcccacagcagtagctggtgctcgggccctgttggggaaggaaaggaagctgtcatctgatttatcttgagcctcagaaatgactccccatctgccagctggttcctataggcacccaggcaaaaagagagattgggaaccagacaaggctgtttagctgtgggggagttgctggccaaactgtataccagaaaggttaacccagctgctcaggtaggggaggacacctgtcatgggcacagccatagtctcatcctcagaccaagaacagccctgcaggcagcaaggaatggggactctaaggcatcaagtccccctggtatgtggagagactattggcatattcagggtcctttagaagggtaaaggccacctgagggtattctttagcccttctgcccaggcttgttgtagccaaagggttgggaaattgggagatactgtgcgtgcgtgcgtgcgtgcgtgcgtgtgtgtgtgtatgtgtgtgtgtaaatggttgacaacttgttcaaataggatattacttagtagaacttcctctgatgggaaggctccaaatggggaagacccttacagaactccttggcccttgtcaacattctctggctgaagctcccctgatctgatctagatgttgccttgtgtatggatggccagcagggctcaatcatggggggttttgttagaggaactgggaaaagtactaatgctgtttccattacagtagctggatggaccacctcttccttcctggctcctccaacccagcctggagtgaattgactttataggttaaatgtgtttttcagtacccagctgaagaaacagaatgttgccagcaccccagaagcatcccacaccttctgtacccccatgcaattacactcactgatgataaccagcatcttaaaagaatagattacttttgtacttgatataaatggtatcatatactatgttctgttttgtgtctgcctcattcactaagcattgtgttttgagagatctgtgttgctgccttagtcatagcttgctttttgctgtatggtgttccattgtgtgactttgtccagtctgctgtttatccagtctactgtccagtctgct

SEQ ID NO: 29399 - DNA, 2300 bp, Homo sapien
gtcttgggcagttctttagagtagtgtgaaaacggactaacaaaatcaagtattatgtgctaacatgaccttatatgctctacttcgatatgactggcagtaaatttgtttacaccagcatcaccacaaacttgggaataatgagttgcactatgactttacaaccctttgtgacatcactaggtgttaggaatttttctgccccattataatcttatggaagcatatcacatatgtggcctgttgttgactgaactgtcatgatgcagcatgtgacaacacatcactgccgtgtgctcctcagaccccatcagatttctctggttgtcccaactgcatccttgagaatggagggtccagtccagaatcacatattgcatttagttctgtgtcttcagtctccttcagcctgaaacacttcctcagccaggagctttgaaaattactggcagtcattttgcagaatgctcctccatttgggattgtctgatgtctctctggccggagtcctatggagtgatgccacattctcactgcagccccccaggtgctgcaagctttttattggccctgttgatgtttactttggtcacagatgaggtgatgtctgccagccttcttcaccatgaagttgctctttttctctctggaatggataagtgttttgtgggcagatactttgaggctatgtaaacatcccattgaagaacatcagactttcaatgcgttcccttacttacttatatctgtgtgcactggtggtttcccatctgttactgtcactatgttggtgctcaaattgtccctgattctgaccactgaaggctccttcaagctggctctgtgtcctactgacgtgttcccattattcattaagcacttccttgttttctggcaaaacaacaagttccgggctcattttctgcaccccactcctacttcccagtgctagaatcagccgtttctgcaaggtgctctggttcctttagtggaaagtcatattcagaagccagtattcaggtgctaggagtgctccaggctatgcggggctggctgctccaggccccccagtgactgtggggactagacacacacacatttccatctatatatatggacttatctttatgtattcaaggccacaagggtacactgatcattccgattttaatcccacacaacaggattcattccagttttctctccatatacataacttccttctctgacaataggaaacctaactcccactgtcttcagtagatttatttgatcagtatccctgtgtgtaaccaatctcccgtctctgccaccagcctctctcccacatggatcccctccttgcctcacttggactccagcactccaggcagggcctttgctttccccaggatgctccctccaccctgctgggctcccacaccccacaccagtccaccccttgagggcacattctccccacatcctctctggtacctctggggcacgatggcttctccctccgccacctttgctatgccccactttgtggctttaggacaggactcaggagaaagggaagacaagaagggaaggaatcccttggattttttaaccaaaaaatgcatcaagtacatggagacagagccacaaaataatcataacaaatattctaaaccaatcagacagccagccccagatcaccctataagggggcattgctaccccgtgacagctgggtagcctgggcaaattccctaacctcaccgagcctcaatttcctcaatggtaaaatggggaaaggacagtgcttccctcgtggtttgggtgtgaagcttctgtgagttaatgttagtgaacagccagcctcagcccctacccaaggtagctgctccgcagatgtgatgacaaccaccgtgtgtttctcagaatcctaggaaataagggcttctttctagaaggcagggccaggatgctgcgtgggtgttccctggcagagaggctctgtggccctcaggacttcatccttctgcaggcttgtgtgtttgttttatttttttggcacgcctgcagccaagttggggagggtttcctggacagaggtcctttggctgctgccttaagacgtgcagcctgggccgtggctgtcactgcgttcggacccagacccgctgcaggcagcagcagcccccgcccgcgcagcagcatggagctctggggggcctacctcctcctctgcctcttctccctcctgacccaggtcaccaccgagccaccaacccagaagcccaagaagattgtaaatgccaagaaaggtaagg

SEQ ID NO: 29400 - DNA, 2300 bp, Homo sapien
cctgcctctcgctgaaacccatggcagtctcccgcccaccaacatggcaggcacttatagagctctttctccacgtaggcaccagtctatatgctggacacacagcagagaaacaccgtctctgctcttaagacatgaaccatggtggttctcactcaggcatcaacatcatctgggagatacattagaatccaggtgccttggccaggcgtggtggctcaagcctgtaatctcagcactttaggaggccaaggtgggaggatcgcttgaggccaggagttcaagacaagtctggccaacatggtgaaaccctgtctctactaaaaatacaaaaattagctgagtgtgatggtgtacacgtgtagtcccagctactcaggaggctgaggcaggagaattgcttgaacctgggaggtggaggttgcaatgggccgagattgcaccactgcactccagcctgggtgacagagtaagtgagactccgtctcaaaaataaatcaataaataaaataaaagttaagaattcaggtgcttgggccccacccctggaaatgctggtttagggatcttggtgagtttagcatctgccttttccacaggtcttcagggattcctaggagcagccaggaatgagaatctcaggggcaatctagttgcagggctggtgcccaaaagtacgggagaaagtccaaagaagggacggtcatgccagaggagaccagttggtgccagggccaagagggggagagcaagtggcaggactggcaaaggaagggaatgccagcatatgctaagtccttgtcctggccctcagggtgggtgagaagcggggagcctagagtacttctgggagctcatctgttcttggggccacatggtcacacctggcagggaagctccggagggaaggatggcctcataggagtcacaggcctttagaacagggaactgggggaacctggagggcatccattctaacatcacgcagaaggaacctgaggctcagagagtgggccagcacaaaggcctcctgactctgcccagggccgtagagacacctactcccacagcttcctcaggtggagctaatgagagtagcttcctgtaccttggacagtccctggaggaaactttgcacatatgggcaccttggtgcaaattacaaaaggtacctcctctaaactgacaaattatagaaaggcatctctttttctggtctgacccactctagccagggcaaggcttaggagacaaatgggccttcatgtgtccctcagcagaatgcccttcttcagtgcccccttgcacagcctcacatggcaccctatgctggtacatcacgtgactgggtacagtgctgctataactggtggaggcagtctctgtgtgaggcacacatgacctcaggctggtttgccagccccaaactctccctttttttgccttgctcatcagggtgtttttgctccagtttggtaagttacatcgctaatttctatatacacaaccatgtgtcttgcctgtgattcttctgcaaaggcaccttatgggtggacgaaggctctgatctcactctttgtgagtgtggaatgtatgcagacacagccaaatggaccattaaagtgtttccccacccacttccccaagctgagtgcagcctttcctgaagccctggtgtttcagaaagaccagggtccgccccaggagctctaaacttacacacacatagaaatatgcttcccggcaccctcaacttacacacacatagaaatatgcttccccgccttcccctgctgactcttacatgactggctgccagcaggacagctcctgttaggaatccgtttgtgtgccatggggaaggtggggaagagcatggcttcagagccatgtgcacctgggttccaggccagccctgccagctggggctctgccatcctcggccagttggtttagggcagcctgggtttcctcatggtgaaatgctggtggtacagaatgacacgttacctgtgtcatagggttgattatgagcatcacatggggtgacatgtagaacggcttagcccagagcctggcctcctctgtaagagtggaaaacctgggttccttctgccctcatcttattagtagctgtgatgggcacacactcagccaagcactgaggtaggcagctctgcgtttcagttctcttagtcttctccagagtcctaggaggtggggctgtcatcatccacttcatacatgagggaaccaaatccagagaggctgagcagctcgcccaggccacccgtgtctgt

SEQ ID NO: 29401 - DNA, 2300 bp, Homo sapien
ccattattggctgtagacagcacctctcccttgggatgggcatgaggggctgcaacacctctcaggcttttctggttcaaggcagctcccccgagctgaggcacttccccgaaggagggtacatctgtgagccattggccactaagactcacagcagttggggcctgggtgcccctgcctggtaaaggccaccttgggggagccccaaagagtctactacagggggctgagtggtggaggaggagtggtgtggggccttggagcatctgtgatcaaaattgcttctgtgactgtttttcagactgtatgtcaggcccatgtccttttggggaggttcagcttcagccctcgacatcgttgttgcctaccctcaacagaactttcatctgggatgtcaaagctcataagagcatcggtttagagctgcagttttccatccctcgcctgaggcagatcggtccgggtgagagctgcccagacggagtcactcactccatcagcggccgaatcgatgccaccgtggtcaggatcggaaccttctgcagcaatggcactgtgtcccggatcaagatgcaagaaggagtgaaaatggccttacacctcccatggttccaccccagaaatgtctccggcttcagcattgcaaaccgctcatctataaaacgtgagaaagcccctccctgctatctgattaggttaaaacacacaagatcatcattgttctaggtcagaaatggtcaaatgtcagcaaatctctaatactcaatataaaaaccataaaggaagatctagctctcttataagtgacatgggtcatgcattcctagtgtgaaccccctcttctctattaaacaaacggggtgattctctttgtcctttttgcatgtgatacttgttttcaaaaaaatgacaagggattggttctacagacccaccttgattgcttcatttctaacttctttgtcttccatctctttcacattttctgtaaacgtatcagtgatgtgcagagctcactcacactggctcataaaagctgttttttgtttttatttttgtttttgtttgttttgagaaagagtctcagtctgtggcccaggctggagtgcagtggcactgtcttggctcactgcaacctctacctccaggttcaagcgattcttctgcctcagcctcccaagtagctgggactatagtcgtgcgccaccacacccagctaacttttgtatttttagtagatacggggtttcaccatgttggccaggctggtctcgaactcctgacctgaggtaatcctcctgccttggcctcccaaagtgctgggattacaggcatgagccactgcacctggcagagagctgactgttaagtgttcaggcattttgtgagctgatgtgaaacagatccgttataaaaaaatagaattaaattaacataattaaataaattatttttaaaacaaaggtaataaatactcaaaactcatcacttcctaattattttactgttgcctgtgctttcagggttatttgtgttgtcgtatctgtatggagggaataatataaaggtgtgctactgcccaactccacattcagtcacctggtgttggtagcttgaaatcaaccgtggtgggattatttacatccactatggaagtgggcagacgctataagtcagggctctcccctctaccactggaccggtttttaatatttactcgcacaccactgatgtgtctgcattcccaatctctgccttgagtccaaatatacagtatctagacccactgctcaggatctgagaactgcagtcatttttcctacacccccacccctcggctgcagacaaccaggacagggtctaatggctccctattctttctggtttgggttccactcccactaggtctgtgcatcatcgagtctgtgtttgagggtgaaggctcagcaaccctgatgtctgccaactacccagaaggcttccctgaggatgagctcatgacgtggcagtttgtcgttcctgcacacctgcgggccagcgtctccttcctcaacttcaacctctccaactgtgagaggaaggaggagcgggttgaatactacatcccgggctccaccaccaaccccgaggtgttcaagctggaggacaagcagcctgggaacatggcggggaacttcaacctctctctgcaaggctgtgaccaagatgcccaaagtccagggatcctccggctgcagttccaagttttggtccaacatccacaaaatgaaagcagtgagtgagccccactttcctttttc

SEQ ID NO: 29402 - DNA, 2300 bp, Homo sapien
gctacttgggaggctgaggcagaaggatcacctgaacctgggagacaggttgcagtgagccaagatggtgccactgcattccagcttgggtgacagagcaagactgcatctccaaaaagaaaaaaaaaaaaaagagagttaatgaaattagaaatctgctggggaaaatgagtttatgaatcacttcagaaataatacttctccatcctctggacaggaatcattttagttatttaaaatgttttcactggacagagtacaggagaagattccgaggcatgccaatcattttgactactcttacctgtgtgttcatcctaaaaaacaaagctcttagcatcaaatgaaaaattgctttcataacctgactctcacagtgtcacatggctgctgacagagctgaggctgggagatggggctttttgactccagattttactatagaattaaatcagaatccctgggatggtccaggcatgtgtagtttttaaacggcctgcaggtgagttgtaggtagaaccagagctaagagtcactgccttactagagttaaatgtttccacaagagtacagaacctagccagagccaactgatgttgccctgggcacactggaggtgtgcgtggaaaatcacttgaggtctgcttttgaaagaaagaggtggcttgatataaacattgaagtttccatgagctcctaaaataggaactacctttactaacacgcaaagtctaattttagtcacgttagtcaccatgttatctaaccctgtgttattggttagacagcatagcgcattggcaagaaagggctgaccaaacacagcctgagctttcgtcctgggatctggaattgccgtgtacttgctgcaagtgccagcccaagtcacctggatccacagctgctttgcaaaaattagaggtctggcttggatgacctcagagatccaagactgatctgaaattctccataattctattttgagtggacaatactttcaaataccccaatagaacagcagtaaagattcacaaattattattatggaggccagagtctatcacacctttcagatgccccctgctcaaaacaacaaaaccttaatgttacattgcctactttctgtttcgtcccctcactttcctcttgttttctctttgataatatttcttgctttgttttaaaaggcttaggaaacaaatatatcaaaggatgttattagctgttagccttaaaaaaagaaattcaactgcagtggttataaaatatcagcattaaggcagtgcaagaagagaaatggcgccgccagattccagctgtccaggggagttgcacgttcagagtatatttgctatgttgatgaatgtgttgatggggaaaccagttttaaaggatggatcttggcactgtgctctacaaattgtgaaatcgtgactctcttagtacaggagaagtaggagatcccaaagcacagactctgctacaaatgccttccttctggcttcacccactggaccccaggaacttaatctggaaatcacagtagttaagagatgtctcaagtctggtgacctggaagcagagcctgagacaggattttttgtttaagtcagtgatcaagaaagtgctctcagaagtgaggaaagcaggatagagcagggcacgtagctgaatgcagatgcggttttagctgaagagtagcttcagcctgaccccatggggagctctggagtatgaatggcatacccaggttacatcacttgaagcaaggaggtcagactttttaattcctgcaggaggccattattggctgtagacagcacctctcccttgggatgggcatgaggggctgcaacacctctcaggcttttctggttcaaggcagctcccccgagctgaggcacttccccgaaggagggtacatctgtgagccattggccactaagactcacagcagttggggcctgggtgcccctgcctggtaaaggccaccttgggggagccccaaagagtctactacagggggctgagtggtggaggaggagtggtgtggggccttggagcatctgtgatcaaaattgcttctgtgactgtttttcagactgtatgtcaggcccatgtccttttggggaggttcagcttcagccctcgacatcgttgttgcctaccctcaacagaactttcatctgggatgtcaaagctcataagagcatcggtttagagctgcagttttccatccctcgcctgaggcagatcggtccgggtgagagctgcccagacggagtcactcactccatcag

SEQ ID NO: 29403 - DNA, 2300 bp, Homo sapien
ggtctccaactcctgacctcaagttatccacccaccttgtcctcccaaagtgctgggattacaggcatgagctactgcacccagccgaaaatttacctttcaatctctcatttctctctagcactagattatagttacctacgttgctttccagttcagaaataaccttttaaaatttactccttccattcagccatgtttgtaaagacaaaacatgtccattcttggcaatgctttgttcacactccacttggaggaccaggacagtatgtcaggacatctttacttcaactatgtagttgggttgtcacgcaaaggatgctgaagtgcctccctattttcttctttctcgttgctgctactttctggaaccaccaccaatgcttcatatttgggaattagtgactctcattccattttcagaaagctggtgtcaactatcccaagaaagacagttaagcaaactttggagagacgaaatagtaaggaaataacttgttccttaggcttaacttgtcaagcaatatttctgatattttgcattcaatacactgccattctagtactgttgtgggtattactgtatgtgggaaacaatggtgtcatggatgttaggaaaagatgctgggatatatatgcctgcttagaatcaggagaaaagacaaatctcctttcaccctcctggtcagcataaatatttttaaagattgtttagatttttgtcaagatttctttctcttgatgaatttgtcctcgattcagtggggagaaccaagagcctctcttcgtttctcatcctctcccttccctctagttctcagttttcccatttttctgcacaaggacagaagtggactagaagattacatctaaggtcccgtttagctcacgatacaggccctcccagaggtgggggtgtgggcagggtcatgttccaagttctgcctccctcgatggactgtgggctcccagagggcagagctagctctattctcatgattaaggacatcgagaaggaaggggtgacgctcctaggagatgatttcccacccctgtccacaaggaggattggggcagcctggagaggctcagtgcccgcaagaattaagcagaagttgggactggactgtaaactgatgctgtcgcacatgctttggttcctgtcccaagcctcccaggttgctccgggtgactctggcccagcttctggctatccatgaacacaagtagtcccagggagtcattctggcagaacccaggtctgctagctaagaactcctgaaccatccgcaatctctgcctgtggcctggacttggtgtatggccggcagggtggaaggagaacccacagggcctctgaagacaggcaggtggcacacctgcggctgggaggatttggaaaaggagtccagcgccattcatttttcattcattttccagcccaacgtttgacctgaatgcttcacgctcacactgcacacactactccatttataatacaactcgagaagggcacatactactccatccacagctcagtgaagggatgcatactactctactcacaattcaacgaagtggtgcatctgcctctaatttactagctaccctggggaccttggacacgttgcgtgtctggaaatactgcaggtgatgtgtgtggagtaggctgcaggctcaccgtcctgcaaatactagctgtaccaccaccggctttaaagtccaacagacctctggcccaagtcaagtagcagaggatccagggcttgggtggcccacaaataggattcttctccaaaacgaggcgcataatggcctttgtctcctcgacagaaaagggaaggtagactggcttcctctatgggcgaccttcgcgactctggagaaaaagacctcatcattctcagacttgggaaggaagactaagcccggaaaggtggggacaagtccgctccaacgccgcaatggggagtagtagggacccagcaacccggtgccgggagccctgcaccctgggagggagaggcggtcgctgaggcaggaagaggaggaggagagagaggagggacgcaccgggtcagctcgcgatcctgctgcgcagggcggggctcgggccggtccgcccgcgcgcaggtgagtgagccagggcggagcgcagctgcgccgggcttgggcgcctggggccgccgctccccaccgtcgttttccccaccgaggccgaggcgtcccggagtcatggccggcctgaactgcggggtctctatcgcactgctaggggttctgctgctgggtgcggcgcg

SEQ ID NO: 29404 - DNA, 2300 bp, Homo sapien
ctgagcctctaccctgagctaggtgcttttcccgttgctgggaacagtagtaaacaagatagaaaataacttcctcgctatcttctgttctcaaattccaaaaagatagcaaatcaatctagaaagtaggatctgtgttactatttgaagggtaattacattctgaatgagggcgaggtgacggagtcctcaggacggcacctgctggaaaagtgggcagaatgcaggttgctaggatgcagagcttcagtggcgcaactttgcagggaactgcttggctccccaaatagatctcttgtcttttccctttgctgctgccttcccccctgcacagacaaagccaggagtgtctcaggaaagctcaggaagcctctgcctctgactgaaaccccagagaatgtcatctgcagtcacaggcaacagcctggctcaaaacgcaccccttgaagattaggcctccctcagccctcaggatcacttgatattcctgttcttcagggttcaccagacacatggcttaaattaaaactgttctgccacatcactgagcagcttctgttcctgatatgcaaaggttgaaaggagaagtcatttttattaaaagcaggaaaattcacattgttctccctggtagcaccacttccaagcacaaaagtgatggaggctgaaacgaaaagggagtcccatccccttggggaaatgaaccatttctgtagaaaccaaggaccactctaggcagccaacttgggcagcactgttagtaaccacatcacagcaaccaccatgtgggaacatctggggacagatagacactgggttgggagtattatcacagcagccctgtgaggaggtaccacccaccccccaactcagatggggaaaccaaggctaagtcagaataatggcttgcttagatggcaagaggtggaataagttggggagctttattttgaggcgtttttgcaactttctcagtcccattttactcattgttagaaaacaatggacaaaagcttccagaaaagtaatcagccaggatgcctagcaatgtagctggactcttggcagacctctcaggattagctggtttagaaggaaggcggttttgttgaggcctttctctgctccctccacccctcccctctccgaatcaggaatacttggtgctcatggagtacaagggcttccaactaaaataaaatagataataattcaacataaatgtcccctaaagaacgatgggaatgatgaagggtcgttgaagtttgtttccaagtgtgaggggccgaactactaagaaagtgcttttcaatataaatgtgataaatctgatctcttgacacgttattcttggtagccctcctcccgtataatatcccaaaggggatgaactgcccctttgacgtgggttctaacctacaactgtttcatgaacacgcgctcactcgacctgtcaggacctgtgtcctcgggacccccaggcggcacagcttcagggctcacattccccccagccagtcactctccactcgaaactccacagagttcttggaattttcctcgcttgctgcgaggagaatcccaagtgagtctgctgtgttggagccattaaaaagcagccaaactctacagatttgaggtaagagacaccgtaaaaaggcagaaagagctagtggcgcggacttgtttctggctcatgagttggcctagcgaggccctttcccctctctcgacctcagtttccccttctgtaaaacaaaggaggttcggtagcactaaggcgagacagcgaagctcccctcaggcctgacaaaaggatggtctccgggccctggagcctccctctgagaacgcgattcacccggagcgcgggggcgcccgggcgcgtccgcaggcttccccgcccgcccgcacgcaccccgggcgatccgctctccgccgcgcccccgcacccagccccgccccggcgattcctctcccagccccggcgcgtggaaccccgccctcccctgagtccccgagcctggcgagcggagggcggggcggggcggggcacgcgggaggcggagccgagccggggaatcctgctctgggatagcacccggccccgcagagcagcgcggcagcccaagggccccggcgccgggggcggcggggaaccccaaacgcaaccgggtctggagggatccccgcgccgagccagccgccgtcaccgcctccgcgccgcccctgcgggcttggcaggcgcccggcgcgcccgcactgcgcccggccgccggctcccgcggtcccaccgtgag

SEQ ID NO: 29405 - DNA, 2300 bp, Homo sapien
ctgtaaaacgaggagattggactagaaaggagctctcacattctaggacagtgagtcttcaaattgaatgtgtctaggatcagttaggagtcttgttaaaattcagagtctgattcagcaggtctagggcagagactgagtttctcatttccagcaaattcccaggtgaggctgatgctggagaccacaccttgaataacaaggtatttggatgttgaactattaggaaaccttgttaaagacatggaaatgggcaaaagagaatactgtatgtcgcttgggtggagtattgggggattatctgatgctataggagtgcatacatttgcctgcctctctgttaactagctattgttcatcttcgtaagaatagaagctaaaatatggaatatgaggccgggtgtggtggctcatgcctgtaatcccagcactttgggaggccaaggcaggcggattacttgaggtcaggagttcaagagcagcctggtcaacatggggaactccttctctactaaaaatacaaaaattagccgggcatggtggtgtgcacctgtagtcccagctatttaggaggctgaggcaggagaattgcttgaacccaggaggtggaggttgcagtgagccaagatcgtgccaccgcactccagcctgggtaacagagtgagaccctgtcccagataaataaataaataaataaaaatgtagaatatggatacagtagtcccccttatcttcagtttcactttctgaggtttcagttacctgcagtcaaccaaggtccaaaaatattaaatgaaaaatttcagcaataaataattcataagttttaagttgcatgccattctgagtagagtgatgaaatcttgctacctcctgcctgggatgtgaaccattgtgaatcatccctttgtccagcatatccacgctatatagctacccaacttagtagccatcgtggctatcagatcgacagatcacaataagggtgaggacagtacaataagctgtttcaagagagaccacagtcatataacttttattacagcatattgttataattgttctattttattattgggtattgttgttaatatcttactgtgtctaatttacaaattaaaccttatcataggtatgtatgcataggcaagaaaaacagtatacatagggttcagtaccgccgcagtttcaggcatccactgaaggtcttggaacatgtctcgtgagaataggagggactactgtaatcatgggacgaattttgtttggtagagatacgatttcaagcctgtaggaaagaaatggctcccaaacattactttttcctgtcctataggatattaaccaattttgcacaattggcaaattcatttcagtattcttgactgcccacatatatgagttcttcaagttctcctttaaatcggttttacctttttgaaaattatgctttaacaccactggttctttgcaattctttgatttgttgatttattacaagcatgaaacacttgccgggtgtgtggcagtgggggcatgggatatacaaactcctcgaggaaagggaaggcatcatgctttcctgactcccagcacacttgccaggtgagaaaagtaccttaccccaaacctattcttggccaggtaattccaccccccgccccagggctagaggattacgcaatatggtggaagaaggtgcctcactcatcatgcagtcaattaggaatcaagaggtcgagacctgcccaagcccaggaggcagttgttgctacgctgggattcgaaccctggggtctgggctatatcccagggctcttttcaccagctgccgcctagtttattctgaggccactaaatcaacgactttcatccgtctgctataactgtaataatttgagtcccagacgtctagagctttgccgacaccagagcagttaaagggcgtgccagaggccgagaggcggagccccgggccgccgcgcagacgccccgccccgcccggcgggctgctgggagtcgaggactgggttgctctcctcccttccccggtcccgcccccgtctgtctgtgtcgactgcggacgctatcgataaagttgctgttttgacaacatggcggcgcccatggtccgtggcccggcagtgctcgcctaaaggtggagaacgaggagtagaggagccgcaggccagagcctgtgagcaggtaaacccccggaccgggcgcagcgagatgagagacgaggcccagtctcctcttcctccggctcgggagattctgacttgctgagggcaggaagg

SEQ ID NO: 29406 - DNA, 2300 bp, Homo sapien
atataaaatatgttgtatatgtgttacatatataatatatattatgtgttatatatttactaaaagaattttgatattatgaacaactcaatagaaaaattgagaaaagaaaatattgaacctctatcccttagatttaacaattctcattattttctcaaaattatttcacacacttttctaaacctctagtgggtaaagattttttaaaaataaaaagatatatccacaatgaccaagtctaggaatatttttaccatactacctccaccccttacccacatcccctatcccagttcatcttggggacaacagtgtaataatttgaattttgtggtgaaacctacatgaaggaatcaaatttgattcaatgtcagtagttcatatctctatctagtttattcttccttcaacaacaattttgggtgcctcaatgtgccaggacctgagcatactacaatgagcaaaatgaaatagaccaaacatagctcctgccctgggttttgttaacagtggaagtttttaaatttcttgtctagaaaactgaggaaaacaagttctgtgccatgctagctggaggggtagctgtggaggaaaagatgatggatgaggatgaatttggaggttttggggagcaagcccattggcagagtgctggttaggttcttgagttggtgaagatctttgtgcacgacacccctgtagacatctgtgaagctggaagccagagcaggctgcgtcgtatgcatggctcagaaattatggctcttgtgttgtggaagctggcctaggtggacagctacaatgtgggcaaagccctttgactggctggtggttcactagttgccttgaagtgggaaggtagagccaatagtcagagttgtgttattttccttttaaaagaattgttttctaatagttattactctgctgtttttataaaacagcacaaaaaaggactcaggagtcttacataagaaaaatagcccactgggggcacagatgtttacctgacaccttgcttagttcctaccacatacccaaagtccgggtttgaagctgtctcatttattcatcttaaggaagactgaattgtttgcacttttggtaaaagtacgctttctatcaaaagtttattacaaggcgtggtggcacacacctgtagtcccagctactggggaggctgaggagggagggtcatttgagcccaggagttcgagactacagtgaggcacaatcacaccactgcacttcaaccttggtgacagaacaagacttctgtctcttaaaaataaaaaagtctgttacaaacggagtcatttgaaacattccctcccatcattcatttctgcgttagtttttgaagttaaagagcactagaaaagaaacgtgacagtatagaggttttatgcttatttgactttatcaactgtaaattctgtttttaagaattctataacaaatgtgtttttaggacagaaagtaaatttggggaacctttgatttaggcttggaaatataaaccaagtggtttcttactaagtttaatgtttttaattgttcttcctaagtaaacaacagcctgattcacataatggaataaatggaatatacgagtctaaaggagccactagaccccagttttatgtggaaacacaagatgtattttcaaatgaggatcatactgaggcaggcaaatattcctcatgaattttgtgattgctttcaaaatgagctacatttgtgaataagcatcaggcccccagtgtatgtttgtgctgacaaaaatgttaatacccaattttgtacaatgtaattcacttgttagtgccatagatgagtgggcaggaggtgtgcaaaagacttgaagttgagtttctcattgaacatgctctcagaaaggtgtaggtggcatttcaataacatctctttccagaataaattgtgactctccttactttacaaactggtgaaaatattttgagctggtaaatatttttgtgatttcattacttttcaaaattcagttgcaagactgagcatgcatggctggggggatgtttataatggcctgtacattatttttcttctttgttggcaggaaataactacgtgtttgccagattactacaagtggactcagtatctctttattaaactgtatgaggctgggctggcctatcaaaaggaggtaagttaaaattagctggacttttaaaattcagtgaatctctttaggatacatcattgtagtagcagcgaaaatgaacgctacctcaagttcataaaatcagtcacag

SEQ ID NO: 29407 - DNA, 2300 bp, Homo sapien
ctgacgagggagctggaggactatgtgggggactggccatttccttgggtaatatttgtaaagctggtatgaactacttcacaaatggaagacagaaatacaacccttcttttattcttaaattaaaaatacactcaagcccatacatgctaaattagcagaagatttatcagttcctcttgggattcctcatcccttctccccaaattctccaataacacccaaagacttacactgcccaaagcgcaatatttggaggggcgatgagcttcacatccatgccttagaagggagagcctgctatggcttcccactgccacagaaggccctgttgatagctggtcctacccatcagacagaaggtgctggttctctgctgatccaggccttgaggagtctccaaggcagctaatccccgtcctgtgctaggcttgactaagggcaccttcttttgagttcctaggtagtgtggcttttggcacctggttccttcagtcccacaggcccacaactctaggaatgttcttaagaatgagtgtagcagctgggcatgatggctcatgcctgtgatcccagcactttgggaggctgaggcaggcggatcacttgaggtcaagagttcgagaccagcctggccaacatggtgaaaccctatctctactaaaaatacaaaaattagccgggcatcatggcatgcacctgtaatcccagttactcaggaggctgaggcaggagaattgcttgagcctaggaggcagaggttgcagtgagctgagatcgagccactgcactccagcccaggtgacagagccagactccatctcaaaataaaaataatgagtgtaacacttgggcccttgtgagaccttggtcctgctggacatgtctgtccctaggacagggattcctttttctatgcaacccttcacatatcaaggatctcactttattctctgtcttgaacaccagggctttcttcactcttccataaggaacctacctttaggcagtggtctcatggtagatatgtaattagctttggaggggggtcctgatttctagcatttgccaatttccgtgatgtacatactcccatcagggccagtttcaagctaccaacttgccatcttttgtcacagtgttgtgaagagatgccccaattgattcttacaggctggcatgagctggagcaaccattgcctttggggcttccaagttggtttgtcttcctcgagtcatcctggtagatttctgcacctgtcaccccagaacagaagtagaagaaaaatccaagttgattttccacacatctccctatatttggttctcatttgtcttcatgcattgattggcttcataagcatcataaagtaggcattggcgaaggcaatcttgacatgcctggaacagaagttaaggcacaaaagagatacctaatcctgtcttgtccttttggatggtgaggctttctaccaggttaaattcagagaagtggaaaataaggcttttaattgttgaaaattgaaacttttatttgtaaataaatttctttaaaacatcgcatactatacaatataaaaagagagctttccctgaattgtcttttcatatgtggctttattcttttttttttttgagacagagtcttgctatgtcaccagggtggagtgcaatggcacgatcttggctcactgcaacctccacctcccgggttcaagccattctcctacctcagcctcccaagtagctgggactacaggcacacgccacgacgcccagctaattgttcgtatttttagtagagatggggtttcaccatgttggccagtatggtctcgatcttttgacctcgtgatccacccacctcagcctcccaaagtgctgggattacaagcgtgagccaccacacccagcctgtggctttattcttatgacattttaaattcatacttatagctctctcaaaagctgatggaaaactgcattaaaatttaaaaagaaaccaattgatgaatttcatttctttcttaggtgcaagggagcagccaagagagagacagacacgatggatacctttgttgattctgcttggtactacttcagatacactgaccctcataatccacacaggtaaaacgtccctgctgatgtctttgagcatttgtcagtgtggctcctcctagaagcaaagaccaagatggaattagacatgcaagagatttcttggggggaaatgcctgtgcagattaaaggggagaagaggaggagtgggcagagagtgctcttagaccacgatggag

SEQ ID NO: 29408 - DNA, 2300 bp, Homo sapien
ctttattgtgcaaataaaccgcccagaaatcttgttaaaatgcagattctgattcagtaggttggcaatggggcctaagattctgcattttcaacaagctccctggtgatatggagtccattaaccatactttgggtttacggcagcggtcctcaatctttttggcaccagtttcacagaagccaattttttcacagacgggatgaaactgttccacctcagatcatcgggcattagattctcataaggagcgtgcaacctacattcctcatgagggtagttcataataaggtttgtgcacccctctgagaatctaatgccactgctgatctgacaggatgtgaagctcaggcggtaatgccagtaatggggagtggctgtaaatacagatgaagtttcgctggcttgcctcctctcacctcctgctgtgccactcagttcctaacaggccacagaccagtactggtcagtagcccaggggttggggacccctggtttacagaatataaagcacattcatatatattatcttatttgttctctgtcacaactctggcagataggggttcactaattcacttattcgaccattaggtactactattaatatataccaggcacttggcatacagatatggtcaaatggagtgggaaacctaccacccaaccaaacaaaaaaaaacgcatgttaaccaacaaataaataattataaatagttatcagaactgagcaggaagtaaagagggtgctgaaaaagaacaacaggaaccactctgaggaggcctctaagaggaggtgacttcagcagggatgggaaagatgagccactcagtttaggggcaagctctgggcagacaccaggaagctcctgcagctagagtgcagggagggagggaagatccctagatctggcccagaaggctgcggcaaggggccgatttcaatttaattctggggtaagcactgaggatttaggtagagaagtgtctgttctagtatttgccttaggatcacgatggctgtagtgtgggaaatgaaacctctccaggatcgcctgggaactggtatagggagtcccgggccatgcgggggcgccaaggagtcaggcctggtgtccctgcagccgcgcggatccacttgcagatgggtccctctacgaataacgagcctactagggcacgtgcttttactgctgcactgaggacgtgaaatgcgcgcaggcacaacgagactttcttctttttcgctctttcagagggcccgggctcccatctacgctttgctggttacgttggcatgttgggcatttccccctctctgcctcagtctcccgacctgtcaaagaggacggtgggccagccatgggtgacacgcccgtgcgcctctccaatagtgcacctcgggcaagccgggcggcgggcacagcctggacggtgccggcctcgagaggcacaaagggctggctttccaccggggaaactgaggcagtggagcgaggagcggcgtcctcgaaagtcctcgcaaactcccagcgcctgtgttgggcccatgcaggctacccaggccgcccgtctccgagcggaggaccccgcccagcgctgccaggggcggggccgggctgaggacccgaggctggaagggaggtcggagcacccaattcggtccaggactcgcagggggcggcagtggcggcggcgaagtcccgtgcagtcccagtgctagagcgtgggacggacttgtggggcacccctcggtgttctccagccaggcctgggggcaggaggcccagccacgctgccgggtgcaggcctgcccctgggcgcccgcccgcgcgccgtccccgcccctcggccgccccctccgccccggcgcgggctcgggacgtgcagagccggcgagcgagcagcagggactgcgcctggcgcactcacttccgcgtcccgccgccctccggcccgcgcgcgccgatccgccgccgccatcggacaatgggccgccagccccagctgccgtgaacttcctgccgctgctcggccgcccgtgcgtcccggacggcgttcctgccaggcgccggccgggatcgcagctccggggaagcagcggaggacccagcgcctggaacgtacctgcgcctcagccgccgcgcgtttgctccggcccgactcgcggcctcggcgccctcccggccgattcagcttcacccggcccagtcggctgctgccttgctgtgagtttccgtgtttggttgcctaaggaggatgtgattttacttttttgctgttttctttttccttttata

SEQ ID NO: 29409 - DNA, 2300 bp, Homo sapien
atttgttctctgtcacaactctggcagataggggttcactaattcacttattcgaccattaggtactactattaatatataccaggcacttggcatacagatatggtcaaatggagtgggaaacctaccacccaaccaaacaaaaaaaaacgcatgttaaccaacaaataaataattataaatagttatcagaactgagcaggaagtaaagagggtgctgaaaaagaacaacaggaaccactctgaggaggcctctaagaggaggtgacttcagcagggatgggaaagatgagccactcagtttaggggcaagctctgggcagacaccaggaagctcctgcagctagagtgcagggagggagggaagatccctagatctggcccagaaggctgcggcaaggggccgatttcaatttaattctggggtaagcactgaggatttaggtagagaagtgtctgttctagtatttgccttaggatcacgatggctgtagtgtgggaaatgaaacctctccaggatcgcctgggaactggtatagggagtcccgggccatgcgggggcgccaaggagtcaggcctggtgtccctgcagccgcgcggatccacttgcagatgggtccctctacgaataacgagcctactagggcacgtgcttttactgctgcactgaggacgtgaaatgcgcgcaggcacaacgagactttcttctttttcgctctttcagagggcccgggctcccatctacgctttgctggttacgttggcatgttgggcatttccccctctctgcctcagtctcccgacctgtcaaagaggacggtgggccagccatgggtgacacgcccgtgcgcctctccaatagtgcacctcgggcaagccgggcggcgggcacagcctggacggtgccggcctcgagaggcacaaagggctggctttccaccggggaaactgaggcagtggagcgaggagcggcgtcctcgaaagtcctcgcaaactcccagcgcctgtgttgggcccatgcaggctacccaggccgcccgtctccgagcggaggaccccgcccagcgctgccaggggcggggccgggctgaggacccgaggctggaagggaggtcggagcacccaattcggtccaggactcgcagggggcggcagtggcggcggcgaagtcccgtgcagtcccagtgctagagcgtgggacggacttgtggggcacccctcggtgttctccagccaggcctgggggcaggaggcccagccacgctgccgggtgcaggcctgcccctgggcgcccgcccgcgcgccgtccccgcccctcggccgccccctccgccccggcgcgggctcgggacgtgcagagccggcgagcgagcagcagggactgcgcctggcgcactcacttccgcgtcccgccgccctccggcccgcgcgcgccgatccgccgccgccatcggacaatgggccgccagccccagctgccgtgaacttcctgccgctgctcggccgcccgtgcgtcccggacggcgttcctgccaggcgccggccgggatcgcagctccggggaagcagcggaggacccagcgcctggaacgtacctgcgcctcagccgccgcgcgtttgctccggcccgactcgcggcctcggcgccctcccggccgattcagcttcacccggcccagtcggctgctgccttgctgtgagtttccgtgtttggttgcctaaggaggatgtgattttacttttttgctgttttctttttccttttataatttgaagaggagaaaagaactccgctgagcaggcccgggacggcgaagtgccaccagctaccccaacaaggacgtctccaggggaaagggagttggaagcaaacttggtccagctggcgttgaggtctcaacttcggctggactcttaaatcctggggtcatgcccttcacgctaggcaggtggaagtctttacttgtactgggccggacttgagccccgacccttcgccagcatctccccgctgccctcaacacacacacacacacacacacacacacacacacacacacacacacacacacacacacacacacacggcacctgggctaggcccggacacctgtctgcagcatggataagtatgacgacctgggcctggaggccagtaaattcatcgaggacctgaacatgtatgaggcctctaaggatgggctcttccgagtggacaagggtgcaggcaacaaccccgagtttgaggaaactcgcagggtgttcgccaccaagatggccaaaatccacctccagcagca

SEQ ID NO: 29410 - DNA, 2300 bp, Homo sapien
ccactgccaacactgaagaaatgggtgggaatcattgctgctgggaccccaggtgccccaggtcactgcaggagaaaaaggtgaggacatttgctcaacaggcctctccacattttctagaccagtgctatccaaaagaaatataaggggccgggcgcgatagctcacgcctgtaatctcagcactttgggaggccaaggccggcagattacttgaggtcaggagttcgagaccagcctggccaacatggcaaaaacccatctctactaaaaatacaaagattagtgggcgtggtggcacacgcctgtagtcccagctactcgggaagctgagacaggagaattgcttgaacctgggaagtggaggttgcagtgacctgagatcatgctactgcactccagcctgggcaacagagcaagactccgtctcaaaaaaagaaagaactatgagagccacaaattaaagtcatgtatcattttaagttttctggtagtcacaattaaaacgttaaagaattatgagagccacaaattaaagtcatgtatcattttaagttttctggtagtcacaattaaaacgttaaaagaaaccggtgagattaattattttattcggttcaaaatatccagccaggcatgggcccatgcctgtaatcttagcactttggaaggccgaggcagggggatcacatgagcccaggagtttgagaacagcatggacaacacagtgagaccctgtctctactaaaaatacaaaaattagccaggcatgctgtgcctatagtctcagctacttaggaagctaggatcgtgtcactgcactctactctgggtgacacagcaagaccctgtcttaaaaaagtaaaaaatcctgctgggcgtggtggctcatgcctgtaatcccagcactttgggagggcagatcacttgaggtcaggagttcaagaccagcctggccaacatggtgaaaccctgtctctactaaaaatacaaaaattagccagatgtgttggcgcgtgcataatcccagctacttgggaggctgagacaggagaattccttgaacgggggaggtggatgttgcagtgagctgagatcgcaccactgcactccagcctagaaaacagagggagactgtctcaaaaaagaaaaaaaaatccaaatgttatcttttgaacatgtaatcaatataaaaaagttacccatgagattttttttgtaactccacaatttattttatttcttctaaaaaaaaaaaagggatacgtgtgaagatttattacatagatatatgttgtacgtgtgccagggtggtttgctgcacctattgtcccatcctctaagttccctcccctcacccccacctcccaacaggccctggtgtgtgttgttcccctccctgtgtccatgtgttctcattgttcaactcccacttatgagtgagaacatgtggtgtttagttttctgttcctttgttagtttgctgagaatgatggcttccagcttcatccatgtccctgcaaaggacatgatctcattcctttttcccatgagatatttttacatcctctttttgtcctaagtcttcggaatctgcatttacactgacagcacattttaagtggttcacagcaagtgccttgtggcagtgtctcctgtgttggacaggcctccacggggcaggagctgtgtttctgcactggcatttcctgcctatacagaaacacacagcaccctctgctgattttggggactgtggccttcaggtcagtcttgcagtctgttttgttttgcttcccctggacatgtctgcctccccacaggactgtggtctggagctcaatgatgaagatggccaccgctgttatccgctggaggaccacctgttctgtcactcctgccacgtgaagaggctggagaagagaccctcatctacagcccttcaccagcaccacttctagccagagccacttgcagacatcacggcaggggatgaggagccggggttgctgctgctgcttccggtggcccctggggtggaagtggggtaggggaagaggaggggcaggagggagagttcctgtgagcatgtggggggtgcctttcctttaaccagggaggtgaacactacctgcctcctgcgtgtattttccaagtgcttttctctgttgccacattttcctcaggttactcaggaaaatgctccagcatgtgcgagcacatgacctgaggttgcatcatagcaccaaaggaatcctcctgtcccctctgggaacatttcatgcttcagagggagaggtt

SEQ ID NO: 29411 - DNA, 2300 bp, Homo sapien
aagagaaaatatataaagtacatgtaaaaggaagttccatattccaattatgaaaattgcaaatcacggttaaatttataatagccagtgttggttagcatgcacgaaaacagagaaacaggtgctgttgatggaagtgtgttttggtttaattttttggagggcagtcagaaagtaacaaaagtcttaaaaatgtccataaaatggaccttacagatgtccacctggtcgttccacctctagaaatttgtaagacaaataattcggccgggcacagtggctcacatctaaccccagcactttgggaggctgaggtgggcggatcacgagatcagtagatcaagaccatccttgctaacacggtgaaaccccgtctctactaaaaaatacaaaaaattagtcgggcgtggtggcacacacctgtagtcccagttacttgggaggctgaagcaggagaattgcttgaacccgggaggcagagactgcagtaagccgagatcacgccactgcactccagcctgggtgacagagcgagactccgtctcaaaataataataattcaacacagggtctcattctgttgctcaggctggagtgcagtggcatggtaacagctcactgcagcctcaacctcctgggctgaggtgatcctcccacctcagcctcctgagtagctaggactataggtgcacaccaccacacctggctaattaaaatttatttatttatttagtaaatagagatgaggtcttgctatgttgcccaggctggtctcgaactcctaagcagcatcattttttctaggtgttaaactgacaaccacccaaattcccagcataaggattctgcttaaaatatctagctctctgatgaaatatcttcaaagaatatttaatgaccttaaatctcagacaaaaaggtaaggagacaaaatgaggaacccatttccgtacaaccccaatttggaaaaacacatgtgcaagtatgcccatgttaaaaaatatagaagaaaaaaaggctttaaggaaaaaaaaaataatagtaatgatttagggtgggaatcgcgttaatattcccaataattttatatattttaaaaatctataattttatcaggggaaaacgttatgttgcggaaattaattgatcgattgagtgattggttaacggacagtgtccgatgactcatataatcccccggttcgagtccctttaggccgcagacgtttcgcgccttctcgggtgtccaagtcgcgcatccatacaatgaggggtaatatactagattacctgaggtcttcttacggtaaaaacaccggtgtcttaaggtttcccagtggaatttgggggccgggttgacttcggagctggagctcgcaaaggccggggctgctgcagattctgacgctttgtggacccctactaccgagcgcagccgcaccgcaggttttcttcgctgctggttagatccaaagcccatcccatcctagtaaactgggacagcgccgcttctcacatcactatgggggcttctgctccgtggcggggaaaggccagaactgctgccttaaatacgcttttgcatcatccggttgctaacctccggccacagcattccccactccaaaatgccacttttccaggtgtgtttgcctaaatttaccccatttacagacttctcaggtgcatcattgggaacagggcgctttgcagtttgcaaaccacctcagacaactccaggtttaaaggataaaggatgacattgtgagcaaagcggcatcaaaatttcagatatttaactttcacattctaaccatacacctttccaaggtcttgtaatactttcacattgtgaatatacatctttacaagacccagtagtacatgggtcaagtgtggcaaaacagacatcgcgagccagccaggagtcgaacctagaatcttctgatccgtagtcagacgcgttatccattgcgccactggccccgacttgctaaagccttctccgtgatagctgatcacccttatacagtttgaacgggcttccgggtaccaacgatccattttgcccttgcgccgcgctcccgctgctctgcctttccccaaaacgcgccccaccaatccgcagcggcttcgtcacggcgctcttcgtcgcactccaacccgccgcgtcggcggcatctctcgcgtgctcttgcttgcgcactaatttgtcctccaccgcctcccgttcaggccggctctcctgcggggcggggaaaggggtgggaagaggctgggagctgcggccgctgtgccag

SEQ ID NO: 29412 - DNA, 2300 bp, Homo sapien
attcaatctttgccacgctaagctgcatgaagccatggctccatatggcttaaacacatttgagacctggtgtaggatcacattaaacccttcagtgcctatcagatacacaataacctaattagctagcagagcacatgtgacagtggcctggccagaaacgcagtggaagacacttccttcaactctttcaccaaagacgaggtgagcactttgcaaaggggaactgggagaaaatagggaaaggtggagaggaaaatgtggagggaagtgtgcagctagggttttcaaagaacattacagtaaacagaaatggcacccacagggggtgcactgtagaaaaagcaatcatcttttttgcaacacatacaatgtggaatagatgacctctctgaattttgcacctctaactttccactgaacctttcagaaagttactagtgaggttgaggtctgaggagcttaagtgcccaaaccacattttggtgtcatttccctgcaaaagaaatgcggtatctatgcctaactgccaaggtattttagctcatatacagggatagataagcttctaaaaaattacatttgtttctcctaccagatattcccaggctgtggccaccagattttcaaacagcctaggggtaaagcattaaacacgaagtgagtacaacaaaattattcacagacaagaaaagtgtggatgctaatgggtaacactaagggaaataaacacatgttgtttttaatccaagacaaaccaaaacccttaaaaacacctattttataactcttaacaaccacagcctctgtatcaaagactcaagaacttggatttaccgaaaagtcaatttgcagtaccaaaattaccgagattagcctctggctgtcgacactgacttaagaacctgctttaggctggagctgtttaaaatttaaaccaaagtaaactccttcaggaccttaagactactgactgtactttaaattttttctgcacactgaagagggggcaggcaggcttcggtacccagataggctgtaagcaaaacaaagatttgttgatttgtgcgtagactctaaattgctgctgtaggtccgttaagtaagagaaaactctttttctctgttaagtcatacagataaatttagtcggtagctctgcatagaaagtggggacaagcgtgccctgaagggccgcatcataacgccgaccccggctcggtgggggccagtcggcagcttctctcttcagccgtgggcgctggggccgagcacggtggagaaaggccggcgagccgctggttcccggcctatggctactcgggcgaggcctaggagaggccgcgccggctgaggaaaaccggtaaatgcgaggagctcccacaccctatctgcaatccgggactcagaagccctccccgaggccagggcccgcacctgccgccccgcccgccgcgcctcaggcctctggcccgtgggactcacagcttcagctgctcgtaggccgccgtcgccatcctgcacaaccacctccttccttctctctccgcccgccccgccccgcgccgccacctcggctacaactctaccggtcaccctggcacagcggccgcagctcccagcctcttcccacccctttccccgccccgcaggagagccggcctgaacgggaggcggtggaggacaaattagtgcgcaagcaagagcacgcgagagatgccgccgacgcggcgggttggagtgcgacgaagagcgccgtgacgaagccgctgcggattggtggggcgcgttttggggaaaggcagagcagcgggagcgcggcgcaagggcaaaatggatcgttggtacccggaagcccgttcaaactgtataagggtgatcagctatcacggagaaggctttagcaagtcggggccagtggcgcaatggataacgcgtctgactacggatcagaagattctaggttcgactcctggctggctcgcgatgtctgttttgccacacttgacccatgtactactgggtcttgtaaagatgtatattcacaatgtgaaagtattacaagaccttggaaaggtgtatggttagaatgtgaaagttaaatatctgaaattttgatgccgctttgctcacaatgtcatcctttatcctttaaacctggagttgtctgaggtggtttgcaaactgcaaagcgccctgttcccaatgatgcacctgagaagtctgtaaatggggtaaatttaggcaaacacacctggaaaagtggcattttggagtggggaatgctgtggccggaggtt

SEQ ID NO: 29413 - DNA, 2300 bp, Homo sapien
aaaaagctaggactgacaaatgagagaatgactttcacataaccccagtttgactttatcacccaaataatttaagagtttccacttctcacaaaaatcaatacaaaaacatcattcttactacttcagggacaaatttcctttctcttttatgtatgcgaggatttgggtttgttttaaggtctgaactggttaaatttagtgttctggcagctgaaaaacaatcatcataattctcaagttctccatcctattcaatctttgccacgctaagctgcatgaagccatggctccatatggcttaaacacatttgagacctggtgtaggatcacattaaacccttcagtgcctatcagatacacaataacctaattagctagcagagcacatgtgacagtggcctggccagaaacgcagtggaagacacttccttcaactctttcaccaaagacgaggtgagcactttgcaaaggggaactgggagaaaatagggaaaggtggagaggaaaatgtggagggaagtgtgcagctagggttttcaaagaacattacagtaaacagaaatggcacccacagggggtgcactgtagaaaaagcaatcatcttttttgcaacacatacaatgtggaatagatgacctctctgaattttgcacctctaactttccactgaacctttcagaaagttactagtgaggttgaggtctgaggagcttaagtgcccaaaccacattttggtgtcatttccctgcaaaagaaatgcggtatctatgcctaactgccaaggtattttagctcatatacagggatagataagcttctaaaaaattacatttgtttctcctaccagatattcccaggctgtggccaccagattttcaaacagcctaggggtaaagcattaaacacgaagtgagtacaacaaaattattcacagacaagaaaagtgtggatgctaatgggtaacactaagggaaataaacacatgttgtttttaatccaagacaaaccaaaacccttaaaaacacctattttataactcttaacaaccacagcctctgtatcaaagactcaagaacttggatttaccgaaaagtcaatttgcagtaccaaaattaccgagattagcctctggctgtcgacactgacttaagaacctgctttaggctggagctgtttaaaatttaaaccaaagtaaactccttcaggaccttaagactactgactgtactttaaattttttctgcacactgaagagggggcaggcaggcttcggtacccagataggctgtaagcaaaacaaagatttgttgatttgtgcgtagactctaaattgctgctgtaggtccgttaagtaagagaaaactctttttctctgttaagtcatacagataaatttagtcggtagctctgcatagaaagtggggacaagcgtgccctgaagggccgcatcataacgccgaccccggctcggtgggggccagtcggcagcttctctcttcagccgtgggcgctggggccgagcacggtggagaaaggccggcgagccgctggttcccggcctatggctactcgggcgaggcctaggagaggccgcgccggctgaggaaaaccggtaaatgcgaggagctcccacaccctatctgcaatccgggactcagaagccctccccgaggccagggcccgcacctgccgccccgcccgccgcgcctcaggcctctggcccgtgggactcacagcttcagctgctcgtaggccgccgtcgccatcctgcacaaccacctccttccttctctctccgcccgccccgccccgcgccgccacctcggctacaactctaccggtcaccctggcacagcggccgcagctcccagcctcttcccacccctttccccgccccgcaggagagccggcctgaacgggaggcggtggaggacaaattagtgcgcaagcaagagcacgcgagagatgccgccgacgcggcgggttggagtgcgacgaagagcgccgtgacgaagccgctgcggattggtggggcgcgttttggggaaaggcagagcagcgggagcgcggcgcaagggcaaaatggatcgttggtacccggaagcccgttcaaactgtataagggtgatcagctatcacggagaaggctttagcaagtcggggccagtggcgcaatggataacgcgtctgactacggatcagaagattctaggttcgactcctggctggctcgcgatgtctgttttgccacacttgacccatgtactactgggtcttgtaaagatgtatattcacaa

SEQ ID NO: 29414 - DNA, 2300 bp, Homo sapien
acagcgtctgtaatgatagtgtttaatggcttttctatattctgttttatcataacatagttctaagaaagtgcttttcttcaccctgagcacctggtttatttcctttcctctttctatcatgaaagattgtggtgccatgaatcattatatatattttacatctgttaaatttatttctttaaaaaaattcttcagagtaggattaatggatcaaagggtctgaatgtctttgcagtactatattatcatattggttcaggtttaccatactctatgcgtgccagtctttaccgattttaaagccagaagaaggaatctgtaaatcgtactaccattttcttctgcctgtgtgtgatggttctaaacctggcaatccaaatgcactttttaatttgttacacaataatatagtaaaacctcttggatagacatttgctcagttttcaaaaatatctttttatatacattaggtaatcaactacagttatttaaatctgctttttttctgtgacgttttgccatgaacacagaagggaaattgacctcctgttgttgggcaattagagaaaacattggctggccctggcatgttgttggaggaggtagttccttgggttcacccattaactgctgccgtacaagagtgtaagaaagaaggagagttgactccagagtttgtgttcgttgctgttcactgtggtccacagggagagcagagctttcactggtgactttcagatgatctctcgagacttttttctaagggttttgggggtagtgggaagaatctgggctttgggatccaacacaccttggtttgaatttaagtttttctcttagtagtaatatgacccagggccacttagttatcttcagacttcggtttcttcatttgtaaagtgaagatgataacttactgtatagtttaagcgataatgtttataacatatctaggattttataagtattcatggggtacggacacacacacccttgcacacacatatatatgtacaccaactctaaacgaaccttaccaattctgcatgatccatatgtagatttttcatcctaacacattcttccacgcttttgttcctgaggtcatgatttgtatttagcccttgatgaatctgttgcattttcttcctccttttggattttggagaatagtttcaatagttaacattatccagtattcgttgtttgctgtgttccatacactgtgctaagtactttatgtgcattatgtgttatctcattcaaaccttagagaagcctaatggtggtgctgctgttacctccattttgtggatgaaaaagcttactatttaaagttctagagttagtaagttgcgtatgatgctaaggctagcaaacagatagtttgcttcctgcatccatattcttaaccaccacactgtgtgttgtcagatttttgaattcatagaattatcaaggagcttgttaaagaaaacatgggaactggtaactgtggttggttgcagtgcagacatctggatgtttaaggggaggaagggaaactgatttttcaaataatacccaattgttctttataaatcttgtactatttgcatgtattacccatttaagaatttttttttttttttttggctgggggctgtggctcacgcctgtaatcccagcactttgggaagccaaggcagacggatcacctgaggtcaggagttcaagaccagcttggccaacatgtcaaaaccctatctgtactaaaaatacaaaaattagccaggcatggtggtgggtgcctgtaatcacagctactcaggaggccgaggcaggagaatcacttgaacctgggaggcagaggttggagtgagctgagatcatgccactgtgcttcagtctgggtgacggagggagattccatctcaaaaaaaaaagaaaaagaaaaaaaatatttttaagtatttaaaaaaaattttttttaatttagatacaggatatcgctctgtcacccaggctggagtgcagtggtgtgatcatagttcactgcaacctttaacccttgagctcaagtgatcctcccactttagccttctgactacaggtaggcaccaccatgcctggctacgtttttgttcttttagaggcagggactcgttatgttgtccaggctggtctcgaacttctgagctcaagtaatccttccacctcagcctcccaagtagctgggattacaggcacgcaccaccacgcccagctaaaagtatttttaatgcaaaatattcaatccttgcctcagagattctgat

SEQ ID NO: 29415 - DNA, 2300 bp, Homo sapien
ggcgtggtggctcacgcctgtaatcccagtactttgggaggctgaggcgggcagatcacaaggtcaggagattgagaccatcctggctaacacggtgaaaccccgtctctaataaaaatacaaaaacaaaattagctgggcatagtgatgggtgcctgtagtcccagctactcgggaggctgaggcaggagaatggcgcgaaccccagaggtggcacttgcagtgagccgagatcgcgccactgtgctccagcctgggcgacacagtgagacgccgtctcaaaaaaaaaaaaaaaggcacaatgaactatcactatacacctacaagactgggcagacctttagaaatagaatgacaagtgttaggatgcaaagcaaaagcaactgaaacccaaagggagtgtcagcttgtactaccacactctggaaaacagtctgacaatatctgctaaagccaaacacacctatcctaaggccaagaagttcccagcagtgagtgcattcatctacggaagaacgtgcactagaatgtgcattgcagccctattcatgacagccccaaactggagacaacacagacatctgtcagtagtagactggagcatactcacaccaccgacaagtatactgcagtgagagagaatgacccacagctacacaacacactagaacatgaatgaaccccacaaacaacggaaagcaaatgaagccaggcacagaaaaagtacatcccatttaattccattttcatcaaggtcaaaactaacccatggggttagacaccaggatggtaggttcctttggggaggaggcaatgggtaggaaaaaacatttatctagaatctgaagtttaaaaaaattaaagtagtttctcctgctgtgctgccttttttttctgctttgctttttcgaggtaggaagttccaggacaggtaatatgtctgaggaagcctccacctccctcaccctactcacccttctcctctgggaccagacaggcaggaactccagggaaagcccaacaaggagctgtcctagagcactgatttcattttggcttcaagtaagattttcactagcaactctgcttttcatctcttttaaattttattattattatttagcattttcttatctgttacaatgtattaggcactgttcaaagcgtggcattagtattaatatgttacccattcattcattcagcctgctggagacttggtaatggcctctttattgagaacttactctgtgccaggtagtaagctaagttcccaattaatcctcacatgagctcttccttgccaggcaggagagaggggaagatatctgttagcattacagaggagtacacagagactcagagaagtcaagtgccttgtccaaggtcacacagctaagtcagtagcagagttggtatacaaacccagattccacattactgcaaagcaccaagctctgtcttatctagtgaccaccctcaagcaaatcacgttgtaagactggcagaaatacgaggtttcttagttccctaccctggcctaatgaatcaaaatttctggcccctaggctggcctgagcagtagagtcccccacagcagttcaaaacctgattccgtccccggacccagtaggcacgcagggccaagctgttgggtggacggaggggacgggactgccgggaaggtccctcacttctttctggcccctggcaaatgttatgttctctcctctgagaagccctccctaaccatccctggccaccccccgcaactgcttacccctttactttgccttaggtgtcttcctcgcgtctctcagtcttatacgtgggctaggttgaaccatatgacattgtcctttctataaattaaaaaatggttgaaaatggggcatttcatgcagtccaattcaagtgtttccctctaccagaatgtcagctccaagacggagctgggaagtggttcacagccgtgtccccagacaacgcctggcacacagtaggcgctcgataaatgacaggtgagtggccgagggaaggcgcccacttcgaggagttccgcagcctgaagaaaggccccgccgagccggaggaccccaggggactccgccctgtcctctgcaatctcgggtgccttcccggccgcgacgatcgggcggggtggggctcgccgtcatccatttaccagcctcgcctctcggacgggcgcgccgttaatgagattagcaatttaaaaaccagctagctgcgtcggcggcggaggcgcggggccacccccaagccgagccggggtgggacgg

SEQ ID NO: 29416 - DNA, 2300 bp, Homo sapien
gagtgaatctgttggcatccctgaggaggccatgatcagctttccattcctccttttgccaagtctaggttgcaaacaccctgaaactggtggtcttagtatgatgactgggaacttataaagtcataagtctcatttcataataatataaaaagaatttatcttcattttatttatgttgaactctgctaaaaggtaaaaaatggacttgtgtgcctccctccaaatttacacacacacatacactcacacatacacacattttaaaaaactgtcacagcaattaaaataaataaaaacagagcctaagaagatcactagtaaagtaggatggagctgttctccctcacggctcgaattgtttgctttggtgaccaacccgcactagtaaacaacctgaagtacaagttcagccttttcatgagccaaattcatcacttttgagactaaaattcatgttcagatttgctgacactatttagacagcttatgtaacaacactcaactctgttgggtagattggctaatggtgattaacctccttggtatagaagattttagattaaagcagaattttaaattacaataactagctgatggagttttgcagaacaaattttaaaatccccaagccacaaatgtaatatttgcattatacacacgctcctttcattcccttgaattgataacacttcgcaatcacaagatttggcctgggagaaaataaacgagcttttcagcagtgcaagctgatgaccaactttgtttactgatcagtcataaaagtttttatgaacttcatctcgcacccacaacaccttgtaaagtgaccctctcactatgtgaacacaacgaatgtctacagaggaaagaaccacgtattatgaggattaactactggaatggaatgtgtctattaatagctcatagtaggcactaaataatggcaaccaaattcaacaacactcactaaacagaaatggggaggtgggatggtaaaggggaagtttaactgagcttggaaggggttaatattcagggttgagagaatctgcccttaggaatctttcaagaagacagggatcctgcccaaatgccattgcagtgccaagggtagggagcctagccaaagctgaagttgggcatacccacgccactgccttcaggccatcattccgtgcattggaatgctccaggtgacacacaggagaaccttgtttactgttcttgacccaaggcttgagatccttctgtgggcaaatgcctgcacatcacctctgtatcatgtgagtgaaggactctgagtccctggtatttgcaataatcgatctcatcctacacttgtccttccaagccagtgtttctaagagtggtcctgatctgtgatcactcctggaacatcggttaaaaagtgcagatcccaaggacccaagctagacttgtgaatcagaatttctggagataaggcccaggaatttgttcaacaagcttccatagtagttccaggcatatggaaccttttgaaattcactgctctcggagaaaacccatgctttttgcattttttttaaatggaaaaatgttgctagagacttttagctggaaatataagagaagataataacaacacagtaataataatgggcggagtcatggggaggggtcgtttgaagctctatttgagaacctgctggcattggtgttgttggcctgtctcagccaccctgatgctcaggtaggaactcctgaaaaaaaaaaatgtctgggccgcgccctatgagaccattgaaaggtctgggatgtccattcatccttggggtcacctatgccacaggaagttctggacaagaacttcccaacaatccataagcggacgccacgaggcgcgaagcgcgttggtggccacacgcaactccaggcagcccaaccctcccgctaccttctgcaactgcagtcagctcccaaaagtgaactggcacaaaaaggtgggacttccggccctggaagccaatgcgcatgtggcagtcaaccggttacgcaatacttcctgtcgcgtgatcctgaggaccaatgaaaatgcataattgcagtccacgtgcctcggtttccgttagcaaccagaggcttctaaacaacctaccctccttccccattttctgtggtccaactaccctcggcgatcccaggcttggcggggcaccgcctggcctctcccgttcctttaggctgccgccgctgcctgccgccatggtgagtaaccgaccctcaggcgccgcaccgcgcacaggagagagcgcggc

SEQ ID NO: 29417 - DNA, 2300 bp, Homo sapien
cccaggagagggcatgtgagtgctctagagcagctcttccagacctggatggaagaacctacctaagcttccccacctcacctggaccacggggacccgtgcagaggagggaatcttcccacaccggtgcatttaccccttctcctcttccctgacggccagcctcaccttccttcctcccccgagactcactccaacgtctaggggcaagcagtgtctaccttgtatgctcttacctgatgaggaaacagcctgagtcaagagaagggagaagcacaggcttttcctcacccatggcaattgcaatagtgcgtgtctcacctcgctgcaagctttccaaggacgcaatcaaacacgggggagaaacaaattcagccaagaaagtcaagtaagggaacatcttcttccctctagcaccagttccttttgtgtctttatttgccaagtgagagggaggagtgagatgccagagcatctggctggttctcagctatgtatagtttcagacaccatttatttgcaatgagcgcccgccgagggaagggaatttcacggctccctcgcaccgccgttccttaaggctgatgaatcagacacctctttcgttcttactgtgcatgccctctacctttcagatgacctatttgttggcctttttccatttagacaataaacccaagtgcaccttctgcatccctttgctctacgggaactgagggtgatgaaggggacatgcgcctgggagtaccacgccatgacagagcggcattgagtcctcgggacaatcaatacaccaagaggtggaaattaacatccacaagagtgtagtcatgattttcccccagaacaaatatataaaagggatctttgtcataacaatgacaggaaatcattaatcacatcaggattgaagtccccactgtagcagtggatgggaagacttcgtctgtgatcttcattaaaaatgcaatattttgtatatttagcttttttcaaagttttaccaaaacacctgtaattaatacaatttattgtattatctttgttaatgtatctgatgtgcaaaaccttactagatttgccccaatttgaaggtgtctgtggctttccagcactccatgtgttcctagctacatctcacaggcagactttctaaagcagtgcctttcaatagcactgttggcgacgatggacaggttctgtatctgcattgtccattgggatagccactagctgcatgtggctattgagcacttgaaatgtacctggcatgactgagaaactagttaacacttaaaacatttttcttttttgatacagggtctcagtctgttgcccagggtggagtgcagtggtgcaatcttggctcactacaacctctgcctcctgatccttccacctcagcttccctgagtatctgggactacaggcatgggccaccatgcctgcctaattgtttttgtgtgttttgtagagatgaggtttcaccatgttgtccaggctgttcttgaactcctaggctctgcctagtgatctgcccgcctcagtctctcagagtgctgggactacagaggtgagccactgcactggccctagttagcattttaattaatttgaatttaaataggcacatctgcctagtagctactgtgttggatagcacagccctccgggttctggtacgtctgtcaaggccagaaaaggtatgttgcgatggatagtgctacatctgccactgggtggtaatctgatacaggcctgctcaggtgacaccacctaaagaaatctcatcagtgtgcacctctggcaagcctgacaaggctgacttctctcgatgggatcctccaatttccccattccctgtaagcagctgtgctgtctaggaagagaatttgctcttagatcatcagtctgtatgtgcgtcttcagatgagacagtttccccttatcccagcagttttcagctttttgtttctggttgcaaatgattgactccgctgattgctggaagctacacaggtgactccccaccctcttgggctaccccaccagtgacaacacaggcaggggtggcctggcttcctttctcgtgttgttatcgggtagctgcctgctcagaacccacaaagcctgcccctcatcccaggcagagagcaacccagctctttccccagacactgagagctggtggtgcctgctgtcccagggagagttgcatcgccctccacagtgagtattgctcttcttcttgttgcccccaacccagtgtcatcttggccctcagttgtgtgctgctatga

SEQ ID NO: 29418 - DNA, 2300 bp, Homo sapien
tttaattgattaatcctcaattcatgtggccttacgggatggtgggtctgggaccccaattcattcttatctgccaaagaattatctagaagcacatcaaataccagcaccccacctgctcaatgggggtggaaaacttttgtatccctaagcatattattttatagtgtctgccatgccatgtggaaatactttatttttaacctcaggatttaaataaagtaaacactatgacatttagacatttgtctctcatttttttgggacataaagtgcaccacgaagttatacagagctgagttggggttgagctgtgctgctgggaaatagagcatcttttatggtggcttttcaggaggacttgagccagcagatgttctgggaagtttccaggtggcctggcacctggctgcttcctggcctgctgtgagggtggtgtttagacctgcctgagacagcctgtctttcaatccatgctgttgtgccctatgggcttctagcctcagctcaaatgtccagatctcccagggcacccacagagcatgttgagcaaagagcagacttctgagtttaccggaacaatggggctggggagaagcatcatggatggcctaaaaccatgattggtcaatatgaggtacaaagctgggcaagactgccaggctgagatggctggcagaggaagaagtcagccctcccattcccgcatacctttctctggctgggtcagcaaagagcctggacagaggcccagaggggcatgccctggtcactgctggatgttggactgagctcaggctgggcagcccacccacactcacctcacacccccactccagggatgaccagggctctgtccctgcagtgctctgcacctcaaaagaacacctccccacaccaccccttcaccgcccttcctccgccagccctctcctgctgccagactttcgtttggcctcttctttaatctgttactccatggaagaagtcacattttctgtaactctggttctctcccaaggataaaagacagtgaatccttcatctttatcttcatctccctcctcccttctctccccaccgcagcatcgagcaacatgccaggcaggaagggactcaaaaaatactgaattgacctctcgggtcagtcccagtgccctgggtcgccaaaaagtcatcagcattcccactggcgactaactctgccaggaatagaggctcctgaaacactccggtggcagaggagggaaagggtgggcctgcaggaggagatacaggcaatgatagctggtcactcagtcccaccccctgcaccccctcttatgtcaaagatgcccttgggctgggcgcagtggctcacgcctgtaatcccaacactttgggagtccaaggcaggaggattgcttgagcccaggggttcaagaccacctgggcaacacagtgagaccccgtctctacatttttttttctttaattagccaggtgtggtagtgcatgtctatagtcccaactcagtagaggctgcagtgagccaagatcatgccactccacgagtgacagagtgaggccctgtctcaaaaaaataaaaaggtaccctcagatcaagtatctatctagtaaccagattgcagtaatggcagatagttactccacctgccccaaatgacagagccagagagtttctttgttaatacaacagtccttcctgaggcttgggggcctcatgggctgggggctagaacaagaaacagttgagacatacatatatgtgtgtgctgtgcatctggggctgggatctggggacctccaggtcaaaatcctccattccacctcaccccaccctgctaaactgcagaataactcaagatgacccaagtctttgctggagggtttccaagccccacgcttgattccaggtaatccgggcccagttcagtgttcacaggctctgtggcacaaagaggtgccccgcccctccctgccactctgccgggtgagggctgaggatgcagagactcctgggtgactcagaaggctcctcacagcaaggtcagccctttcagtttgaagacgcgtgggaaaaatctcctcttgccacccacacacatctgaagagcaaacagatggtgaaaccagtagcccaagatgagaaaacggactttttttgagacagcagttgaagctgaagcctcaaaagccgggcggggggaaagcatagcaattatgaaagacattcaaagtgggttaggggtgagggaaaggtcagccttttacttttcccacacccgctgttttctgaa

SEQ ID NO: 29419 - DNA, 2300 bp, Homo sapien
ctaggtagccgtgcaaaatgtatttcttaccatgagatgttgtaggaaatgttcaagcaactcagaggatgtcaagggatgtaagagcttgagaaaggacagcaaccaaagcatgaccactagagggcaccccacctcctactacagctgcttcctttccttgctattgaggcagcctcagcaaagataccagatactcactgcccacgcggctttcctcctccccttgctctggtcatggcagcctactgctagcttggctgatggcatgccaccctttccttccgagtttctgtctgcagcctgtggtcagttgagtgaatatctcttgagcacatgttctagtccgtcaacttgtctgtccctttgtgggtgccatcctggcattcctgggcagcctgctgtgcacacagcccatgcccagtgaatatctacattatttgtctcagggtaaggttttcttctgtcccaaatgctcccaaaggaggacatacccaaggctccacattagaagcgagtcagaataaagtggtgagcacaaatcaggcagcccctggcactgtagtcctggagtccacacctctctgagtcatggtggagccccttcagcttggtgtctacaaatgggagtctatagtccttccctgtcacgactcaaatggcctcagcctgtttgttatgtaattactgcacaactttaatcctgcagactgcctgcagtacagatctgcttgtttagaaactagctgagggaggaacagatgcctggaaaatccctatggcccaaggtgccttgctgccaatcttccccagagggtgccatctcccctcagcctcgctaagccccgcagagtgagaagtgttgttttcctgattacacaggctcccatcgtccctctggtcagcctccatttgtgaacagtctcctgtgaaatggagatgtcttcagtttagaactgcactcttcaatacagtagccactagccatatgtggctatataaacttaaattcatcagataaatttaactaaaaatgtggctgcctggtggcattagccacatttcaagtgctcaattcaagtggcactagccacctggactggtggccactgtgttgggcagtgcaggtacagcacaggtctctcacagcagaaggctccactgaccagtgcaggtttggaaggttgggctgaaccacaccacacacatcatattcactctgtgatctgggggcatctttaaattttgctatcaaattattattattgtattaacttgattttactttgctaatccattgcttataaattcctagtgttagagtaggtagctaggcagacatgagcagggcaggagagggcccccctcccccaggaatgtcaggtgaccatcaagtaatggtcaggcaattgttaagctgtctctctaaaataactggttgcagccagagccagagaaagagtctcccaatagatagaaaacatctgaagctggtaatcagcagcttcctgacaagatctcaggagttgggcgagtgggctcaagcacgcacactaagaggcaaaatggcagtttaaccggtatgtgaccttcctctagaaacgactgataagggaaaaacacctcaaatgagcatgcatacacctccagtaaacagtctgagcatgcagctcctcccaagtgctggcaagccaccatgcctgcggacagcctgctccaagggaagagtcgggggagaagaaacataaaccctggaaccatgccaatgtataaaacctcaagtcaagggccggatggggcacttggatctctcaggtcacctgcttggctctcttccaagtatactttacttccatttgttcctgctctaaaactttttaataaaccttcactcctgctctaaaacttgcctcagtctctccctctgccttaagcctacttctgcccctcggccaaattctttcctccaaggaggcaagacttgagttgctgcagacccatatggatttgctgctgctaacatactttggtgccacatgactcagacacattccctagtggtaagacactcctacaactcaccttcttccgctggaggtagtcaacccctgtacgcggtttccttctcctgctctcctgcttatagaacaattgttcctccagaacaattcctctcagccatagtggctctgctcccaccagatgatctctcagctcatcctggtgacttgcaggggtacaggtctgccggctatgttgcccaggctggcctcaaactcctggcttcaatgatcctctca

SEQ ID NO: 29420 - DNA, 2300 bp, Homo sapien
attttatttagaaaatgtttaggtatttctggggaaatctaagacatatatgattgggttcccacccttaggaagttcaaagttttgtttcaaataaaagtaatgcccttaaaacaattaacactataaattggcagatagtaaacggcattttgtaaagtgattaaaataaaattttagccccaaacctgcaagtggctcagctcctcaaatttaggtgaaagtcttttgtactatagagaagtttctattaaagaatggccacgataaacaagccatgctttctcaaatacacatatccccatattgacatgtacacacagtcatggagggccccaggtgctggcttgtttttccccatggagtagaaaggcttgctgagaaaagcatggccaagggtgcttgacaaggctcaggccattctaacactgccctatggacctgtcttgaatggcatggttggttgtccctgggtaaaactcagctctcaaagcttaaagattcctaaatgtcaggcagggttacattaaattgccaccctgccttgaaagttctctttcaggaagacaggtgcatatttggctcagtctgttcctttattcatttgtccaccattccctacatccatctgtccatcggtatgtagtctatgcggcctcatggttcatgcccataaggaacacctcactcatttgtaccagtttggtagaaaggacagtctgaacgaattcattcaaaaaggcctgcaaacctactagaggtcttcagatcttttatcagggccccctggcacagctccatactcagagcagggcaggaagcactggctttgcagcctgacagtcctgggtgactgccagggatgtgtgttcttgggcaagtgggctaatctctctaatcttctgtttgcctatctgtacgtgactaggattagatggctgtacatagaagcatccagcatagggccaggcttgcggtagaaatgagtgttagtctctggatcctgaggctgctcctggtccctgctcccaatgcttgacatttgcccttaggaagagccacatgagaaggtttgcctagcaggtgggagagagcaacagcattggagagaagcagcctgaatgggagtgcagagccagagaaggcaggccaggcacctccacaagaaggcagctgcttctgggaaagcagacatcgagtccatgcctctccctagtaccctctccactacaaggcactggggcatgtgacccaggctgacatgcctccaattcctgccttccagcgttatttcccagaagggtcagtaatgttagatcatggagactgacaactagaactgtactgagatcaaagtagtcaacatctggggaattccaggagtacagagggcagcccaaggaaaccagatgattccagccagcctacgcagggtgggtgggcactgcctgctgagtgcctgagtggtgtgggcttaggaggtggggctgcaccaggccctctggcagacccatcatcatgctgttgattggtctggtaatgacagatacctgagtgtgtatcttcgattttccagtttctagctgtgtgcaccagggcttgttattttggctatggtcctcagtgttctcatctataaaggcaggataatatccactgcagggctgctatggggcttaacagctatcacatatgctggagctgcatatgcacgcagaacccagcccataccatggactcagcattggcccagaccctaactgttccaaaaagatgtctgactagtgaattaagtaattttaaggtacaaatgccaccatcttcggtggatggccagagccaaacctccttattgttcccctttagtttacgaataaagctcgtcaggccctgacagaagaatcagccccaaagcagaatgaagggagtgtggggtatcagtcacccatccatctctgacccacgcgttacacaggggcgggttggtcatatggattctgatctgaaggacgggagtagggggtgggtctcttatagtaaccagctgagggctcttaaaaaatgttcagcggaaacatgaaccacatcacagaagtagaggcagaccttgcttcatgagcaagctcatctctggaacaaactggcaaagcatctctgctggtgagtcatttgttttactctttatattgaaaagaagacagggaggactaaccccaggtattgttggtattctcagattcctgtctgtagtagggtacagtgcaaaatgccaggctatggagctcagctgctcttcgttc

SEQ ID NO: 29421 - DNA, 2300 bp, Homo sapien
agtgttagaaaacagtgatattaaaattataaccaatttgaaagtttaaaaactctgccttcttatcatcaatatacagagttagaactcagggtatttgtgacctgaggggtgtgatggaaaacaccagctcctggcagcattccacattcccaaagtttgggtggaccagcctagagaatgaggctgcttcagagaatgagtcttcctgcttcctgacaatttcaagtgtccttgaaaaagccagccaagcccatgttcaagcttttttatttaaggcaaaagatctggggttgattgggagttcctggtcagtgatggagcctgtctctctcaggacctgagtggctcgggtgtcacattaccggtggctgaggtgctgctagagccacgttagccctgaggatgctagctggggctccatacgagaaagaactaaacttcacatgtcagaaaccatcaagcctgaacatgctcattagtatccctgaggaagcctctgttcacatcctccccctccagtgcatcaggcacattctgacactgccagacctttctggaaagcctcacacttctttgagtctggcttcttggagtgaccttaccatctctctgaggggcagaggaggctaacatctgatcagattttcacactaggaaatctttgatcttctccactgattaattgttacttggatcaaccatagaaacataaagggccccaagcacattaagattcaggtgggaagtacattcatggtccttgggcttactgcacgccgtcggcatggcagcacgttttagcttaaactcccagtggtcccccagcactgttgtttaggtgcctgagtggtggctctctttggtgctggcagctctttgcatttaacagtgccttctgtgtacatcttttgcctcccgcatgttctcacacatgcggtgtcagttaagtctgcatgtcgggggagatggaggagacttagcatgggctggggcatatttccaaggtgaaagtgaattttctttctatgacttaggaaatttgataccagtcttttgaaatgaagaaggatcatcctattgttttcatggattctctctccttttcttccaatgtggttttgtcccagggacaaggatgctctctggcagaagtcagatgccctggaattccagcagaagctcagtgctgaggagagatggctcggagacacagaggcaaaccactgcctcgactgtaagcgggagttcagctggatggtgcggcggcaccactgcaggtcagcagggagctcgtgggttggcaccaacaccctggtggggcccaggaccagagcagacagctccaaaagaggactctgtgataggtgttggcaccatggctgactatttaggaagagcacattgcgttttggctttaagggaaccaggtaaggaaggtgtattagttgggatcctaacaagacactcagggctccctgaaaggaaaaaatacagagatgtggatggagttagggggccccgcagggatggggcatacccagagactagcagttcttctaccattcctatagggaccagaggggagcagcattactggaagccagcaagagctggcctgaaacctcactagaggaacacaggcagtgccaggggcatgaaggccagagaaggatggataaagatgaatctcgggctgggctgggggcaggtgcagaataatcagcagagctgtgaaggtctgtggtctcttagagccttagcttctgagatatgggaggcatacctacaacttggtgccagggaaggtgggctcagccacactttgtctccctgcctcccaggaccttaggaagtaaaccatgctttcaccaagctgacaagaaggctttgttggaatcttatgaaatgagctcatggccacatcctaacttgggggcagagccaggtctgatgagagtcacatggcatccagagcccagtttgggtgctgagcagatcacacaagatcatagtgtgtcatcctcacagcctgggcttgttttgttcccaggatatgtggccgcatcttctgttactactgctgcaacaactacgtcctgagcaagcacggtggcaaaaaggagcgctgctgccgagcctgtttccagaagctcagtgaaggccctggctcccctgatagcagtggctcaggcactagccagggagagcccagccctgcactgtcaccagcctcacctgggccccaggccacaggaggccaaggtcagtctcctgctactactgcctactatgttctc

SEQ ID NO: 29422 - DNA, 2300 bp, Homo sapien
gtggtggacagacaagggtgaacaagaaatgtgcccagtcaacaagcattgtaaagtatctgtgagctctcaggacatttcaacactccctgacttggagttatatctcatggatacttacatacccttttatgtttcagaggtgctttgtatcactgaccacttgctcctcatgcttcctggattatttctgcttctctgtctgagtttagtcactatctggttacatgttcctatttgttgtcttaaagatgctgtgacagaactaagcaaagaatttcaggaagcaggggaacccatcacggatgacagcaccagcttgcataaattttcttataaacttgagtatctcctgcaagtaagtgatgcctgtaatgtgttgatttttgcactggtatctcttttctccctcttgggtgactcatcagcattcaagatatggttcagaaagcccaaggagccagtaagccctcgtggttagattgaaggtcagagcagtccccagtgccagctcaatcctccaagtgtgatcctttggggaattgcaatgttgccccttaggatggctttgagaatcaagaacatcctttagagatttaggtcattgtaaggtaggtcagaaggttactgtatggcaaagatcttaactttgggacagttacatacccctttgggagtttagtgaaagctatagagtcttcccaaaaagacattcgtgtatgtatacacacaatcacgcatttttgcaggcagattctaagagtgtgtggaccctctaaagattatccatgggcttctgttttagagctttgctactcaatgtgcagtccatagaccagcagcatcagcatcctctgggagcttatttgtagtatattcttggctcccaccccaacctactgaatcagaatctctggggtcagcccaggatattttcttttaacatattgatggtataactcttatccctgcttagcccaaaaagtgctgatgtaaaaaacactgcagatgtggaaaaatgcatgcaactaaaataggcaggaaagaaatgctgtagaagttattttagggtagtggtattaggtgttaaatttttttctatttttgtgttttgttttatctagatatcctaataacatacgcatatcttgcttctgtaatcagaaaaaaaatgctataaaatgttatagaaagatatacctgtgtcattgtgaacaccattattttgcaacgtcacatcccaccaaagcacgtagtatgcgggcccactagaggaaaggcccctaacgtgctgaagggcttgcctctctcatgacatttcagctggttctttaacattgtaaaaatgtttttgagcctttctttttttcaattaagcccattttggttttgggtttgaaatgactcagagctgacatttatttaaatttattgtaggtgtattaaaacgatattgaaactgaagtgttgagtaactgggataaaaggtcattatcttatttccctaagtcgaagcatagttaacactcttcatattgcccttaagactcttttctttttctttttttttttttctttgagacagagtttcactcttgttgcccaggctggagtgcagtggtgcaaccttggctcactgctacctctgcctcctgggttcaagtgattctcctgcctcagcctcttgagtagctgggatcacaggcgcccgccaccacacccagctaatttttgtatttttagtagagatggggtttcaccatgttggccaggctggtcttggacccctgacctcaggtgatccacccacctcagcctcccaaagtgctggattaccagcgtgagccaccgcacatggccaagactcttttcttgtatttctttctcatccgttaataacaccttcggtggttttccacccagctgtatgaacagggtattaacacaccttgatttgccaataaataaaaataatgccaataaagggcctcacccagtgctggcacctaagaagctattgttattatttatcatttaaatgccggaatgaagagcagtgggtttggacctcctctccctttccctttccctacccagtttgatcagaaagagaaggccaccctcctgggcaacaagaaggactactgggattacttctgtgcctgcctggccaaggtgaaaggagccaatgatgggatccgctttgtcaagtctatctcagaggtaagctgagcaagcagccaacaacttcatgtcgtccttttgcctgcttaaagcagctcttgcagagacctttgctg

SEQ ID NO: 29423 - DNA, 2300 bp, Homo sapien
aaatgccagtctctgcaaatctgagtttgccactggctttaagaggtctctccataaagtagatagtcttttctgtgtttcaatatctggttcttgaggataactttgagacctggaggtccttattgggagggaagagggtgaaataggggaccctcaggtagagcttctgatctagaccattgtctatcctatgtaccagctgagtctggccacccccaacatcctgggctgatttcaatgtcctttacataggccacagagcactttggtgggaattcttgaaaggtgccactttctcagtaccctccactttcatctgttggtaaacgtcttaataagcatacaaatctacagcatctaccatgagagtggagtgtccttaactgaggcatctttgtgtggtacacagccttcactcctctgcagggcagcccacttatcctcttggtgacagcagtttcaaagactttggagtcaggcaggggtgtgctcagcttctggcttctcttttaaccctcgaaaatgttggacaagtcccttcacctttccaacgcacagttgcttccttcatgtgccaggtgggtttgatgataacacccacttctcaagattattgaaagaatcaaatagtaattcctgcaaagctaatattacttagaatatcagagattagagctgaaaatttcatatttcatatccagagtctactccttcaaagtttcaggagttcccagatcaggttgcgagtgtttacctggcctgaggaggcaggagggtggaggaggaaggctctttgtctctcccaggcccctggctcactggctgtcagtgccagccattgcagacacttctagcaaggtacagtggacaacagtcacttgtaagaatcagtcccaagaacctgtctccaccatttgctaatctttgcctgaggggtcgtgttgattacattttcagccatcttaggcttggcttcagtcctggacaggtctgcttcaaaccatggttcttgggagcagggtttaggaatttaagaattgccagagaagcagatagttttgtgaagcacatcccaccatctctgctgggaaaaggttttccaggatctaaaccaaatccagtgtctcgatagtccctctgtcccacagcagaggcagtgagtgagagtcaaaggtgggttttcctcttttctacacagggaggtgaattatcttagaagttaagaggtgagctctggagttagacagctcttgagaaaaccagggttcttattccagctctgctgtttgccacccatgatctttggccaagtgctctgatttctctgtacactcctcatctgcaaaatggggataatcatagcagacttcatagattctaaattgtacttttttttttgacattttaacagctctgaaactgtaatgtatattataattaattgtatcttagattcatcgaaataaggcaatccctgcctctcaatgccatattaaatgagaaaaatacatgtaaaggcccagcccctcaaggacactcagttaacagaagcaggtgcggttgtcattgttggaattgtgattgtcactactattatttgcacatactgggtattctgatcctgcgcttacctataatgagcagtaggattatagtgaagaacctgaaatgtggctagaataaaggtaaagctttctggaagtcagtattcagggactgaattgattcatccacacagcaaacatttgttgtccagctactatatgcaaattactagccctgggtggtggacagacaagggtgaacaagaaatgtgcccagtcaacaagcattgtaaagtatctgtgagctctcaggacatttcaacactccctgacttggagttatatctcatggatacttacatacccttttatgtttcagaggtgctttgtatcactgaccacttgctcctcatgcttcctggattatttctgcttctctgtctgagtttagtcactatctggttacatgttcctatttgttgtcttaaagatgctgtgacagaactaagcaaagaatttcaggaagcaggggaacccatcacggatgacagcaccagcttgcataaattttcttataaacttgagtatctcctgcaagtaagtgatgcctgtaatgtgttgatttttgcactggtatctcttttctccctcttgggtgactcatcagcattcaagatatggttcagaaagcccaaggagccagtaagccctcgtggttagattgaaggtcagagcagtccccagtgccagctc

SEQ ID NO: 29424 - DNA, 2300 bp, Homo sapien
tggagtgcaatggctcgatcttggctcaccgcaacctccgcctcccgggttcaagcgattctcctgcctcagcctccctagaagctgggattataggcatgtgccaccacgcccggctaattttgtatttttaatagagatggggtttctccatgttggtcaggctggtctcaaactcccgacctcaggtgatccgcccacctcggcctcccaaggcgtgagctgggattacaggcgtgagccaccgtgcccagccgcttcccccgcctttctgattataggtcttaagaccctcccaagagagggtcctcccctataccctgggggaagcaatgctgacatcacgaagcttccataaaagcccaagaggactggattcggggagcttcgggatagctgaacacgtggaggttactgaagagtggtgcatccagggaaggcatggaagccccacgccccttcctccacacctcatcctacgtgtctctttatctgcatccattgcagtatcctttataatagaccagtaaatgtgtttctctgagttctatgaaccactttagcaaattagctgaacccaaagagggtgtcgtgggaactcaacttgaagccagtcattccaaaattctggaggcctagacttacaactggtgtttaaaggtgaggaggcagtcttggggactgagccctccacttgtgggatctgatactccaggtagatagtgtcggaattgaattggaggacacccaggtgcggtccactgctcagtgtgtggggaaaaccccacacacatctggtcaccaaattattctcctgtgttgatgattgctgttgtgtaagagtagaggaaaaatacggtttgagggaggtttttttttccccacacagtttcaaacaaggatattggaccagatgaccaacattaaaatctctctcatccttaatattgcatgaagctgttcagacagtggttggagcaatgatttctcttagaccactacattgattacttttctctttgtcatcttctcactccccccgttttctttctgttctcctttctgttaacaagagtggaaatcacttctattcatgtacctcctcccaaccccacccccaaactgactactccatccatccaactcactgttttagctacatctaatttataaaattagatggctaatgagatgtcatagcctaaaatcgactaagaaattgattttctttctgtattattgtacccagacaacaccctgcttcctcagtttagaatgttgggccaccacggttcctgactggataccacgagctaggtcctacaagggagagagctgtttctggcttaaatgatgagaactagggcagagagtaaaggatagccagccacagctaaggaatgcagtcagttagaagccaaagtccccgtgtagtgttcctcttttctactgtgcccatagcggacactgattgaatgcattttgttctatcgtattcagttccacagtgctttgcaacacccatcttataaatagaagttgggctgaggatggggccaaagttaggggtggtagttcataaacacgtagtttttgagcactaattttaagtaagaccctgatattaagaaataagggggattaaaagatgggaaattaggcccaccaatacatgtttttctatttcccaatatatcaaaatattatcattttaacatgcaatcactaaaaattaatgagctagttaacattcttcggactctttggtacctaggtgtatttcacacttacagcacgtgcacgattcaactcgaactagctacctttggagtgctccttagccacacaagaacagcgttgttgtcaagatgccagacctttgatttgtggccctccggggttgcaggcgttaacctggggccagcatgggtcgcgggtgggacagtcggtccggggactgggcggtgggagcacttaaaccccgccctgcggagtcgccgggagttgtagtcggagccccgggagtccgatgggagttgcaggcctcagccccggggagcacgccgggagttgtagtccgcccccgccaccctcttggtgtgcgcgtcatggccgtcagcaccgcgttcccgtcctcttccgcttggccccagaaagtttcggttctgcccggcggtggacccacgagcgcgtaagtgccgcggaagaccggctggactctgggggcacctgggtcgctcacgatccctgaggcgagagcttcgctcggggcgcggcttgtcacctgttgcccttacagt

SEQ ID NO: 29425 - DNA, 2300 bp, Homo sapien
ctctggattttgtttcatttttctgaaaagtgttgattggttatttggtgtttgtcttaacaagcatttaagttttataaataaaaaatataattctaagcctcacaactaactgaacggactcctcagccaaggaagggcattctaaagaaatattagttcaggccatgatgggaataggtagtcagacatgcctcattatactctcctccttttgtaattcagcacagctgaccagtattaacattaaagcagcccttaagcctgatagaatagactctttgtagcaataagataccaacatgacagataggaatattttgaaatggtcttggaaagctatctcttgtggggaaaatacactctgtagagaatccccttcccattccaggtcttttctctgatccaggagagaattaactaagagtctggcatcttttttgggttttttgtttgtttttgaaacatggtttttctctgtcacctaggttggagtgcagtggcatgatcacagctctctgcagtctcgccctcctgggctcaagcaatctttccccaccccccggtttcctgagtagctgggactataggcatgcgccaccacacccgggtaatttttaaattttttgtagagacaggggtgtcactatattgcctgggatggtctcaaactcctggggtcaagcaatcctctccctttggcctttccaaagtgctaggattacaggtgttagccactgtacccagccaccacatggctttaaactccatgtctctatcatttcagatgctctaaacgtccctgccatctggtccagatggagtcctcaggcaacccagagagcaccacctttttttactatgaccttcagagccagccgtgtgagaaccaggcctgggtctttgctaccctcgccaccactgtcctatactgcctggtgtttctcctcagcctagtgggcaacagcctggtcctgtgggtcctggtgaagtatgagagcctggagtccctcaccaacatcttcatcctcaacctgtgcctctcagacctggtgttcgcctgcttgttgcctgtgtggatctccccataccactggggctgggtgctgggagacttcctctgcaaactcctcaatatgatcttctccatcagcctctacagcagcatcttcttcctgaccatcatgaccatccaccgctacctgtcggtagtgagccccctctccaccctgcgcgtccccaccctccgctgccgggtgctggtgaccatggctgtgtgggtagccagcatcctgtcctccatcctcgacaccatcttccacaaggtgctttcttcgggctgtgattattccgaactcacgtggtacctcacctccgtctaccagcacaacctcttcttcctgctgtccctggggattatcctgttctgctacgtggagatcctcaggaccctgttccgctcacgctccaagcggcgccaccgcacggtcaagctcatcttcgccatcgtggtggcctacttcctcagctggggtccctacaacttcaccctgtttctgcagacgctgtttcggacccagatcatccggagctgcgaggccaaacagcagctagaatacgccctgctcatctgccgcaacctcgccttctcccactgctgctttaacccggtgctctatgtcttcgtgggggtcaagttccgcacacacctgaaacatgttctccggcagttctggttctgccggctgcaggcacccagcccagcctcgatcccccactcccctggtgccttcgcctatgagggcgcctccttctactgaggggcctgtggcggtgcaggcgcaggtgcaggtggacagggactggaatgggggtcatggagaagcgggcctggaaggagcattgcagaacacagcagggtggagacgtctcctccgctgcaggcgtgcagtgaaggtcattcattacaccagtgggtcccgccagcctctcatctgcgggaaagtggcttcctacctgggaattttatactgccatccaaaaaaacatttcttgaactctgagttcatcttgcacgctccttcatttagacatgtgtttctaatcactgtttagttcagaaggttctaagacatgaaaggattctgggaaaggtgcttccttggagactttacagggcctaaagctcattgtgataactgcacgatgctgacaagacaatgcctcccttccctgactgtaaggttgtccctactggtttattcactttggaggcgcctggctccgtattcctcaggtac

SEQ ID NO: 29426 - DNA, 2300 bp, Homo sapien
ttgtcttgtatatgactatctagttttcctggcaccatttgttaagaagaatattcttttaacactgaatggccttgtaaatggtcttgatttttgacccttgtcaaaaatcagttgacaatcccagcactttgggaggctgaggcaagcagatcacttgagcccaggagttgaagaccagcctgggaaacatggtaaaaccctgtctctataaaaattagccaggcatgttggtgtgcacctgtagtcccagctactcaggaggctgaagtaggaggatcacttaggcctgggagattgaagctgcagtgagccatgatcgcaccactacactccagacggggcaacagagtgagaacctgtctcaaaacaaacaaacaaaaaatcaattgaccatagatgtatggctttccccattgtatttcattgatctatatgtctccaatcttgaatagaagaaagaacaaagttggaggatttgtgatttcaagacttactacaaaggtaatcaaaactctatggtactgacataaggatagatgcaaagaccaatggaatataactgaaagttcagagctaagccatagctataaatccctataacctgactaggcaaggatttcttaactacaacagcaaaatcacaagcaacaaaagaaataatttataaattagatttcgtgaaagttaaaaacaggtcaggcatggtggctcaggtctataatctcagagctttgggagggcaaggcaggaggatcacttgaggccaagagtccaagattagtctgggcaatatagtgagaccctgtctctacaaaaaaattaaaataattagctggatgtggtgctgtgtacctatagtcttagctacttaggaggctgaggcgagagtatctcttgagctccagagttcaaggcaatagtgagctgatcatgccactgaattcaggcctgggtgacagagtgagggcctgcctcaaaaaaaaaaaggaaagaaaagaaaaagaagatgtaaagcatttgtgtgtcgaagggtattatgaagaattaaaaagaaacccaaggaatgagataaattatttttaaatcatatctctgataaggatctagtatccagaatgtagaaataactcttacaatttaataataaaaagactaataactcaaatttttaaaaggcaaaggttctgaatagacacttctacaaagagatacacaaatgaccaatacacatataaaaagatgctcaacatctttattcattaaggatgtggaaaaactgtctcctactgttgcagctgtttcactcctgttgtttggtgagtgggagggagtgttacagctcttttactccccccactggtgagctccaagttcttgtcccacgaccaagaaaaataaggcacacagacactggagagtgaagaaggcagagttggatttattaagccacagaaaagctctcagcaaagagaggggacccaaaagagggttgctagctaaaagtctgagtcacaggtttttacaggcttagaatgaggaaatacgtgctgattggtttatgggtaggcttggaaaaagcactactcaggaagaggtacaatagtgtaaagaaccaattgggggctgaagtgaaagcttggactgagaccttggcccaggaccaatcaggggctgaagtgacgttacactttatgcaaatgaaaatttggcgagcagctaatcacagaaagataggtatatgttaaacaggtaaaaggtaaggaccaatcgggaggaagcatgtgaaatgagacaaaggcgtgccaaggagagggatatatgttcaaaaaaggagtggaatttgttcatctggattcatggagtaggcgtttctattcaaacatgcaggctcttttctttatccagggcttgcagcttgattttcaggctgttcttggtttgaaggagttccaccaaggatccaccctaactgcctgcctgactggcttcttccttcctcctctctcactagctgtccccctctggccccctggctctctctgagactcctcccatcctcctcctccagccttctgggcaggacaggtgtttcagtttctttaagtgaaatatgaaacagagaagcaccatttctgcctcaagacgcatgtaaagaggtgtagattcaggtgagttcctttacaaacattttaaacttatgttttcctctaattgtaacagcctatatcaggagttcttaagctttgctgcacatcagaaccacctggagggctagtaaatatgctgattcctgagct

SEQ ID NO: 29427 - DNA, 2300 bp, Homo sapien
aggaattaagtaggaagcatatttgcctggcctcagtgcctgtttgaatgtgggagctgagagagcaggcaaatgatattccaggttattgatttgggaatctgggtgggtgctgccctaacttagatcagaggatgctggcaaagattcagttcaggaggaatgacaatgaattcaggttcatgtagaacatgctgggtttgaagttctttggcatgtcccaagggagatgtttagcaggcaatttggatattgcagttactggagccatttgtggtgagatcactaagggagggtgtgtaccacgagatagaggagtattaagaatggaaccccagggcatatcaccccagagggaatggaggatgtgtgaaacaggaggaaagagtgtctagaaggtgggagtggtcagtaacatccaataacaatacaagtagatgaaataaggactgaacaggttaaattgcattttgcagctgggaagttgccagtggagtgctcagtacagggaatggaaaagaaaaatcgaggcagaatatggactacttgaaagagtaggaacactctgggaagagtagagcaactaaatgtgaagagaatgagcaagacaaaagttgggcagcaactgaaagggaaaggaaggtgattttaacaaaattaggtctggaaattcttcacgcttttaatgttgagataaagattcataagtagtgaatagtaagtgcagagaagtcccacaaacccctcacccagtgtccctagtggttacaactgtacacaattatagtacaatatcagtaacagggatttgactttggcacaatgtgtgtgtgtagttctaagtcatttttatcacatgtgtaggttcatatttaatatgatcatcattgtattcaaatacaattttttttagagacagagcctcactctgtcacccaggttggactacagtggcatgatcagagtccattgcagcctcgaactcctgggtttgagctatcctcttgcctcagcctcctaagtagctgggactataggtgtgtgccaccatgctcagctaattttaatttttttgtagagatagggtctcgatatattgcccaggatggtcttgaactcctgggcttaagcaacgatcttcccacctcaaatacaaaattattccattatcacaaacagctctttgtgctacccattgataatcacaccagcacctcctccctcccatcatctctaacccctgaaaaccactattctgttttctatttctataattttgtcactgagaatgttacacaaatggaatgataaatcatatactattttgagattggcataatgccctcgaggcgcattcaagttgtgtttatcagtagctcattcctttgaattgctgagtagtagtgtttgatatagatgtactacaattctttctccaatctatagttgaggaacatttgtgccattttctagtttggggttattacaaataaactattaacaatggcatacagctttttgtgtggacagaactttttatttttctgggataaatgcccagtgtttcaattgctatattataaagcatttgcatgtttagttttctaagaaactgctaaactgttttccagacttgttgcacaccattttatagttccaccagcaatgtatgtgtgatccagtttctctgcatcctggccagcagatatgtagtgatatttcattaagctcttaatttgcattttgctaatggcaagtgatgttgcacatcttttaatgtgcttatttgctatctttataacctcttcagtgaaatatctctttacgcttttgtccattttctaattggattgtttgggttttttaaaaatgttaaattttgagaggtgtttgcatattgaaaatagaagtgtttcagatatgtggtgtgatggttaatactgaatgtcaacttaattggattgaaggatgcaaaatattcatcctgggtgtgtctgtgagggtgttgccaaggggcttaacatttgagtcagtgcactggggaaggcagacccacccttaatctgagtgggcaccatctaattagctgccagaaaatataaagcaggcagaaaaatgtgaaaaggctagactggcctagtcttccagcctacattttttcccgtgctggatgcttcctgcccttgaacatcagactccaggttcttcacctttgggactcagactggcttccttgctcctcagcttgcagatggcctattgtggtaccttgtgattgcgtgagtaaatactacttaata

SEQ ID NO: 29428 - DNA, 2300 bp, Homo sapien
ttaaggagaggagtcaaagggcttttaagagaaatgaatggagcaaggtcatccctctttgctggtttctctcttgtctctctgtgctgcccccattgtacacatctgctgtggtgagaggggtgtgtgcactaaggggtttgcaaggccataggagacctgagtgtgggtgtgggaggggagacagagcaggcaactgagcagcctcttgtttaggccttgagctaaagagagaaagaaggcttcctagctcatagctggtccagcctaactcttctgaagaaagatcacatgggactctgagccaaaagcattgagaaaatctagatccatgccccccaaatttaagcatgcatcagaatcatgccagtctttgtcaaaacctggattgcttggccgcatccccaggatttctgagtcagtatatctggcatgtaaccccagaacttgcatggctagcaatgtcccagggaatgtgaatgctgctggtccagggacctcactttgagaaccactgctctaaaggacttcctcaccccttcccaccctcgatgcacccttccttagcccagggtatttcccaggccactacaaaagctgttcctcattgtggtaacttggttaattgtttgtgatccttcctaagctataagctctcaaagaatggatccagcctctttcttcaccactatatcccaagcacctaacacaatgtccggcacattgtgagtactgaataaatatttgttcaatgaacaagcagatttgcctggtacatcccctctgtggaatgaaacctagagcagagctggaagcctggtcaaggatgaggtactgaccatgtcccttactttagacaggatcaaggaaaaggcaggcctcacaagcctctgttctctttggaaactgatccaccagcaaagtactgcaaatagccaggcacatgcagacccccatttatttctttggggtgaagctgagtgatgatcagatgtcaagcttaggccatcttgtctgaattcttcattttacagataagaaaactgaaccatgaagagacaagtgatcttttcaaagcacattcacactgatgatttctgaaacagtgctttgtagcaatgccgtgaggaaggttaggggtgtccccactttatagaagacacaagggcagaggcagagtaggtgttggcagttgtgaggagagtcacagtactcatcatttgtcagacatttttcactgtgccaggcactctgacatttttcatgtacaagttgacttcgtgcttctcctctgaggtaagcattcaatactcccatttagcagagtaggaaccaagacttagaaaggtgagtgatctgcccatgtcacaggtggagagctgggatttgaacttggcccatgtttgaccatcacgtaaaacaggaatggggcatcagaaagggaaggtcaaaatgtaaccaacagacctatattcccttcatgctggaggttcctggggcaaagccactctctgaggtttggtggggagggacttggggagcagagagcagagggacaatgagctcccagaagccgaggggcatagggtgccaaagagaagctgctgcctctgtgagcacccatgtcagttagttttgaggaacaggactcagggttccagtttaaatccttccattcacaatctttaagaagaagaaaaaaaagaagtctgccgctgaccacaagagctctatgccctgcccccatcccacatacacacatcccacacttcaattgctccaaacattctgggaacatctcactgccacccacctcacccaactcagcttcacctgcccccaattcccttaaggctgagctcccagggccaagactcaagaggctcagagtgagcagagaaaatcctcgcagttaacttggcttccaggaagtggccactggtgggcgttgtggccattcatgagcaccaaaccacacaaaaagaagaactttgtccctttcttgtcattttgaaagactgtgaaactggagccaattctccatcatcacacaggaagctgagtacttcctacttggtcaggatcttgaaacttgaattcataaaaacccagaaagccccagaaacaaagacttcacggacaaagtcccttggaaccagagtaagtgtcacttgtcttttctgtcttatctgttactgtggagggcagtgttgttcaaagacatgcatgcagctaggggctcctcaaaggtagggggaattctttgagtaggctgggcaaatgtctaagtagcccatgga

SEQ ID NO: 29429 - DNA, 2300 bp, Homo sapien
catgtcatgtgatctagggataaaactccccagataaagtgaaaggagtggaagccagatgcaccacaatgggcctgcaaaattccaccctctgccagagacctgcaggtggctctgaatgctctgcagggctggagcttctgaatgtgtgtcaccctaacagatgtatataatgtgttacacattttaaaatgtgtatgtgtgtatatatattaatctccctggctcttggttcctggcattaggatgcaagcatatctgttccctaatttcattcctgcctacccctgcacagggaccaagctcacctcacctcttggtcttggtagctctacttcctttttcctggaaactctccctaccccttccacatggccaaattctgttcatccctcgggccctttctcttccatgaagccgttcccagtcccttcagcccacatggtcctgttttctaaaccctgtagaacttgcatttgacatcccacatgctgaatcagagcacaatatattatactatatttcagaccaccctgagtggctgcctctttctcactgagagggtctgtcatgacaactatgataagtattttcatgacgctgtccacatgccacacactggcctccacgtagtcctaatttatttgctcctcacacagatcctacaagctaggcattgctacatcattttgcagtagagcacgctgaggcacacagaggttatgtagcttgcccacggtgatatccctattaagcggtaaaggtaggttttgcattcaggtgtccagcagcaaagtctgagatcttactatcagtcgaaaattttgttttagccaatttgaatatgctatattgaatatgctgtagattaaatagtgaaatgtttctttggttatgctttaactatatttgagcattcttgatattttatcaggtctctgttgtctctgatcaccaacaaggttatagactctttaaggtggaaactgagccccttcctccctttcttctctttctctcaaattctctccctattctttctctctctctctaatgcacatgtgtgtgcgctctctctctctctctgtctctcttatcctccttcctctttctttgtcttttgttcctatgttttctttatcatgaagcatacagcacagtcctacacacatatcaaacgtttgataaacactttggtgcattacactcatttgtcgagttagtcagtgtatcaaagatcacttcatgcttagtcagagttcttcccacaaatattgggtgaatacctgctctgtgcccagtgccatgctaggtcccaagggacacatcagcacatacagcaggcacatggctctgccctgtgacgctttgccctgagacatggctctgccctatgacgcttatgtcacagtggcattctacccacactttacatttccttagccctgtatattctgcagagacttttcacatatttatcttagttggttccacggcaatgctatgacttaaatatcattatttccagtttagagatgaaaaagctgaggtccagcaagtttaaattactacccccagcttatgtagctgtgtatgccacaactgaaactcaaactcaagtcttttagacttgtctaaacctttgcagccacattttgccccatccaagtgtctactggaccctgcagaataattagtttattcctttgccgggaaattcttatttcattcttcatcctgtctcccgatgagtcaaatcaatgcttattcaagaattataaatcccaggtctttaggaggccgagactcgcagatcacttgaggtcagaagtttgagaccagcctggccaacatggtgaaaccctgtctctactaaaaatacaaaaattagccaggcatggtggcatgtgcctctaataccaactattccagaggctgaggcaggaaaatcccttgaacccaggaggtggaggttgcagtgaactgagatcatgccactgtactccagcctgggtgacagaatgaaatcctgtcttaaaaaaaaaaaaaaaattataacaaccccccaccactaaaaatgagcaatgccaatgggtggagagcccctaaagcagcactaattgcaaggatttctcaggtgactggttagtatgtggtgtcaatcatgaaaaagaagaactgcacgaaagtatctttctgaaaacttgcaaaactgagaagctagtctgtttaaaacaggaagttatatacttacattgtttactactttactaatgtctgtgatctgatggtatctctgt

SEQ ID NO: 29430 - DNA, 2300 bp, Homo sapien
tgtcttccaagaaaaaacctgagacccttcaagtctcaggtcttacttagcacatataccaggtcttacacaggacacatggttacaactgactgaaatctgggctgggtgtaggagctcacacctgtaatcccagcccttcaggaggctgaggcaggcagattgcctgagcccaggagttcgagaccagcccgggcaacatgacaaaaccccatctctacaaaaaatagtcaggcatggtggcatgcacctgtagtctcagctacttgggaggctgagatgagaggattgcttgaggttgagactgcagtgaagcatgatcatgccaccgcactccagcctaggcaacagagcaagatcttgtcgcaaaagaaagcaaaaacacaacataacacaacaacaacaacaacaacaacaacagcaaaaaagccaacttcttgaaatctggaaaggacacctggactgccctgagcatttgattgttgttggctctagcagtggatgcatccttcaacctctggcactctgcagggctcagactgttctgttctgtttgttacctgtggagtgcctgccagaccctgctctagctgctttaggtccatttaccctcatagacccccagtcttgttattcatatttcatatttgggaaatggaaacttagaaacttgccaagtccacagcatgagatcctgcctccggtgtctgctggattccagaaagtgccaggggccaacttagatgacaccatgttctctgcacaatcttaggaatgctcctagtctgatgtccccattgcaaaatttacattatcttttaacaaaacgtctttccaaggaggggcatttaaaataactgaggttcttcttgctaaggacgttcctgacacaagagataatttagcatttccttttcattaaaaagtttgaaatcctgtaatttgtgataatgtggatgaacctagaggatgttaagtgaaataagccacacacagatagacaaataccacgtgatctcactcttatgtggaatttttttttaaataagttgcttagccgggcatgatggcacacacctgtaatcctagctactcaggaggctgaggtgggaggatggcttgaactcagaaggtggaggtagcagtgagctgagactgtgccagtgcactccggtctgggtgacagaatgaaacccaatttaaaaaaaaaaaaaaagttgctatcttagaaaaagacagtagagcagtggttaccagagactggggaggaaagagaggaggtgagaatgggcagcagttgatcaacgggtacaaagttaccatgagataggagaaacaagtgctggtgctctgctccaagtagggtgacggtagttaataatgaattctgtatatataaatagctagaagagagggttttcaatatcattattatttcaaaagaaatgataaatgtttcagaggatggatatgtaattaccctgatttgatcattgcacaatgtatacatgtagcaaaacatcacattgtgtcccataaatatatacaattattatgtgaattaaataaaaaaaaattttaaagtcttatctaaatgaaatttctaaccagattctgaatccatgataccactgaaaccagcacacatgatcgcagtaaaacctcattatacttcctccactatcaccaataccctttattctctggaacatgaaacattctgttgtgctcatatcatgcaaattatcactagtaggagagcagagagtggaaatgttccaggtataaagacccacaagataaagaagctcagagtcgttagaaacaggagcagatgtacagggtttgcctgactcacactcaaggttgcataagcaagatttcaaaattaatcctattctggagacctcaacccaatgtacaatgttcctgactggaaaagaagaactatatttttctgattttttttttcaaatctttaccattagttgccctgtatctccgccttcactttctgcaggaaactttatttcctacttctgcatgccaagtttctacctctagatctgtttggttcagttgctgagaagcctgacataccaggactgcctgagacaagccacaagctggtgagttgtaggcattttttccattactttctgattcataggctcaacgcacctcaaagctggaaatgccgggtctgggtacaccctggggaactgcaaagcctgcacacttggggggaatgatcaagatgagaggcaggggtggggatggcatgtgcaccaggagatgtt

SEQ ID NO: 29431 - DNA, 2300 bp, Homo sapien
atggctgtgactgaagcacaggatttgggattggagaagggactggaggtgaggctgaaaagaggcaaactcagaaaagatgttgtgctgggcagtctggacattatctttgaagcccaccacatataagtcatagggctactggaggttttaagctaagagtgactattcaatttcaacttaagagaagataggttgagagggaacatggcttgagatgagccatgagcaaaggaaagactacaacaaagccaggagtgaggagtgtgtgaagcaagaaagtgacagttgaaagcagtgcagaggggatgaatctgagaggcatctatgaggtggaactcaaatgacatgataataatacagggcatttctctgtgtcagatgctgtcctaagtccttactccattgatcttcacagcaactcagcatagttaatattttatgcataaagaaatcggcacttgaaggagtaattggccccagattacactgcctataaggattcaaatccaggtttgtttggctccaaaaactggctcctaattttcagaaggagaagcaacccagggcaatgcccaattttgcttcttaggcaatggaggaatccacaatcggaaggagttttcagcagtgccccatttggggtgggttgaatttgaggtccctgcatgatacccactttgctcacttcagtgcctaaaactgagtatggttcatagtaggtgttcaataagtgttgatgcagtgaatacatgcatggggagatatgcatcaggcaatgggaaattcaactctaaggcttaggggaaagctggagcttgaagacagagctttagaaaacagtagcatagaagggagtaggaaccatgagtttagacaatacaattcaggaagaactttgtagcaaggataaagaggcaaaaaattaaagaggtgagagctaagtgtggtgcctggggaatcttaaggtgtgggcacggggaggagatgccagcaaagaacatgaataaaaagcggtagcacagcccctcccatctggaagccaaaaagaattgtaaatggaggaagttagcagaaggatcaaatacttgaagagggtggaattggaataaaaccagggcatttgaaaaattgggttgtcactgcaatcttaacaagagaagttttggcaggatgatggaggcagaaagctgagagaatcatcagttagaacgtttttgacttcagagaacagaaaatgcagttcataatggctttaaaacaggggcttgtttttctcccagcaatttgagaggccaaggcgggtgcatcaggaggtcaagagaccgagaccatcctggccaacatggtgaatccccatctctactaaaaatacaaaaattagcggggcatggtggtgcacgcctatagtcccatctactcaggaggctgaggcaggagaatcacttgaacccaggaggtggaggttgcagtgagctgagatcatggccactgcactatagcctggagacacagcgagactccgtctccaaaaaaaaaaaaaaaagaaggcagaaggtgaatagttcaagggtgggtttaggactcagtgataataggattctgcctggcttctcatggttctctaggtcttccattcatggcaccatgccctcactaggcatgctgccagagcaggaggggcaggtggagggttctcttgtgtctgtcttatcagggaagaagagctttctcagaagcccccagcagactcccttttcatattatggtccagcaatgagtcacagacctatgcaccacctgcaaaggagccagagaaaacaaacgcccagcgcttttagcctgaaaatgagaatctggtttgctggggaagataaagggtgtcggaaaatggctgttgggtaaatcattgatgtctgccactaggaatgaaaggcaaatcaggaactggcacacatgctttcagggagatggctgcaagggagagggcaaagactgggaagttgcttatgtggtgccagactatttggaagatcatggattgcggtgtttgtgttgtgtggtcatcattttgttctttgtttacagaacagagaaagtggattgaacaaggacgcatttccccagtacatccacaacatgctgtccacatctcgttctcggtttatcagaaataccaacgagagcggtgaagaagtcaccaccttttttgattatgattacggtgctccctgtcataaatttgacgtgaagcaaattggggcccaactcctgcctccgctctactcgctggtgttcat

SEQ ID NO: 29432 - DNA, 2300 bp, Homo sapien
tgaataattaacattctccccatcctgttgacgatgctctgaaaatatggtccagaaatggtgtgagcaaggagacagcaaagcaatgcttggaacataggtgcagtgactagacatggggcagctgtttaaagacaaaaaggccccaaaaaggagggatggcacgaaacaccctccaatatgggcatggagtctagagtgacaaagtgatcaaaagttcatttcctatggggtgtccgaatgtacttaataataaaaagagaacaagagccatgcaaactgagagggacaaagtagaaagagtagcagacaccaagcaactaagtcacagcatgataagctgctagcttgttgtcattattgtatccagaacaacatttcatttaaatgctgaagaatttcccatgggtccccactttcttgtgaatccttgggctgaacccccctgtcctgagtggttactagaacacacctctggaccagaaacacaaaagtggagtaacgcacactgcaaagctgtgcttccttgtttcagcctgtgaatcctcaccttgtttcccatctagcctatatttttcaaactaacttggccatagaatcatgtagtatttagggtggaagctgccccaggtctagcacgtcatttaacagatgaggaaatggaagcttgggcagtggaagtatcttgccgaggtcacacagcaagtcagcagcacagcgtgtgtgactccgagcctgctccgctagcccacattgccctctgggggtgagtatgtcttcacatcctccaataccctaatgacagacaaacagaacatggcaaagcctcagctctgcatggtgaaagtaagaaccagcaattgccacaaacagaaatacagtgttggtccggcagcctccgggggttctgcacaagtggattaccagtgaatacaaggctatctatctttcgaaaaaccaaagttgtatttatgctatctattttctataaaattttatattaatttatttgttacctatttttgaactctttcaaaagcacactttatatttccctgcttaaacagtcccccgagggtgggtgcccaaaaggctctacacttgttatcattccctctccaccacaggcatattgagtaagtttgtatttgggtttttttaaaacctccactctacagttaagaaaactaaggcacagagcttcaataatttggtcagagccaagtagcagtaatgaagctggaggttaaacccagcagcatgactgcagttcttaatcaatgccttttgaattgcacatatgggatgaactagaacattttctcgatgattcgctgtccttgttatgattatgttactgagctctgttgtagcacagacatatgtccctatatggggcgggggtgggggtgtcttgatcgctgggctatttctatactgttctggcttttcccaagcagtcatttctttctattctccaagcaccagcaattagctttaccttttcagcttctagtttgctgaaactaatctgctatagacagagactccggtgaaccaattttattaggatttgatcaaataaactctctctgacaaaggactgctgaaagagtaactaagagtttgatgtttactgagtgcatagtatgtgctagatgctggccgtggatgcctcatagaatcctcccaacaactcatgaaatgactactgtcattcagcccaatacccagacgagaaagctgagggtaagacaggtttcaagcttggcagtctgactacagaggccactggcttagcccctgggttagtctgcctctgtaggattgggggcacgtaattttgctgtttggggtctcatttgccttcttagagatcacaagccaaagctttttattctagagccaaggtcacggaagcccagagggcatcttgtggctcgggagtagctctctgctgtcttctcagctctgctgacaatacttgagattttcagatgtcaccaaccgccaagagagcttgatatgactgtatatagtatagtcataaagaacctgaacttgaccatatacttatgtcatgtggaaaatttctcatagcttcagatagattatatctggagtgaagaatcctgccacctatgtatctggcatagtgtgagtcctcataaatgcttactggtttgaagggcaacaaaatagtgaacagagtgaaaatccccactaagatcctgggtccagaaaaagatgggaaacctgtttagctcacccgtgagcccatagttaaaactctttagaca

SEQ ID NO: 29433 - DNA, 2300 bp, Homo sapien
catggcaaagcctcagctctgcatggtgaaagtaagaaccagcaattgccacaaacagaaatacagtgttggtccggcagcctccgggggttctgcacaagtggattaccagtgaatacaaggctatctatctttcgaaaaaccaaagttgtatttatgctatctattttctataaaattttatattaatttatttgttacctatttttgaactctttcaaaagcacactttatatttccctgcttaaacagtcccccgagggtgggtgcccaaaaggctctacacttgttatcattccctctccaccacaggcatattgagtaagtttgtatttgggtttttttaaaacctccactctacagttaagaaaactaaggcacagagcttcaataatttggtcagagccaagtagcagtaatgaagctggaggttaaacccagcagcatgactgcagttcttaatcaatgccttttgaattgcacatatgggatgaactagaacattttctcgatgattcgctgtccttgttatgattatgttactgagctctgttgtagcacagacatatgtccctatatggggcgggggtgggggtgtcttgatcgctgggctatttctatactgttctggcttttcccaagcagtcatttctttctattctccaagcaccagcaattagctttaccttttcagcttctagtttgctgaaactaatctgctatagacagagactccggtgaaccaattttattaggatttgatcaaataaactctctctgacaaaggactgctgaaagagtaactaagagtttgatgtttactgagtgcatagtatgtgctagatgctggccgtggatgcctcatagaatcctcccaacaactcatgaaatgactactgtcattcagcccaatacccagacgagaaagctgagggtaagacaggtttcaagcttggcagtctgactacagaggccactggcttagcccctgggttagtctgcctctgtaggattgggggcacgtaattttgctgtttggggtctcatttgccttcttagagatcacaagccaaagctttttattctagagccaaggtcacggaagcccagagggcatcttgtggctcgggagtagctctctgctgtcttctcagctctgctgacaatacttgagattttcagatgtcaccaaccgccaagagagcttgatatgactgtatatagtatagtcataaagaacctgaacttgaccatatacttatgtcatgtggaaaatttctcatagcttcagatagattatatctggagtgaagaatcctgccacctatgtatctggcatagtgtgagtcctcataaatgcttactggtttgaagggcaacaaaatagtgaacagagtgaaaatccccactaagatcctgggtccagaaaaagatgggaaacctgtttagctcacccgtgagcccatagttaaaactctttagacaacaggttgtttccgtttacagagaacaataatattgggtggtgagcatctgtgtgggggttggggtgggataggggatacggggagagtggagaaaaaggggacacagggttaatgtgaagtccaggatccccctctacatttaaagttggtttaagttggctttaattaatagcaactcttaagataatcagaattttcttaaccttttagccttactgttgaaaagccctgtgatcttgtacaaatcatttgcttcttggatagtaatttcttttactaaaatgtgggcttttgactagatgaatgtaaatgttcttctagctctgatatcctttattctttatattttctaacagattctgtgtagtgggatgagcagagaacaaaaacaaaataatccagtgagaaaagcccgtaaataaaccttcagaccagagatctattctctagcttattttaagctcaacttaaaaagaagaactgttctctgattcttttcgccttcaatacacttaatgatttaactccaccctccttcaaaagaaacagcatttcctacttttatactgtctatatgattgatttgcacagctcatctggccagaagagctgagacatccgttcccctacaagaaactctccccggtaagtaacctctcagctgcttggcctgttagttagcttctgagatgagtaaaagactttacaggaaacccatagaagacatttggcaaacaccaagtgctcatacaattatcttaaaatataatctttaagataaggaaagggtcacagtttggaatgagtttcaga

SEQ ID NO: 29434 - DNA, 2300 bp, Homo sapien
agaactttcctttcgcctcaactgcagccttctaaactcttccttccttcctatgtagaagtttcaaggacctcatggcctgagtgtggataggcagaatgctgggaatcaggcaaaaataaaataatactgaaagtgaaggtcatgctaatattagtaagccagggtgatcctgaatttacaaaacatttttctttgggaaatttcacacctcacatgattctgtgtttttacttgggaaatttcacatctcacatgactctgtgacatgcggtacatgaggtgcctgactgctgtttttgtcctctactaatgaggaagagtgtgcgtactcccagcgttttgcaagtttcaaagtctgacttgactttccttccttttcctggaactgatccatgagtatcgagagtaaagctgcccgcacctactcattcaagatcctgagtgtcctgcccagctgcaggaggtggagagacccaggaggaggggccactgctgatcccaggctgtagggggtgggaagagtgtcccagggcaccatgacccccactcactcactcacaggagacccacacaagagaggagagggcacttacagcttaggttcccaccagcaccaactcctctgccatcaaacatcattgtgtttctctttctgccttgtctgtcggcacacgtggagttaaatttaatgctcaatcacatatttgtctgggctctttctgtgtttatttttctcttaatagttctctctcctcccttcctctccccgcccctcctcctccttcttcttttttttttccagagacagtgtctcgctctgccacccaggccagagtgcagagtggcatgatcatggctcaccgcagcctccaactcctgggctcacgtgaacatcccaccttggcctctggaatgtctgggattacaggcacttgccactgcatctggctaatttttatattgtttatagatccgggatctcactatgttgcccaggctggcctcaaactcctgggctcaagcgaccctcccacctcatacttctgagtagctggggctgtaggaatgcgcctcagtgccaggctagtttcttaattttctatttctattttgacaggtacaaattttgtattcaatcctacctcagacacatctttggtgggaaaaggatgtcatttaatcaatatataaattctaagcaaataggtctgatccccaaattaggttagtcacagctgctgagtcgttgacccaagagaagctcatctagattttttcattattttcaagttcctcttctcggttcgtccttcttccagaccgtgccctccccgtcccactctcttcccacagcctcccctccccacagcctcctcccaccattccaaatctgggctgttctctcaatttccttctctctggactcaaacctaccctagcccccagcctcagtttggggttaaacttgtcctcctcacattctctcccacccaacttgatgtcgcctctgtgtcatcaccacgggattttcctcctctgggttctccttttccgagtggggtcagctcccccatgagtcacagcaccaatcacttctggctgcttgcaaacccctttgctttcctcagtgttgacacccagggcagccctatgctcactgccgctgagaccccacctctgcccctggccttttcccagctgacatcaccctgtggcttccattttcctaaaattctcttttgaggcctcagtcttaaccaaagcacacagtgcccctcaaaaatgacaataaaaacccaaacacaccgtgactgtcatggcaggttcctggtccccgtattgaatcagcgggtgggtttctgcgaacactggtgagaggccgcattagagggtcaggaccctcaggtctggactcgtggtcaccacataccttcctccctgctgacagtagctggtacctgttacctactcagagtgtcacatgccacaagccagagcgtcttggcagttctcagcaccttgacatcacttccttgctaccactcagagcggcagtgacacagttcccttatctcagaaggccagaagacggctgtcaaaggtcacagggaaatcaaaggcggggtacagggccagagggaggaggaaacaacttcccggttgctttcagacgcttcagagatcctctggaggcctgggggagcttttgagtactttatttcagttggtccctgagctcggtgagtggggcgggtagagccaccaggggaatcaacagtggtttctcgtgcccctca

SEQ ID NO: 29435 - DNA, 2300 bp, Homo sapien
gatcctgagtgtcctgcccagctgcaggaggtggagagacccaggaggaggggccactgctgatcccaggctgtagggggtgggaagagtgtcccagggcaccatgacccccactcactcactcacaggagacccacacaagagaggagagggcacttacagcttaggttcccaccagcaccaactcctctgccatcaaacatcattgtgtttctctttctgccttgtctgtcggcacacgtggagttaaatttaatgctcaatcacatatttgtctgggctctttctgtgtttatttttctcttaatagttctctctcctcccttcctctccccgcccctcctcctccttcttcttttttttttccagagacagtgtctcgctctgccacccaggccagagtgcagagtggcatgatcatggctcaccgcagcctccaactcctgggctcacgtgaacatcccaccttggcctctggaatgtctgggattacaggcacttgccactgcatctggctaatttttatattgtttatagatccgggatctcactatgttgcccaggctggcctcaaactcctgggctcaagcgaccctcccacctcatacttctgagtagctggggctgtaggaatgcgcctcagtgccaggctagtttcttaattttctatttctattttgacaggtacaaattttgtattcaatcctacctcagacacatctttggtgggaaaaggatgtcatttaatcaatatataaattctaagcaaataggtctgatccccaaattaggttagtcacagctgctgagtcgttgacccaagagaagctcatctagattttttcattattttcaagttcctcttctcggttcgtccttcttccagaccgtgccctccccgtcccactctcttcccacagcctcccctccccacagcctcctcccaccattccaaatctgggctgttctctcaatttccttctctctggactcaaacctaccctagcccccagcctcagtttggggttaaacttgtcctcctcacattctctcccacccaacttgatgtcgcctctgtgtcatcaccacgggattttcctcctctgggttctccttttccgagtggggtcagctcccccatgagtcacagcaccaatcacttctggctgcttgcaaacccctttgctttcctcagtgttgacacccagggcagccctatgctcactgccgctgagaccccacctctgcccctggccttttcccagctgacatcaccctgtggcttccattttcctaaaattctcttttgaggcctcagtcttaaccaaagcacacagtgcccctcaaaaatgacaataaaaacccaaacacaccgtgactgtcatggcaggttcctggtccccgtattgaatcagcgggtgggtttctgcgaacactggtgagaggccgcattagagggtcaggaccctcaggtctggactcgtggtcaccacataccttcctccctgctgacagtagctggtacctgttacctactcagagtgtcacatgccacaagccagagcgtcttggcagttctcagcaccttgacatcacttccttgctaccactcagagcggcagtgacacagttcccttatctcagaaggccagaagacggctgtcaaaggtcacagggaaatcaaaggcggggtacagggccagagggaggaggaaacaacttcccggttgctttcagacgcttcagagatcctctggaggcctgggggagcttttgagtactttatttcagttggtccctgagctcggtgagtggggcgggtagagccaccaggggaatcaacagtggtttctcgtgcccctcagggtcaggagcagtctgatcaaaaggagggcatccactgtccggggccattcccacagctcccggatgctgggtctggaggctgcgcccttcccctgcaggagctcagcccagtggtaagtcatctgtgtgtcatctatgtatttaaccccttatggccatgttgatgctgagcatggtttcacttttgcaaacatttatttatacccttcgagagaaaaacgtctcagctgtcacaggaagctgcttcggggggtgagcaaactttttaaaatgcagaaattatgatctacacccgtttcttaaaagtaagccatcgtacttggttctctttaattatatattttcttacatattgtgttcatgtaggcaagtcctgtttctgctaaaagaaggtaagttctaccaaggcggtgtcatgccagctttatttcccg

SEQ ID NO: 29436 - DNA, 2300 bp, Homo sapien
tggcatctaccagttctggcatgaatgaatgaatgaatgaatgaatgaatgctgttaatagatcagtgaaacttcattgttttttggggcagactcatcccctacatcagcctcctctgcaaatggccttgaggggctgctctgcctgtgtccagatgctcacatccctgccctggggctgggctgttccaacaggcacagcaggaaaacagtctgccctgttgcctacccatgctgccttcagggcactccttaagctgagcctcttggtagtggccccaggttctctgtgttcttgccaacactgtaacatacttaagagggcccagggccctctgacctcccagtcatccttttttaaaatttggactcagaaaaagagacacgggttatgatgtttcttaattcttttataatgatgaaaaggcaaagtcttgttgccaatttaggtacaaagatgcttcagcactcctgggaattagtcaattttgtatttcttcagtatttttgaaagaacttattgcaattattgatgatggcaactttaaatggtgcaatatcatgtttccaaacaatgagagaccttggatctgtcaccccaaaacccagctggtgattctagcaccaaatctcagaccccagtctcatggcaggcaagcatgatccctgattagcctccaccctgtgccttggcaggatcatgcccagaaatggaggggctccccagcctccttaatggcctctccaccttgggctgagcctgcttctccatggctaggtgcccactgcatgctcactcttggcagagctggctccctggggcattgcctatctgctccaggaaatgctttttagtaccaagtagtctaagcagagtcaagaccagcttttcagaataagcagatttcagagtcacatattggtcagactcacctgccaagaaaggtgttcaggtgacctattatttccctcactgttagtaccttttttcttcacttagttaccctttttttttttggtgggggttacagagtcttactctattgcccaggctgcagtgcagtgacatgatcatggctcactgccaccttcatctcccaggctcaaatggtcctcccactttagcctcccaagtagctgggaccataggcatacaccaccatgctgggctaatttttgtattttttgtagagatgggggtttccctatgttgcccaggctagtcttgaactcctgggctcaagcgatcctcccatcttggcctcccaaagtgctgggattacaggcatgagccactgtgccctgcctagttactcttgggctaagttcacatccatacacacaggatattctttctgaggcccccaatgtgtcccacaggcaccatgctgtatgtgacactcccctagagatggatgtttagtttgcttccaactgattaatggcatgcagtggtgcctggaaacatttgtacctggggtgctgtgtgtcatgggaatgtatttacgagatgtattcttagaagcagtattctagcttttgaattttaaaatctgacatttatggcgattgttaaaatgaggttaccatttcctactgaatactatcaacaccaaaaaagaagaaggaggagatggagaaaaaaaagacaaaaaaaaaaaaaagtggtagggcatcttagccatagggcatctttctcattggcaaataagaacatggaaccagccttgggtggtggccattcccctctgaggtccctgtctgttttctgggagctgtattgtgggtctcagcagggcagggagataccccatgggcagcttgcctgagactctgggcagcctctcttttctctgtcagctgtccctaggctgctgctgggggtggtcgggtcatcttttcaactctcagctcactgctgagccaaggtgaaagcaaatccacctgccctaactggctcctaggcaccttcaaggtcatctgctgaagaagatagcagtctcacaggtcaaggcgatcttcaagtaaagaccctctgctctgtgtcctgccctctagaaggcactgagaccagagctgggacagggctcagggggctgcgactcctaggggcttgcagactagtgggagagaaagaacatcgcagcagccaggcagaaccaggacaggtgaggtgcaggctggctttcctctcgcagcgcggtgtggagtcctgtcctgcctcagggcttttcggagcctggatcctcaaggaacaagtagacctggccgcggggagtggggagggaaggggtgtctat

SEQ ID NO: 29437 - DNA, 2300 bp, Homo sapien
ctctgtagtgtgcttccccccaacctgtaaccccagtctaatcgtgagaaaaacatgagacagacttagactgggggacattctacaggatgcctgaccagtactcctcaaaactgttgaggtcattaaaattaaggaaaaactcaaaaactgtcacagcagatcagaggaggctgggacaaatgacaagtaaatgcaatgtggtatcctggatgggattctggaacaaaaaagaggacattaatagaaaagttgatggaatccaaataaggtctggcatttagttaatagtaacatatcaatgtcagcttcttagttttgacaaatataccatagtaacgtaagatggtaacaatgggggaaactggatgagaggtggatgggaaatctctgaacggtctttgtaactttactgtaaaactataccaaaataaaaagtttattttaaaacatggatgtattgggcaggtaagttctcctttgtgagacccagttttcttacttgtgaaatgaggcaaatagtcttctccgggtcctgccaggccatgatgaagaaatgtctttgtggtcaacagatgcactgtgcatgttgaggtacgggggctggatagtgaggccaaacttgcgcctttacaaggtatcttggtccacctatgtggctgagctggacttcttttggccccacagctttctttacccctctctgtggagagtggcagttctggtgtctatcgtaccaaagtcttcccagctgcaattcattctactgcttttgttccctcctctgggaatatatgagttccctaatgcagcctggagatcacctcatcttcatggatggaatataggcttctgagaaacaaactcccccattcaaacccaaagaatggactcagagaccccgagaatagcgaaagtgagacttttaatgatggtcttgcaagattgggtgtgtggcatgcaggcacacccagcaaagtttcaacaagcaatttataccctagtgcgcaggtgcctcccccggttcccaataggctgagtactatggggttacaatcttcctggatgttgcctattgattgttagtcaggggcttcaggtgttttgtttgtttgtctgtttgtttttagggttgttttggtgcattttgttgcagcccacaatgcattgcaatcctggttagcttaggggctctttaagtatttgacttatgacctaagtagctgggcaggctgataagaacagacaaagcaagctattttgcagactattaaacttttaccttagactaaacttcgttggttcaggtgagggcaaccaagtgtggcggaagggggaggaaaggggaggccaacaagcaggccttggctatccaagcaggagcctagtacattctgtttcttctgcagtttgctgacctaagccgattcaaggcactttgtcttggaaatggaccactgtatacattatttccttcagacctgtctgggccttggtctccaaaaccagaaaatggcagcaacaatgaatgcgccacaaactgctgcatatggaggtgaaccctgaccccaaggctttgaagactttacaggggtgaatgtcaacatttgctggaagcaataaagctaatcaatgtgaatggatgctttaagagtgagtgactgggcacaggcaagggttagggttgagggcctcctggggctggggcacctcctgaagtctcttcctcagaggagagcctgcaattctccctaggagccatgttggggcctctgcccctgcccccagccttagcctgtgagttcagcattcctgtgactgcactaagcaagcagatggtcctcaattccaccagcagctgtcaccgaactgtgggtggacacctgccatacagggcttcctctttcccatgcagaaactgctggcactcccagagggagggaaggtgggagctcttctgaggggccaggaagttctggaaaacttcccctcagccgagctccccaccttccctccctctgggagtgccagcagtacctgcattcccgcccattctggctctccagcagggagctccgcctcacttcccagtggacggtgacgtggccttcacagctggcctgagtgagcacagcgggcactgaggggaacaaagcgtgggggccctccagcagcccttatcatcacctgccagccacctgcctcaggctgggcaggctgcaccctgggctttctgctattggcttcccagatccctggaactccagctggggccctgggctgtggtctgacttgatcca

SEQ ID NO: 29438 - DNA, 2300 bp, Homo sapien
gaaaccagctttgtctgtaatagtactagacaactagaggcagtccctatgccctggagcactcagaattatttaaatgagccaatccacagggagcccatgaaacctagctagccccacgcaactccccaacttcctacccataaactgtccctcacagctccagctggctgttgctctgcccccaggcaccctctgtgggcctgcctggcagccttgccttgtttggaggtataactaacaaatagttctgccttttatctatcttcgtgtcattgtggtgtgtcccgccatcaaaagaaactttaaatttcatgaaactgacctcatctctagatctttcacttaattacatctgcagaaaccctttttccaaatgtggtcacattcaaaggtggacatctctttcgggatgtagcaatgacttaagccttgtatacagatgaagtcagcaaaaggaatgccaaagtcaagggagtctgctctctgtcatgcgatgctataccagagtcaggttggaaagtagctccattataccaggttaataaaactccctttaatgagatattatggtttgtagggcataacttttaccatgcatagccttaggtcttgtttataaattggttatctgattgcaacaagcagtctattttgtcagtcttatgatctctgttttaaccttgatgctggtgagttgtccctaaagtcaaagggagggagtatgataaggtgtttccaacctcccctcctgtcatagctgggaatttagtttttcaggtttctcaggggtccccttggccaaaagctagtccattcagttggtttgggggcttaggaacttatttttagttagcagtttaaaatcaataaagtgtaacaactatttacatagcatttacattgtattaggtattataagtaatctagagatcaattaaagtatacagaaggatgtgcatagattatatgcaaatactatgtcattttgtataagggacctgagcatctgaggattttgctatctgcagggggcgctggaaccaatccacctggaactgagggacagctctaatgctgagaaacaaaactggcttggaaagaggggagacccaggacttgagcctgccgaggagctaaacccaagggcaagagctgcaggcagctgggctggagaggaggaaggaggtggctttgtttccaactgccctggaagacctcctcatccccctgcatccccagcctcctttcctttttccttcctgctctgctcccttccttcctctcctcctcttgggaggtggccagggacataggtcagtgcctggccccgaggaagacacatgcagtttgtggacgggtcttgggatgcggacacccagagtcttgtgcaccttcctggagtgttgcccactccagtacccactccctaatctcccctcttcctcctcaatcctctcttgcaggaagcagaggatggagaaccccctcaggaaggagggcagtgactctgggtttgcctagggctaatggcctctcaccgacctgtgcccttgtacctgtcgcctgggcaaacagtgattgcatcagctttggtttctcatgggtgggcagccttggctgtctgccggaacgtaaagagcatggagcaaggacatgggaatccgaatcccgctgaggtcccaggaccacttcatccttcttccctgtgcctctcctccccagcatgagcacagcagcctgatggagaaggattttccaatgttagaactggaaagaacacctgtagcctgtctccaccgtttacagtggtgctggaagtgaaaagatgtgttccaggtcacaggcaggtagacagcggagccagactgaaattcactcctcctgatttggagtttagagctcttctttggcaacattttgatgaataaaatcacaagttctgtgtcttttgaaattccttgtggagcctagtgccatcctctgaacttggagccaactgacctttgtccttggggcagagacatggttcatgggcccaatccaggtcctcaaagggagggcaggtctgagtccttgccctctgaagtcagaaacctcatctcccactacagacctgccagggcccaggagagctcgacccacccaggcacaccatagccccagagatggctggggacacagaagtgtggaagcaaatgtttcaggagttaatgcgggaggtgaagccatggcacaggtggaccctgagaccagacaagggccttcttcccaacgtcctgaagccaggctggatgcaa

SEQ ID NO: 29439 - DNA, 2300 bp, Homo sapien
ttttatccagtgctttttcagcatcagttaaaatgatcatatgatttttatcctttattctgttaatctgatgtattgtgtcaattgatttgtgtatgttgaactatccttgtatcccaggcataaattccacttggtcatggtgaatgatctttctaatgtagtgctgaattcggcttgccagtatttttgttgaagatttttgcatcaatattcatcagagatgaattttgacctgtagttttctttttttttgatgtgtctttctctggttttggtatcagggtaatactggcctataaaatgagtttgcaagtatcccttcctcctctattttctggaatagtttgggtaggattggtattagctcttctttaaatgtttggtagaattcagcagtgaagccatcaggttctgggcatttttttactgggagactttttattacagccttgatcttgttacttgttattggtctgttcaggttttgaatttcttcctgattcaatctttgtaggttgtatgtacctagaagtttgttcatttcttctagactttccaatttattggcatacagttgctcaatgagtggatttttaaaagtaaaagaaggagacagagagggattgatataaagttatttgttatgaattttcattggtttacagaaataacattgataagtgattggctatatatcctttagctatagggtgtggttatagtgtctggcgtgttgctattaggctaatttacagctacttgtgacaatagcaagtaatttcaagagatgaagacatatagctcaaagaggggagtagggcatgagtgcagtttcattttaatgtctccttgggcctgataatgaaaaaaacttgcatttctcagataaaagtccttttttttttgagacagaatttcgctcttgttgctcaggctggagtgcaatggtgcgatctcggctcactgcaacctcggcctcccgggttcaagcaattctcctgcctcagcctccccagtagctgggattgcaggcgcctgccactacgcccagctaattttatatttttagtagagacggggtttctccctgttggccaggctggtctcaaactcccgacctcaggtgatccacctgcctcggcctcccaaagtgctgggattacaggcgtgagccaccgtgccccaccaaaaagcattattttcaaaaggccaggcacggtggctcatgcctgtaattccagcactttgggaggccgaggtgggcgggtcacctgaggtcaggaattctagaccagcctggccaacatggtgaaaccccatctctacaaaaatacaaaaattagccgcgcgtggtggcaggcgcctgtaatcccagctactggggaggctgaggcaggaggatcgcttgaacccgggaggcgcaggttgcagtgagccgagatcacaccactgcactccagcgtgggcgacagtgagactcctctcaaaaaaaaaaaaaaaaaaagaaaagaaaagaaaataatgatttttaaggaaatgaattttagaagtatgacacatatatcacacaaaaggtatttttcagtttaggctaagggatatgaggagccattgccattaaggatcaggacgtgttcacatggactcctgggagcagccagggagttgattactgattattaacttgtcatattttcacgatgtcggctatcagcaaaacatatttggccaattagtaaagtatctaaagagaacctaaactcacatacattttaggatattaaaaagataaaatgtaacggtgaaattgagaccttcgatgtctgctgcttccaacatcgaaaacacttttacattcccttggtcatatggctttcaaagcctgcgtctggctgggttcccagcttagcgtgctgagcactcggaaccagctcccttccattccacaccctccgggatctccagtgtgaaaatgtctggccctgggtaggaggctgcagatagtccctgggccggggctcgcgctggccggctgcagcgcgcagggtgccaagccctcccctacgaagtctgttttgtctcaggctgggctgagtcacatagaatagatagatagttgatttagcacatgtcctccagatcatattatccgcctacaaatatagcctgttagcgcacaggcacgggaggcttcttccggctcggccgtgctgctcagcgggtgtaaacagcctctgcggtgtaaacagcctctgcggtgtaaacagccgcggcgggcaggccaggactgtcagtgc

SEQ ID NO: 29440 - DNA, 2300 bp, Homo sapien
tgcagtgatttccaggggtcctatttaagctctaaaaattccacaagagctttagataaggaaatagcaacgcaggggtgtgttcttttgccagttctgccacaggcctgcccagtctctaaagacaagacatccaaatcccccaatagaactagttgtcttgtccataaagtgagactaatattgtgggcgctacttatctacttagcaccttggactggtgaggactgtggtgcacaagctaccttacaaatgtaccacactgagtaacatctttaaacctccttgcagctccagggctagccttctcctttgcggagccctcccccacctccggcctcctagagcttcaggccatgttcccctgtcccctgtgaatctcagcatgctacctgaagcatttcacctgaaaaggccacacagggaggaggcgaagcgcagcaggaatgaaatagtcaactgctgtggagttggaaatgttgctgcatcccaccattgactggatggggcctcactcccccaatacaaattattttacgtttgcttctcccaagatcatgtgtaaggccgggcgcggtagctcatgcctgtaatcccagcactttgggaggccgaggcgggtggatcatgaggtcaggaatttgagaccagactgaccaacatggtgaaaccctgtctctactgaaaatacaaaaattagccgggcgttgtggcgggcgcctgtaatcccagctactcaggaggttgaggcaggagaatgaggcaggagaatcacttgaacccaggaggtggaggttgcagtgagccaagatcgtgccattgcactccagcccgggtaacagagggagactctgtcgcaaaaaaaaaaaaaaaaaaaaaaaaaaaatcatgtgtagaagtaaataacacctcttcccagcacctgtggatccatggcattcacacaggtaggcactgacgctgaaatggcctcagatgctaccaattctttctgccgaggcctaaatccaataaacagagatggatggaaacaactatctaataaaagtttcgcatttgtgtgcctggcaacattaagtaaccgtcaggctttcctttagaaattggaattaaatgcgatttagaaactattaacgactttgggcgtatttaataacacatgaaataacccggaggattgaaatgttaggtgaggcgactccggctcatagacgcgcctctccatctggggcgtctggcacttagtggaaccactcaataaacacgtttacccctgcaagcggcacatcagagtccgggggtaattctcggtgtcgtggggccaggacggcgaggggctggaagaggccgccctgtgggagctgggaggctgagataaattcccgtgattgggggctgaaatggcctcccatgccggactgccgtggttctagaactttttcctggaacaggccggcactcccactggagagtcccagctgctgcgcctctggccgcccctcccctctcccgggcacctggcgccggctcccgcgtcctttcaggaattcacgtccgcctggaatttgcacttcaagtctggagcccccaaggaacccctcctgaccctgaacttctatctcagtttcaagcttcctagtcttccccacacacacacacctagctcctcaggcggagagcacccctttcttggccacccgggtatcccccagggggagtacggggctcaaaacacccttctggaaaaacaaaggtggaagcaaatttcaggaagtaaaacttcctgaaataaaataaaatatcgaatgccttgagacccatacattttcaggttttcctaattaaagcaattactttccaccacccctccaacctggaatcaccaacttgattagagaaactgatttttcttttttctttttttttcccaaaagagtacctctgatcattttagcctgcaactaatgatagagatattagggctagttaaccacagttttacaagactcctcttcccgcgtgtgggccattgtcatgctggtgggcgtcccgcccacctgaaaggtctccccgccccgactggggtttgttgttgaagaaggagaatccccggaaaggctgagtctccagctcaaggtcaaaacgtccaaggccgaaagccctccagtttcccctggacgccttgctcctgcttctgctacgaccttctggggaaaacgaatttctcattttcttcttaaattgccattttcgctttaggagatgaatgttttcctttggctgttttggcaatgactctg

SEQ ID NO: 29441 - DNA, 2300 bp, Homo sapien
tttctatagatgatggaaacttgcccttccatttagcctttttacttgcttctctaccaccacctaatcaccaatcaagtaacccattttgtttttcaacctctctcttctatttgcttcctctttcctacccagtctccctgcacacacgcagatggacttccattccttcagcactctggttcctccccttaaagatgttttctttccttttaaagagactattttaattgattttgatcaactctactcaaaactgtattctaaggtccacattagaattagtctccaataatctgaacatataattcaatcatttaaaagaacatattaagaagaccttggtagaattacatgtatcaagaaacaccaggccttgcacagttgctcacgtgtgtaatctcagcacttcgagaggctgaggcgagtggatcacaaggtcaggagttcgagaccagactggccaatatggtgaaacccccatctctactaaaaatacaaaaaaattagctgggcatggtgacacatgcctgtaatcccagttacttgggaggctgaggcaggagaatggcttgaaccccggatgcggaggttgcagtgaaccaagatcgcgtcattgcagtccagcctgggtgacagagtgagactccgtctcaaaaaaaaaaaaaaaaagaaacactggacttaggcacaatggagatatggctgactttcttttgaaaaaagaagtagttttttgggagagggcagggcaaagaagtaagaagtagttctgtaaggaaatgttagagaccattttggaaatgtattcattattttaaggcaactacaaatgatcatctttcagttaggacattgtagcagcagcctttactggtcatgaaatttgcatgatatctaaaattgtatttctggaaataggtcaatgtcgattaatagtagctttgtatagaaaggcagatgccaactagcataaaagtggtagtacgtgcagacggtggtagttctggagtcctggaagccacgaggtgctcatccatcacaaggccatctggaaggtagggatgcttggtcattaaagcaaacctctctggcagttcatcctgctgcccacaaatgtggcatatctatacgctactgtgaacctgctcttctcaggacactcacacctggaacctagcccagtggtgatgccttcacttgcaggaatgagcacaacctggttagattctgattgggccccatgttccaggaagagaacatgttccctacacatccaatcacccaacccacacttatcaaacacctatcctgagcctgacacccaggatgcaaatggcaaagacacaatccctgtctggattggggaattccttcctgttctcagtgaaatgtttgctttcatttacttcctggacttgaatattttccatttctaacatctccaaggcccagaactataataggtctctgaatttggggggccctagaaacctggctcaggctagggtggagagaggactgtcgcctcttttcctctccaggtgctgcccttcttttcattgtattcctcaaatcagtaaaaatcaagaaggtgaaagggttctgtgaccagtcatggtaagggttctgtgaccagtcatggtaaggtatggggagggggttaccagggacttttaggactctggaagtttctaaaggactagcaaggggccaagcctctgatagaatttgtcgtcagggtgggctctaaatgagctgcccatcctggtttgggtccccctacccaaaggaaaggaacaccagagaacatctcttggtttaacaagagaccgagacttgtttattttcctcaatagaagttcagaccataaaatgtcaaatagacttgaaatacatctctatctgaaaggcagcaggactagccaggttcccgaggaaataaatatcaaagaggccaaggcaactatctcatcaggagtctgcgatgcttttataagcagaactttggctgccaggctctagcaagacaagaggtacaaggagagcctgctaactaagcaccccccaaggcaactacgtaacttcaaagggcaaaagaaagaggagaacctccgcttaccacagccgggtagaaatgcctgaggaaagcagcggagctgaccgtgccagcatttacacagggaacacttcttgggcagccaggtgtcatggggcacagacccacagttcctgagaatgaacaggtaaggcgatagccttgggtctgaaatttccacttccctttctctctcctctcc

SEQ ID NO: 29442 - DNA, 2300 bp, Homo sapien
gtgagatgccaataccccaaagaaatgaacaccctcaaggaatgttcaagtagagatgctcgaccacagtgggcttctcgggagactagcactgaggaggctgtaccttagcttcggcctttgtaattctaaagcagagctgcttaaactgcacaggagtcatgcacaggagtcatctggggatgagatgaaaatgcagggtttgattcctatctgggccttgataaattctgcacttgtaccaactccgtggtgatgccagtgctgctggttcacgggacaatcgggtggcagggctcactggggtcttagtgacagtatataatctttgagacttttccatgcctgaatcttatcaaatcagcagagtcaaaatgcattttaccaaaagcattttctgttctgtttttaaagtttttatttttaaattaacacacagtaaaaaatgattcttttgtgtgtactcagttctatgaattttaacatacatacagcttcacgtaaccaccgccatgaagaatgcagaacaattccatcaggttctccacagttccttcatgctttgcctctgcagtcataccctccccaacctctaatcccaggcagtcatgatagttttgtcttttcaagaataccatataaatgaggtcacagaaaacatataccaaccagcccgggcaacatggcaagaccccgtctctacaaaaaataccaaaattacccaggtgtggtagtgcacacctgtagtcccagccactctggaggctgagatgggaggatcacctggagctggaggaggtcaaagctgcagttagccgtgatcgtgcccctgcactccagactgtgcagcagagtgagactctgtctcagtttaaaaaaaaaaaaggaaagaaaagaaaagtaagaaagaaaatatataccattttgagattgccttgttctaccgagcataatgcctttgagatccatccaagttattgcatgtgttgaagtttgttccctcttattgctgcacaatattccattgtatgaatgtctgacagatttttatccattcatccattgaagaactatcaggttgtttctttttggcaatcacgaatagagctgtgtacaggtgtgcaagtttttgcttgaatacaagtttacatttctctagtctaaatacctagaagtagaattgctgtgtcatatggtgagtatagtttaactttataagaaactacagccggttgggcgtagtggctcacgcttgtaatcccagcactttgggaggcctaggtgggtggatcacccgaaggtcaggagttcgagatcaacctggccaatatggtgaaaccccgtctctactaaaaatataaaaaattagccaggtgtggtggtgggtgcctgtaatcccagctacttgggaggctgaggcaggagaatcgcttgaacctgggaggtggatgttgcagtgagccgagattgcaccattgcactccagcctgggcaacaagagggaaacttcctctcaaaataaataaattaattaattaaataaaaaagaaaagaaactgctgccaaactgtttttcacaataatacctgtaccattctgcagtcctgccagcaatgtgtgagagttccaattccctttctccctggaaccagagggcttctcagagctctttctacccttgtccccacttctgggttgccttgagtctaaactggggataccacagtaaaaatagaaaatttagcactgttcaatggtaattggaattctggggtttttcctctaatctacctgctgctgtttacttttcagagtcctgaaacagctgcgccacacattctgtccaggctgcattctttggagggacaggttagggtatgcttcctccatcttacttggaactggaacccttctgttctatttcaagccccaatcataaagaaaaatgtaaaaggcggttaaacatacttttggatatgtgaaacataatcatgaaatacttgctctcaggaggtgttgaataggcaagaagtacatgagcagtgtgcacagtcagctggtgtgcattgaacctccctagccaagagccacaagcacgctcagtgtaagccaaaagcctcttttaaaaaagcaactctcagatttctcaatttgagtttaatactctgggtaactgagacttgggaaatcaaattgctggcacagcgttaaggcttgcgagggacaaatgttcctttgttcttgttgatttgctgaacgtgaattggctcctggggcagcacagatgcctcacaggcggt

SEQ ID NO: 29443 - DNA, 2300 bp, Homo sapien
gtttgtggattagaatgacccatgacctctgttctgtgaggaaccagggagggggcactgctacaatgcattgaatgcatctttgttctaaatgtatgatcccaatctcatctttcgcatgcagaaggtgagtagctccccgaggcaccctcctctccctgcacacagatggggaaaccgagggctggtagggatgagcctgaggttatacaggagttaggtgggcatgaaatttgtttcccccagtccctggagcaaaccttacaatttgcctttagattctagacctgaaagtgttcctgatcagagaggccttcctgtcactgccttgcaggaggcaagggaaatggggttagacattagggaggattccccgcccggagtcctagcacagcaaaccaggaggtggaactgaatcagcctggaatggctgctgagagctcagctgcaagttgctggtccatctggggccctggttttgctttcagtcaaatggggatccaactcctgccccacctgccatcttggttgtcaaagtcaaaggagggaatgaagttatgaattgaattgggcaaatgatgactgagaacaggcttggaaaaggttttctggggaggaggaggctggaggccaggacactgtttgttgtggaactaggagctctttgagacgagactccaagtagtaatcccagaccccaccttgctcatcccaacctgttccggtctccccatcagggacctccaggtgcatggattggtgctgcccctcatgctgcccagcttctactcagagctcttcacgctctacctgctgcttcatgagcgggaggacagcttctacagccagggcattgccaacttgagcctctttcctgatacccaactgctcgagttcctggatgtgcagaagtaagccttcccttcccccgtgccgtgttagccaggactcaaactcgactcagactgtcttcagccaaaaggtggggctggggttgataggttcatgtacccaccaagttctaagcttatgcattcaggtgtggctggatctaggtgttcaactgaatgacagagggaagcaccttccatttctgttggtctttctcagcctcccccttgtggtgacaaacaccataagcaccaaccgctcaaggttcataccctcccagctcctctcccagagtccccacaggagctggcattgccttccaacagctccctcagagcccctgaagtccctcactggctcggcttggggcttgggtcttgagcccacccctgagtgccagccgtgattgaccaggcctgcctgaatatccactgctgaggctggggcaagatcacctgctctgagcacttgggctgagagtaggggagaggaggtccctcaggggagactgaggactgctctgggtgcatgtcgggaggtgtttaccacaccccagggcctcccttccaccctcagtctccaaaatgtcctttctcttcagtgtcccatctatccattgatgccacaagtgaccccactgtccacagtagagggcacgggcactgtctctgctcccacatccaggtctcctttgttacacagggatggtgcttcccacccaccctgcaaatccctgtttcttcctctatcttggtgactgtgtcctgcatctgaccagccaccagcctaaagacctggctgccagtgcttcccaagcatgccccgcctccctcaccacctcagtgtcgcttccccacaccagcctccacctctgctgcatgagggctgcatccccctgctcacagccctgtgctggctcagcagagcctcctggatggagtgcagtctcctcacccctccctctctactggtcaccacgacctggctcatacaagcccctgggccgcccttacctccctggagcttctggagctctgccttctccaggaatccttccatcctccccatgacctaggctgatctccttccccttttcaggacccagatctgccgggggaaacagtggcatagggaatttgccctctgacctcagactctgccccttgtcgaggcagagcctcctgtctcactttttcaatttcaggcacttgtggcccctcaaggacctcacgctgacgagcaatcaggtgagagggaggccagagccccaagccaggggcccccagaggtcctgcaggctttgaggagccctttgcctcatgattgctgggcggaggctgcagaggagctggggaggggcagggtgggttgggaggagacactgtcattctgacctcccagtgtggtgg

SEQ ID NO: 29444 - DNA, 2300 bp, Homo sapien
ggcttcctgaagaagccgctggggtgaggagccagggcggagggtgtcatttggggaaatccagggatggggtcctcggggctggtgcttagcaggccaaaggctagagtcccaattaggtacagtcctgtggggcgtgatgaggctcagggcccctctcgccatgtgtcagggcacatctcccttctttggccatctctctccaccctgagtttcctggcccttcctcacccaccctttctaccctccctggcttcctctccccaagggcccgggcatcctcctctctgaagacgactccctgtatgagggcaccttcaccagggacctgaccctcatggggaaggtgaggaccactgaggcccccctccacaccctgccaaggccttggttggtgtctgtaatctccccacttagactcagggctgggggcaggtaggggagggcctgtcccacctcccttggagccaaggagtgggcacagcaactccaccctgccacagagttgcgattgattctggagtgaggtgagaggggaccagtggccttgcctgctatccagagggtaccggtggtctcctggctgtgtccctccataccctcctagttcagaatacacgccctccaccagtaccagtgcctcgagcagctgtccctggaggcactggccttcagtgtgtgcctccctgagctaacccaggaaaaggcaatgtgtccccgctggagcctttggaaatgtaggggctgttttggtttcataatgactggagcaaaggggtggagatcaggttgctatgaatgggacagcctcatgtggcaagacaccgccctcctcaggcgttgcctgtccctgggcttacccccaccccagcccctcagtggtggtctccccactcttgcctgtgagtcccttctgcatctctctcctcttcctacctcagaggtgagcgagcccctgagacgtgggcacagctgttggtggggggctctggcaggcatagaggattatgaacccctcagcatggagcagcttgaatggatggcgggaagcccattcattagtccttagcctctctgacactgatggacaggcttgtggcctgtcatgattggctggaagggtaactgggcagacagacatccctgctccttctcctggctcccagggcaaggtcaccttccccaatggcttcaccctggagggctcgttcggcagtggggcagggagaggactgcacacacagggtgtgctggacacggctgccctcccaccagacccgagcagtacctgcaagaggtgagtgcctggcccctctggctctgggcctatctggggatgtgtctgtgtttccatcccaaagactcaggtctcctcagaggggcctttttgcacccacctcttagccctctagagagttccgagagcccagggtgtacaactccagtcagagactcttgggatcaggggctgtgtggatataatgcggtacaccacaaaactggagagaaatattatttgtaggctttgcttaggtcctgctttttttttttttttgtctcgaaaggatacaatacggtttacaaaccaaacatacaggaaaaaaaaaatagaaaataagagcatatgttaaccttaaaagaaagggatatgtagacatgtcctacggcatttacaactgatcattgagcctggctctgagtttcctggcagccaaggtaaagaaggaaacttgctaagtggaatcacagtcattatcaaggagtattccagagaaggatagacttcttttcctgtaggaacagagttcctccttggaaaacagttgctcttgttgcgtctgttgaggaagactcagtattgcacagaggaaggaatctgtgtgggtggcagttctaatgggaagtggtcccaggcagcatttcagatgtagggagggagtacagttgactacttggcccgctgtccctgcatgctgcttctccctgacagcaggagctgggagtggacagcaatccctaggggcaggccccagcctgggtgtgagtgtgggctgcgtgtagcctacgagcatgacactggagtgcagggctccattagacatgcgcagccaggccccagcctgttggccagggcgggatcaaccacaggaaggaaccagctgtaagggagggcagagggggatgtcttggaggggaatcccagactttggacactggtctctcttggaccaagaccccctctctggcttggcctccagatctgcccacctttctgtctccgtctttccaggattccatat

SEQ ID NO: 29445 - DNA, 2300 bp, Homo sapien
tgtcaaaaagaacagggtatttttctttctaaagacagaattgggtcctgtgttgatccctgccctgaggtcttgtttggcccctctgggcaggccctgaaactgcagaggaggatctcaggttgggtggagggcccagagagtagcaagaagcagttgaagggtccccaaggtgacaaaatggagtaggaggtggagggtggagggggtggtacctggagctaccccagaaggcttcctggagggaaagcctccagcagcagtgatccccttccccatgttccccctcccaccaggcagtctggcagtggaaggtgacctgggctgttcaccaggccctgcatgggaagaaggacttccccgtgctgggggctggcctggagccctcccagcctcccgactgccgctgcgcagaatataccttccaggcagagggccggctctgccaggccacctacgagggcgagtggtgcaggggccggccccacggcaagtgagtggctggagctctgggtggcaaggtgggactccctgggggtctgcggggcagagagcagcacacaagcctaattgtctcaggacatgttccaggagcggttactctctgtggacagtcaattctcagagtccctcttaagtcctcttggactgggcctggcccagagacagtctgtgccaaataaagtcttgatggtgacgctagaggacaaggggcagcaaccacgcgctggccttacagcctgcaggtgccattccattcttaggagggtgggagaataattctcacatctgtacctcattgtctggcagtgttgaaatggcttgcacacattctatctccatcggtcctcatgaagacgctctgtatggagtgcttttacccatttcataggtacaaacactgaggcctagtgatgggcataacctgcccaaggtctcagggcaagtgatagggtgagccggcctcaatcacaggtctgtgtgaccccacagacaggcaagcctttatagaccatgtggccccaccccatgccacagctgggaaaacagacccagagagcagaagggactcacaaggctacactctcaagcacctccgctagtttctgataccctgcctcctttcagaaagggctcgagaagacttatgaacaaaaggacagaaaaaacacagaagtggggaggagggtggtagaaaccccacagaccagcattaaacttgagcttgattcttagctctgagcttcctgttggtcaagggaaaaaagggaacctagatgtctccagggctttccttatgggatgtggtgagtgtgccccatgaggctgctggtacagttgggccaggagtagaaaagggctaaaggggctttctgcaaggaatgttcggagctcagacaagagggctgggtgggtgcagggagcccagtccaagggaagaggaagggagggcgtctgagaaagtaggtggctgaggttgctgaggggtgggtaggcctgaggctcgtgaacctccactgtgttccaggggaaccctgaaatggccggatgggcggaatcacgtggggaatttctgccagggcctggagcatgggtaaggctggctggggctactgctgggaggcgtgcagtgggctgaagggtgctttcctcccctgctgtggtcaccagcccggccccatcctgaattcccaaacctcaagcaggaacttagagacaatccggtccagcccccgcccactgtaccaaaggggaaccgggggcctgaatagggggcccgtctcagctcgaggtcacagagggagtggtacaggccaaaaggtgctccaaggtgctcgggaccaggctggagggaggggtcctgagaggggccctttgaaggataggaaggctgagggcctctgagagtctccctgttgtctggaaggctccttgggggcagggatactcctgggtggcatggagtaggtgtaatgggcgtctcaggtcagggctgatccccacccccacaaccatgctgtcagcttcggcatccgcctgctgccccaggcctctgaggacaagttcgactgttacaagtgtcactggcgagaaggcagcatgtgtggctacggcatctgtgagtaagtgaccctggctggggggttcatgggctgggcccatcctctgggctgagctccatgaggcagagctcgttgttgatggccctccccaggtacagcaccgacgaggtgtacaagggctacttccaggagggcctgcggcacggatttggggtccttgagagtggtccgcaggcc

SEQ ID NO: 29446 - DNA, 2300 bp, Homo sapien
ggaagggaggcaggggtggccgagtactgggagaggactgataggggcatggctggggccgtggcacagaggtgtgggaggggacactgaagcttcaagagagccaggaatgtataatcagtgcatttctgcctatctctgacccagggtccgctccaggtctactggagggggcctctgggaggtgtctggggtacattgggaggtggcagagtggcaggcagcttgcaggacagaggtgcctaagccttgtactgtcctctttgccccaccaggatgtgctctgcacccctgctcacagactccttcaggacagccaggacgtacccgtgacggtcgcaccgttgcgggctgagcgtgtgctgctctttgatgatgccctcgtcctgctgcaggttggggtggggctgacccaaggtcttgaggccacagtagggttctggggtctggctggaaaaggagcagtaaaggggcatgctgctgggactgagaaagtgggctgggagggatggtcagggatagaaaggcgttgtgttggggaggggcggtccactggagctgtccccagaggagcatgggctgaggggaaaggctgtccagggtttgtcccggcttcagcccttcccagctggtgtccttggttacatgtcttcaccttcgttttcccatcgggaatgtgggggtcattgtgagtgagtttgttctacagtagacaccagacaactcttagttcccattgtactcaaatgagagaggaaccccagacagaaagtcatgggtgactgaggggtgactaaggagggctggatgagaaggcttctagagaaaagtaccctacaggagcagtgcctgggctttcagcattgtggaagtcagaagggagccaggcctgaggctgggaattgttacatggccagtcaccaactgtggttcatccatcctgaaatcatgttgtcctggtgaggtccacagcacagtcttctctaccccttagaaggttggcctggaacccccttgcagacaggtggccggggcctggcaggaagctgctgcccagcctagacctgtgtcccctgaagcctgattttgggattggttctgatttagtttgaattcccctccactcccaacttcacactccactccaggtacactgatgagctactgtcccttccctgtgctagccctctcctgacgctggacctttgcacatgctgttgtgtctggtgggccatctcttgtccctggcctgcggctggcaagctcctcctcacccctcaggcctgggcctcccacgtcctccccattctggtatggagcagtgattggcctgactgggccgggtaggaagttgctacacaaaatcttcccataggaaggggctttttttctggctgtcagagcaggatggcattccaggtagaaggaacagtatgagcaaaagttcacagtgaggagaggttggggcaagctcatgaaggtgtgattgtggagtggccctgatggcgtagtggtctgtgaggtcttaaatgttaggctcagcagtgtctcaacccccaggcagtaggagccatagagaggtttccagcaggggttgaccaggtcccagcttcatttgtagaccactctggtagccacagggggctagaggctggttctgagttcctggccaagctctggggtagaaaggacatggaggagctgtccctgaggtggggagcaagccagaggggagagggactcagtcctggacatgctgggcagaatagccttggtggccacacaaggttgagcttggggcaagccttggccagagggtaggtgagcatctggcctgggctctggatgactcctgtgtccatcctcttccagggccacaatgtccacacctttgatctgaagctggtgtgggtggatcctgggcaggacgggtgagcaaccccctcggctgacaccccaggccttcttccctttacccccatgacacctgcccacaccctgggactctggcttgggcccctccaccctcctggacaaagctggggcctactcatcacctccgtctgtctaggtgcacgtttcacctcctcacgcccgaagaagagttctccttttgtgccaaggactcccagggccaggtgagtgtgggtgagctgtgaactgcgggagcggggtcagaggacagggtaggaagagggcagaagtatgcaaccctgcagggccccacaggagtgccggcgagtgtctggcaggcttctggggacctggtcagagtaaatcggggtcaagaattagaatgt

SEQ ID NO: 29447 - DNA, 2300 bp, Homo sapien
gggcttaaagaacatctaccctttggggaagaaagggttgcttcccttggcagctctgagctctctctctccttcagggacccctcagctgggcctaggcagggagcagggcagaggtcagtggccagtccaggaactcccctttgaggcgatctgggctcactgctcagttctgatgtgggtggtcatggaccttgcttctgggcaccctgcctgagaggatgggcactggccttgctcctgtctgtgctatctagctgtaacctgtgccctacctaggaggccctgagtccggcacctggccatgtgcaaccctgaggaggcagctctgctgcggctggaggaggtcttctcagccaccctcgcccatgtcaacagccttgtcctccagcccctgctcccagccggtgagtctaggctttctagtggggagggaagggcaccgaggaatgatcccagggacaggagacctaccttgttggacttgctgagccacagctttctcaacctcaaataggagtggtgacacctggtatcagcatcttctgatgcaggtggtgcgatcttggctcactgcaacctctgcctcccaggttcaagcgattcttgtgcctcagccttctgagtagctgggattacaggtgcctgccaccacgcctggctaattttcatatttttagtggagacgggttttaccatgttggccaggctggtctcaaagtcttgacctcaaatgatctgcccgcctcagcctctcaaattgctgggattataggcatgagccactgcgccaagtctgactgctccttttttaaaggaacgctgaggggccaggccatgaacctacctgtagcccagaccaggctgtacaaagagatggaattcctcctttcccagggtaaaaaactggaaactgccctttgcttgaattttcatcttgctcccacctagggcacctgatggtgccgggaggggaacaagactgactggaacaggatgcctaggttttacttccagtttaattctcacctgtgaggccttggacaggtgcctctgtgcatctgtgaaatggcagaggactgtgtgaccctgtggacttcacattctggatctgagtagtccaggatgaggaggcccagagccaggggggaattcgtgtatgtacttagttccctgaggctgtcagggttgtccctgtttagtgaggagtgggtgtgtctcctgtttcctcctcgaggatactgcccactgctccagcctgcccttcccctgctcagctctagggttcaccaattctgtcctgcggatcccagggatgcagaccctgctgcagctccagggctggccggtgctggtggctctcatgtgaacacctggggcctgtgcatgttccctgggagatggagcccacgtcctctactcacagtgtgactgtactccttccccagccccagatccctcggatccctggggcagagagtgcctgcggctcttgcaacagctgcacaagagctcccagcaactctgggaggtgacggaggaaagcctgcactcactgcaggagaggctgcgttacccggactccaccggtctggagtccctgctgctgctgcgaggtgctgaccgtgtactgcaggcccacatagagtaagaccactggaggtggggctggggctcatccctggtgtcagagtgacacctggcattaaggttcacctggggttggggctcacatgggtcagggttcaagcaaaggtttgggctcagtccatggttggtgctcacctgggttcagcctcacctgggcttgggtattcgcctgacagcaggctcagacactccagacctgaggcttggggcctctcagggaagacagactgtatgttagaattgtcttgttggcccaggagttgaggtctccagtgcccagagccaggccactgtgtgggccctcagggctgcagctgactagtgggtgggatctggggatcccagggaccaggggcttaggtctggggctgaggactgggtttgcagggtgtcccctgtgctgcctgcaggtacattgagtcctacacaagctgcatggtggtgcaggccttccagaaggcagcaaagaggagaaggtgagcacagggctggtgcactggcccctgacagggtgggagtgcctgagtgagggtggggtcggggaagccccctccccagagcagcaggtgtcacagcccacaactcatcctggaggactcctggctctacaaatctgcactgatccacactggaagagaaacagggaaggc

SEQ ID NO: 29448 - DNA, 2300 bp, Homo sapien
ccacattgaactctctctcactgcctggcactatctcctctacaactgtcatacatttatttccccaaatgtgactttggatcccatcattaccttgctctaaagtcctccatggctgtccacggccgactgaggcacagtgaagctgtggtcctttggggtgctgcttggtgggctgccctcagaggctgggccctcacacccatgagcctttactctcagggttcctccacttgcctgctgggtcctgtcttccttttcatttcttgcccatcattcgtggctctagcaggaggcctccggactcccccatacctccaaaactctccttgcttacacagcctggttgggtgacagggagtcccgaaccatgggctagaggacagggctgggatcctctgacagtatgaccctgtttatagagactgcagaatccctgaagggagacttgatggaaaggaggctaagaccagggcactactaatactatcctgggcacttgggatccatggtggatatttgagcagaggaatgagcaggccaaactgggcttaaagaacatctaccctttggggaagaaagggttgcttcccttggcagctctgagctctctctctccttcagggacccctcagctgggcctaggcagggagcagggcagaggtcagtggccagtccaggaactcccctttgaggcgatctgggctcactgctcagttctgatgtgggtggtcatggaccttgcttctgggcaccctgcctgagaggatgggcactggccttgctcctgtctgtgctatctagctgtaacctgtgccctacctaggaggccctgagtccggcacctggccatgtgcaaccctgaggaggcagctctgctgcggctggaggaggtcttctcagccaccctcgcccatgtcaacagccttgtcctccagcccctgctcccagccggtgagtctaggctttctagtggggagggaagggcaccgaggaatgatcccagggacaggagacctaccttgttggacttgctgagccacagctttctcaacctcaaataggagtggtgacacctggtatcagcatcttctgatgcaggtggtgcgatcttggctcactgcaacctctgcctcccaggttcaagcgattcttgtgcctcagccttctgagtagctgggattacaggtgcctgccaccacgcctggctaattttcatatttttagtggagacgggttttaccatgttggccaggctggtctcaaagtcttgacctcaaatgatctgcccgcctcagcctctcaaattgctgggattataggcatgagccactgcgccaagtctgactgctccttttttaaaggaacgctgaggggccaggccatgaacctacctgtagcccagaccaggctgtacaaagagatggaattcctcctttcccagggtaaaaaactggaaactgccctttgcttgaattttcatcttgctcccacctagggcacctgatggtgccgggaggggaacaagactgactggaacaggatgcctaggttttacttccagtttaattctcacctgtgaggccttggacaggtgcctctgtgcatctgtgaaatggcagaggactgtgtgaccctgtggacttcacattctggatctgagtagtccaggatgaggaggcccagagccaggggggaattcgtgtatgtacttagttccctgaggctgtcagggttgtccctgtttagtgaggagtgggtgtgtctcctgtttcctcctcgaggatactgcccactgctccagcctgcccttcccctgctcagctctagggttcaccaattctgtcctgcggatcccagggatgcagaccctgctgcagctccagggctggccggtgctggtggctctcatgtgaacacctggggcctgtgcatgttccctgggagatggagcccacgtcctctactcacagtgtgactgtactccttccccagccccagatccctcggatccctggggcagagagtgcctgcggctcttgcaacagctgcacaagagctcccagcaactctgggaggtgacggaggaaagcctgcactcactgcaggagaggctgcgttacccggactccaccggtctggagtccctgctgctgctgcgaggtgctgaccgtgtactgcaggcccacatagagtaagaccactggaggtggggctggggctcatccctggtgtcagagtgacacctggcattaaggttcacctggggttggggctcacatgggtcagggttcaagcaa

SEQ ID NO: 29449 - DNA, 2300 bp, Homo sapien
atgtggctgaacaggaagtctgtgctctagggaggaagccgtgggagcccttcccttcctgctcgagcccaggcagcactgccttccctcagctgcacgtgcagatgatgaaagtgaggcccagagacacctagcataagatcagatctgtcctgctcggggccttgccccacctgtccctgttcgtcacaagtggtgaggccatatgctcctcctgaggccatggccactctccagcccttgcctccctcctaagccccagggatgcctggtggcccacacccatgctctaggggacccatagatcctctaaaccgtgctcatccctgaaggagccccttgaacccaccatacccctcctctcagagtcccacataaccccgagaaggaggcgcaggtaagatatttcaccagcaggggcactacgttacagagaggccacacactgcctgtgatcacacagcaagaggaaagcagcacaaggccccataccagctcttccagaatgtaccgctacctcccactgccccacaggcacaaaggatccccacagggaagaccttggaggcctgtttagaacctgaagcctcagttcattccacctgctggggcggtggctctgccaggctgtgctgtagactcagggagccaagtgccccagcagacagtcccgcaggccaacagggctgtgaaggggagtgggggccaaggtccggagcctgggggtggagggcatggggaggggaggctttcccagagggccagagggacacctcaccagaagcctccttgaggtagcccccacccaccaacacagcaacacctctagcaggcagggaccagaggagcaaggcctttgggagtggagcccctcaggcagcagggggtgcagaagggggcaagaaaacaaggctggaaaaggggaggccagagctagggcgggctttggcaatgtggggagggatggagaagcaggaaggggcggctctgcaggattgggacccaggaggagagcaatgtggggcaaaagggtgaggtcactgggacctgcagtcactcagacaagggtcccaggctggaaaccctccaaggggtgatgtgcagcttggcagacagtaaactcccacctcgcaacaacccaagggagccaggggatgagcttggcaggccccaggcccctacttacctccactgggggtctcttcagcctggcaggttgggggatgcctcccacctcctcagtagggggctgagtagggggctggtgggccaccctttctgctcttccacggccgccttggaccctgagcctccccctcactggaacctgagtgccactgagagcaatgggtgactaacctggtggccagagggggaatcaggctgctgacggggggcttctttgttacaggtttgaactaagttccctcccgctcccggggggtctgtcccagataagtcttcagccaccctttccaaggtctcaggccttcgcacaaagcacacgcggccggcttcatgctctactaggcctgttgagactcaggagtggggaggaaaggggacttccccaaggtcgcacaggaggggcggccggccgtggacacccagcccagggggccgcagggcgcctcagtatacccctctacaggctccaagttccacgaacccacacagcgctccgcgtgtgctggcttctgtgactcagggcagacccgggaggtcacggggctgcaccacaggctcgcagagcgactgactggcggggcgaggtggtggcacggcggcctcggagccttgcaggggaagcggggcgcgagaggcgagcctgagtgtgcgcgtgggtgcgtagggggcggaggggtcaagactcccacttttcctccccgcgccgggtcccaggggcctccggatcccgggggacgccagagggaggcctcaggagaggcttggggcggcgggacggatcaataccgcgcgccagctcctcggtggcccgcccgtggcccccgcaactccagagcaacacccggaggcggggcggggcggggctgggcgaagggggcggggctggcagggggcgggactggcagggggcagggtgggggtgcgagcgaggagccgcacaggcagtcccggcgcggggcaaccacagcgctcaggtaagggcgcgacgaagggcgcgcgtctgcggacgggtgtctgcgctccacgcttagctcgtccaggtgggggctcccgcctcctcggctgctgcggtccccgcccagctccttggtcccggcggcagtcatcccccg

SEQ ID NO: 29450 - DNA, 2300 bp, Homo sapien
cagctaattttgtatttttagtagagatggggtttctccatgttggtcaggctggtctcgactcctgacctcgggtgatctgcccacctcggcctcccaaggtgctgggattacaggtgtgagccaccatgcctggctaaatggtgtttctcatacatttgtagctttatacttctgaggttattaaagcttacaactgcactgagacttttgggacaccctgctgtttaagttcagtcagtttgattttgaagcccgtgtgatagtatttggctgtggtggggtcaaggaggatctagagtacttgagttggttaaaaaaagttctgggtacaaaagtatactagaaatagtgtactgtaagatctcagctgtgttcaggagtctgcagagaagtggaacccacgcagagcagtggccatctcagggaacaccgggggacacatatgattgtattttctttcagatttcttcactaggcttgccctacttcttgatggatggatgaactttacagaaaacagaaacagctctcctctgggctgagctgtgattgggagcctgtaagcagcagagcactgcctgtcctgctaaggagagccagcactcccatattcattaattcatatcatcctcacatcaatcatgggagtctcaccctccccatgccatggataagaaacagaaacagaggagtaatgctttgctcagtgcattactgacaggctcacttagtcctcaccctgtccagcctccctgaccccatgtcccgagggtgacctccctgactggtcagtgtggctttccctagcctggcctgtgaccagcagcatgaggaagtggggattggagtgctgcaacaagtgatttggattttagcagagttcctgtttgcctggccagggcatgcctggggaggactgggtggcccagcccactcagtccccagactttacctcccactgttgagcgtttcctcgatgggtctcctgggctgcagtccttctccaacagctctcgttttcctgcctggctgtcatctccgggccctgacactggcaggtgaccgcaggtggccctccgctccctgctgcagcctgctgtggtccttgcccattcatggcatgtccaggccagaacctcacagggctctggagccacagggtctccctggttctcagggcaggccttgctgggccatccccagcctgcgcaggccttcaccagtgcccctggtgataagggttccaggggcccaacacctgggctgcttctcctaacactcagcagcaggagataaataagaatagaaggaaggaagaaaaggagggaaggggagtctaccaactccaggcctccccactcctcttcctaagtcttcagcccccacccaggtctctacatctcctcagaacctccctctgtccctcagttgtcaaggctcaacatggggtcagggccagagtgcagtgtgggtcaacttcagcatgaggtcagggtcctggcttagactgaagtcagagtcagtgttcaggctggggcagagattgagggcagccagggtcagaaaatggtcctccagcccttccagggacagcccacttctgtcctgtggggctgaagatgctggcttcttctggaaccctccataacactgccggctggcagctctgaccataccatcccctgctctccagctctggtgtccagggtgaccagagccgcctctgggcaggaagccaagccagaaagcccaggacatccctgagcgcctgtcaccatggcaacctgcccgctctgccccccccccaaactcaaatccagtatatttttcaaatccagcatgacagaatgggaagggcctcctagatcagcagattccagtcccacccccttgtcccagatggagaaactgaggcccatttgcagaagggagggggacctgttgattagggacctggccccagcctgtcctccctcccgcccacccccacctcagtgtccctggggatgcggaaggtgggggcagggagggggagcctgcggcccgatctcccgggaaggagggggcgggccctccaccgcagcgatggcgggggcgggcggcgcgggaacctgacaccgaggatgaataaatgatgctcgctgactacccgtggccaaagcccgtggccaccgagcgccggctggcaggggcagtgaccggcggccggcccgttcgtccctgggctccgcaagcggcgcggtggcacgaagatggcggggtggccgggcgcgggtcccctctgcgtgctgggcggc

SEQ ID NO: 29451 - DNA, 2300 bp, Homo sapien
aatggacaagacctggattcagataggagtggtaagctggagctttagttgtggccagcgccacttcccaggtatctacaccagcactgcccacttcaaccagtggatcaggactgaggttgctaacataaggttcatcagtagggctggccctgccttcctgagcccagttttcctcactggctacattctactgggctccttgagctccctgtggctcctgtgagcggtgtttcaaggacagtccctcccagaggctgcttctccctcccctctgttctaccctcagaagtggagacgagaggttgcccaggatggcagggcagagtgagggggagggtccgagagccactgttactttctgttgttcaatgaagatgcttttgaactttgagccactcaagtgatcatcttgcttcctgacttcggccagagcccttcacaaccttcctaacccccaagcagtcctggctgttctctcaagctgagccttctctgatagctttatgccatgtctgtcttgtgcttgttgtgtgaccctgggagactgttcccctccctcttcttccaaatgtgggactgcagctccttcttagtcatcccagcaatccagtaatccccaggtccccatggccctcccctgggtatgtgacagacactttccctcaggccttcctgcgaggcctggcctcttcccaagtaactcaccatggccagatcacagacccacaaccatggaccatgtttcagaacccactagcttctccctacccttcatatccttccatgggtctgcagagcctgaccaattcctcctccctctttggcagaggtaggtgatgtggggatagggcagagtgcctgcctgggtaatgaatgtgtgagatcactatgccctgagctcctgagctgccttggtgacctccattagactctacagcacgagcaaggctactggaggtagccaagctgaggacagagccttgcccctgtgtgaggaatgaggggctgctcagacctggtggtcctcaggtgctgagcaaccagccacccctatcccttagggcacctgaagggtgtgatttactgtcttttcagagattggagcatggattggccagctcaagtgtgtatcccaagaccacaagcctggacacatgttagaatatcctggcttgatttaactttcaccgtaccttagaaaaaaatattttcttgtagagatgggggtgctatgttgcccaggctggactcgaactcctgggctcaagtgatccttctgcctcagtttcctgagtagctgagagtagctgggacaggtgcatgccacaatgctggatcaccttatcttctattaggctagaattttccaacagctttgagtaccccacatgactttttaaatgtattaccctcctgtgtcactgaaccatcaatgtgttccccaaattgtaacatgcaaagtgacctcctcatcccacagtggcgcaatggtaagcaccagtgttcctctgtggagggaccctttgcctgcactctctttcctaagcagatggatctgtggggcaagggcatctgctgaatggggtgggggtggggtgtagttgcttagaatgaagcagtctttcaaaatcattatttaaaacacatctatctgcttaatttcagttccttgggcaaagccccactggaggggctggagggaaagtagggtcacttggagatcctggatgccagcccctgaggtttggtcttcatctcactgcgggaggggtgacaccatgagccagtccagggcaatgggctgcgagggtgaggaggtctgagaatcggccgagattaagttgagggactccaggagactgcttggaccagcggagtgaggagagggaggggccaaggagggaagtcagccggggcgtacccagcccgggaggtataagggagggctgtcactaggggcgcccttgcgggtcagacaccacgagcgccgtggcgggtggcccctggggggcgccacgcaggcggggcactaggagcatccccacccagctcaccagaggccgcggcatgcggccaacagggggcgccgtcgtgggggcggcactgggagcgccttccggagagacgcagtcggctgccaccccgggatgggtcgctggtgccagaccgtcgcgcgcgggcagcgcccccggacgtctgccccctcccgcgccggtgccctgctgctgctgcttctgttgctgaggtctgcaggtgagtccctcccgatccctaccccacccgcctgacgcggccct

SEQ ID NO: 29452 - DNA, 2300 bp, Homo sapien
tttttaaaattaatattttttgagacagggtctcattctgttgcccagtctggagtgcagtggcgtgatctcagctcaccacaatctcagcctcccgggtagctgggaccacaggtgcatgccaccacacctggctaattttttaaattttttctaaagacgaggtctcactatgttggctaggctggtgtcgaactcctgggctcaagccatccacccaccccagcctcccaaagttctgggattgcaggtgtgagccaccaagcccagccacatctttttactttcaccttatttatgccactttgtttttggtgtgtctttaataagtagtatgtggatgggtttttttctacccaacatgaagatctttttattttaaaagtagaattctatgcattcacattggttgtgataacagatatgcctgatctttattcagttatcctgttttgttttattgattggttgtttcccccaaagaattattttctgcaaaggcagaagagtgatagcgtttctcttctctgaagtttctcttttctttctccctctttccctttctatgtctttccccctggagggaatttgattgtacagataataatttccttgattttctaccatatagctctaaaattagtttgttttgcctgttttttaatttcatacagtacacagactgtatctgacttttgtatctgaattgtctcactcagaatagggttatgagcgtcaccttccagctaggtgtagcagcagctcatccattctcactgccgctgaagattccgcgtagctgttgcaccttggatggcagttgggtagtttccagctgggacccttcccagcagcactgctagtgaacagtctcttgcacctgtcctgctgcatctgtgcagtttctagggcatgaagccaggagtagaactgtgggttgtggggtaggcacactttctgctctgctaaatgattccaaacagtcatttatagtggtcatgtcagtttatctccccagcagtgtgtgaacaacctcgtcactccgtgtccttggcagcactggctgcagggtggagcaggagcttcctgcatggacagtgtgaggagcctgggatccttgggaagggagacctcgggggagtggtgacgaggtgtccccagatgtcattcattctgctgatttgtgaagacccaagtctgcaagtggcttcctcttaggaagccaccctgccaggttaaacatacctagatttcctcaacccaggagctctttcctttgaaaatacagaccttgggctgggcatagtggctcatgcctgtaatccctggagcttgagaccagggcagcacagtgagaccttgtctctcaaaaaattaaaaaaaattagccaggcatgatggtgcacacctgtggtcctagctactcgggaggctaaggtaggaggattgcttgagcctgggaggtggaggctgcagtgagctatgatctcaccaccatcacactccagcgtggtgacagaatgagaccctgtctggaaaaaaaaaaaaaaagaaaagtaaagaaaatacagaccctgagggaaaaaagaaacctccagttccacctcaatcacatcacatactacaagaactagttatctccctctcagtgcctcagtttccacacctccagggaggcgtgagagggggttcacaaaggagcctgggctgggcactagggtgcttcatgggccaggtaccaggcactgtcacgagccaggcacatcgtactgtcacaggctcagaactacacactgggggcaccatcaaggccaaggctggacatagggtacactgcagagagctgggcctaggaggcactgtcacgggccgagcaccgggagtaccactccagggaggttcctgacagcagcatcaccttgtggccctggcagggccttgccatgaccacactgcctccttctcagagtcctgtgactgccacagccaggtaggcctccaaccttggggcggatgcctactccccacagtcatgaacacacaaagcatgagttctagaatcttggcatagtagaggtgccccatcccctctgcctccacatccgttagaaggagcattgaggagtagatacccacttgccatggcctgtgggccgggggatcttcaaagccttacatctccgctttcctctgccagattagattatcagccgtctattgaaggtaaggcttcaggggcatgggacggaggctggaggggtctgtttgccgggtgcctgtgtcgggctgtcctcatgcct

SEQ ID NO: 29453 - DNA, 2300 bp, Homo sapien
gtttatcaagtttcttaaaaattctaacttacaaaatgaatttatagattaattttggaaaaattacatctaaaatgtttagctggtcttttttttttttttttttttttttgagacagaatcttgcactattgcccaggctggagttcagtggcgtgatcttggctcactgcaacctccggcccctgggttcaagcaattctcctgcctcagcttcccgagtagctgggattacaggtgcccgccaccacgcccagctaatttttttgtatttttactagagacggggtttcactatgttggccaggctggtctcaaactcctgaccttgtgatccacttgcctgcgcctcccaaagtgctgggattacaggcgtgagccatcgcgccaggccttagctgttgttttaagagcagggactgtcttgccatttatgctgatcattttctgtgtcctttattagagttttaaatttattaccacaggagtcttatgtggtgttaggtaagttaattcctatgaacttttatcattttttcgctgctgaaaatgtatgttacttcagtatattttctagttggttgtgctgggataaaaaaacattattgtttttaaaaggaaattgttttattgaagtattatatgcattccaaaaaaaatgcacaaattatgaaggcccagctgaaggaattgtcacacagtgagcatacctgtgttatcaccacccaggttaaaaagtagaataagtatgtagagaggctgaggtgcgaggattgcttgagcccaggagtttgagaccagccctggcaacatagcaagactgtctctataaaaatttttttaaaaattagccaggtgtggtggcaactgcttgtagtcctggtgacttgggaggctgaggtgagaggatcgcttgagcctgggaggtcaaggctgcagtgagctgtgacactgcactgcagcctgggtgacagagtgagaccctgtcccaaaaaaaaaaaaaaaggctaaaccagcacccagcagcccccttgcgttctctcaattatttcctctgccctccttccacaaagtgtccttattcctggtctctggtgggataggttcttttctgcctgttctttagtgttgtatgatgtttgttgtaagtttggggtatatccaacttttgtaaagttaagggttttccatctatttctagtttaagtaagaggggtttttttgtaagttataaatatgtgttaaatttttcaaatgactttttctgtgtccgtggaggaaagcacatggtctttctgtcttcagattgttagaaccttttatgtggagaatccactgagaattctttcaatgtggaaccacccttgcactcctgggccaatccttaatcatcatggtgcattgttttttaaaaatacaacatgagctactattttatttagaatgcgtgcatctgtgtttcttcatacgttcatacaaccatataacttgactgatagaactgtgtgaaaactgagtgtgtgacctgtgaatgaggggcctctggggtctccctgctggcactttgaatgttcaatgtgaaaacttctgacacagaagtcaggagcttttcttgactcttagcagtgtaggggacacaggccttctgcatctaagaaatgcagcaagcattatagcttttcagaagtggcggaggaacttccccagatgcaagaaaatgcatttcttgccttggggctccttctctgcttgccttggggctccttctctgcttgcctttgttttgaggtcctgggctgaaggctccctgtgactcagaatctctctctctccatgtctctgccttgatgctttttacctctgtcactgtcactttccgtcaagctcagtgcttttgggcaggccactgcccttctctcaccctcactctccccatctctgaaatgggaagaggccccgagtttacagctttgtgcaaattggccctgtagggcatctaggtctcagtctttctcatcctcctctatgtggttcctgtgtctccctggcacacttcttcctgaagtttgtggtgagccctggtggtcggaggatttggaaatgacccgccattggccctgggaggtgagcctccggatggaaaatgagcacgtgtgtggaggggccctcattgaccccagctgggtggtgactgcggcccactgcatccaagggtgagtatggcccatgtgtgcagggcttggagacctcaagctaccatgggcccagcccagcttcctcatttcctgagtgaaacagtg

SEQ ID NO: 29454 - DNA, 2300 bp, Homo sapien
acagctaaacccagcaagtcctaggtcatgacctacagaaatgcccatgaagaaaagttggatgcccaagacttgccacatatttctgttacttgcagctttctttcagaacagactgactgacccttttccatgttccatctgcggggaatgccagtatggcttctcatttccttctttcttcttcctcatcagttcagccccagtaaaagcattccccctttccacagaccactcctgtggactctgctgggctgtgtaatgtaatgtgccttcttctgggctccctggactctgcagtctctgtgcctgttaatttctctgtttccactggttgacattttgttcctcatggccatgggactctgtctaatctttccttatcttccatcctccacctccaggtgtggaacagagcaggagtttaggaactatttggtgagtgagtgagtgataatagataattagatgctcatatatagataattaggtgctcatatatcctctattgccttacttttttctctctctgccctttcacctcattgctttgtcctccttttgctttccaggttgccttcgtgaaggggggaaaaaacacaactgggtaggcaagggttacagcccctgcagtggggaaagtcccaggctccaggaagtttatggttctggatggggtgccctttggtctgccaatattagagcatgtttcttgttataggagaatagaaattccattcaagcatcttggctactgaggaatagcctctggctaccagaaaagatgggcatggccccccagggaacaaaacatcaagtgccaagtaaacgttagtcgattttactctttccaacaaaaattttgaattatcttttatgaatgaggcactggccttcatccacagataagatgtagatggcagttgggggatagaggtggtcattaggaggactcctaggtaaggagcttggtggctaggtagaacctgaaagagatagatgacacagggagaggagttgttgactggcaggcaatcagttttactaaaaatgccagacttgaacaaaaaggaaataaaaacaaacaacaaaattccctatgggtttctagtcataaggggcaagtgacatagggcgcaataagcatttttagtggtcttgaaataccatttgccggctaggcacggtggctcatgcctgtaatcccagcactttgggaagctgaggtgggtggatcacctgaggtcaggagtttgagaccaacctggccaacatggtgaaaccccgtctctactaaaaatacaaaaaaattagccaggcgtggtggaaggtgcctgtaattccagctacttgggaggctgaggcatgagaatcgcttgaacctgggaggcagaggttgtagtgagccgagaccgctccattgcactccagcctgggccacaagaacaaaattccatccccccccaaacaacaacaacaacaacaacaacaacaacaacaacaacaacaacaagaaatactgtttgccaccaaaagaaaccagggcttcttggagaaatggcttgaaaaatttacaggtatgaaacaggaaatatataaaataagcctgaaatttcttgtcataccagatagcaaggaagctatcatgtcaacaggactcagaaccaatcagaagaggcaccctgtgttctgacatgtggtgttcctgctagatcccattgcagagaaatcacagccatccctcagcttctgaagatactgattcacagctgcacccctcacaaaatgggcactcagcctcagggaactgattccctcaagattaagtctcttcacaggggtatcccatagcaaataattgctatgcagagatataaaggcccagtcttcttccctcaatttgggacaacttggaaaggcctcttgtaggatcagctgagatgtcagttgcaactgccttctgtgagcagcttctcctatgagcactcctcaacaaaccgttggacagaattctctctcagagcctatgttcagggaacccaatctaagttaccctgcctggcaaaagatgtctttgtgtgtttcaggattctattgctgtgtaacaatcaccccaaactcagtggcctaaaacaacacattgtattatggtcaattctcattgttcaagcattcgtacttgcaaattcacctacttgctgaaatttattttaacccccaaatcagtactcagagtgatttttggacatgcccagggcatggaaaaatttgagttttctgatgcctaagttcctagctga

SEQ ID NO: 29455 - DNA, 2300 bp, Homo sapien
aaggttctaatagtttatttgcttggttagctgaaatacgcattaaaagatggcccactgtgagggagctggaaatgcctgatctcccttggtttaatatagaagaaggcatccaaaggcttagggagattgagatggtggagtggattagtcactttagatctactcatcccagctgagagggtccagaagatatacccttgatcactgccttgtgaaataggtttgtgagggcagtacctgcatctttgaagggtcctgtaattgttcttctctgtatttcagatctaacagtgggaactgcagtcactaaactacaaaatttaaatacattgggaataattggatcccaaggtggcaggggccaagtggtggcactcaaccatcaaaggcaaggtgggcatagctactgtaatgggcagcagaggcaaagcagcaatcagaatagtctgactcgtgtagagctctggcattgggtaattaatcaaggtgtttctagaaatgaaattgataggaagcccactgcattcctacttaatttatataagcagaaaacttctagatcggatggacaacagactaatttgaattataaacatagagaatcacggctcctcagtcaatttccaaacttgagccagtttacagacctagaacctcttgaatgaaggggaggctgggtccccttgaggaaggaccccattacactaccgacaacttatgctgttaatatttctcccatccttccccaaggagacctatggccttttaccagggtaactgtgcactggggaaagggaaatggtcagatattttggggactactggacactggttctgagctgacattgattccagggtacccaaaatgtcactgtggtcttccagttaaagtagggacttatggaggtcaggtaattaatagagttttagctcaggtctgacctcggtccagtgggtccctggactcgtcctgtggtcatttccccagtgccagaatgcataattggcatatacatacttagcagctggcagaactcccacattggctccctgactggtagggtgagggctattatggtgggaaaggccaaatagaagcccttagagctgcctctatgtagaaaaatagtaaatcaaaaataatattgcatcccgggagggattacagagatcagtgccaccatcaaggacttgaagatgcaggggtggtgattcccaccacatccctgttcaactctcccattcggcctgtgcagaaggcagatggatctaggagaatgacagtggattatcataagtttaaccaagtggtgactccaattgcagctgctgtaccagtttttctagtcctagatggaaataaatttcatctgcctcaggtttctggtataaaaggtgcaatcccagttacctcacaggcctgggtgaggaaaatgccaagagctgtaaaagggcttggaaaagtaaaaaaggtgatgtataaatgtaatgattatcattttgtgctcaagaataagccttggaacacaaaataggaaagtaagtctacagccctaaaatatatgcatataaaactttaaaataatgcagttccaactctacagatggtatctggggattgtctactgctttagagtctcaatgccccttttctcacgtgggtgttgatttccaaaaaggtagcagtgtcgtctctaatgtgggtgttgattttcaaaaaggtagcagtatcgtctctaacgcagtggttagtaatgttaagtgcaacatgcacgttaaagagttttaatttttattgcaaacaagtaagggaaggagactctaaagccctggctggaggaagctctgccgtagagtagtggtcgcatttttgtgtgaacaaagggctagacagctgccactctgaggcgagggccctaggccaggagacgctgagtgcctgggaggctcccgatgaggtggagggccctgagtccacggagagctgcgaagagagagaggactcatctgagtcaggactgcacggcgcgaccccgcccaggccccgcccctcggacggcctggtggccccgccccgccccctcgtccctcccgggcgctccaagttgccgccagaacccatggccggcgtggaaaccgctgcgaggcggcgccacgacggaggctgaggtcgccggcagtatccatggcgtcccagagcggcagctccctggggctcctggcctggttcttgcttcttcagccatggctcgaagaggcccgggcaggcagggtgggtgcgcagggaggcgtagcac

SEQ ID NO: 29456 - DNA, 2300 bp, Homo sapien
tggaacctggtaggaggtgattggattaaggttggtggtttcccccatgctgttctcatgatagtgagtgagttctcatgagatctgatggcttcaaagtgtttggcagttccccatttgcttgctctctctcttgccaccacgtaagctgtgcattgcttctcctttgccttccaccataattgtaagtttcttgtggcctccccagtcatgtgaaattgtgagtcaattaaacctcttttgtttgtaaattacccagtttcagctagttctttttagctgtgtgaaaatggactaatacagaaaattggtactggaatagtggggtactgctctaaagataacctgaaaatgtggaagcaactttggaactgggtaatgcacagaggttggaacagtttggagggctcagaagaagacaggaagatgtgggaaagtttggaacttcctagagacttgttgaatgcttttgaccaaaatgttgatagtgatatggacagtgaggtccaggctgaagtggtctcagatggagatgaggagcttattgggaactggagcaaaggtcactcttgctatgctttagcaaagagactggtggcattttgtccctgtcctagagaactctggaactttgaacttgagagagatgatttagggtgtctggtggaagaaatttctaagcagcaaagcatccaagaggtgacctggctttttctgaaagtgtagagtcagctgtatgcattcatagagagatgatctgaaattagtacttagtttagaagggaagcagaacataaaactttggaaaatttgcagcctgaccatgtggcagaacagaaaaacccattttctggggagaaattcaagccagctgcagaaatccacataagtaaggaggatccaaatggtaatatccaagataatggggaaaatgtctccaggccatgtcagagatcttcatggcagcccctcccatcacaggcctggaggcctaggagggaaaaatggttttgtgggccaggcccaggaccctgatgctctgtgcagccttgagacatgatgccttgtgtcccagttgctgacactccagccatggctaaaatgggccaaggtacagctgaggccattgcttcagagagtgcaagccccaagccttggcagcttccacatagtgttgggcctgtgggtgtacaaaagacaagagttgaggtttgagaacctccacctagatttcagaggatgtatggcaattcttggatgtccaggtggaagtctcctgcaggggcagagccctcatggagaacctctgctagggcagtgcaaaagggaaatgtggggttggagcccccacaaagagtccccactggggcactgcctagtggatctgtgagaagagggccactgtcctccagaccccagaatggtagatccactgagagcttgtactgtgtacctggaaaagccataggcacttaatgccagcccatgaaagcagctgcgggggctgtaccctgcagatccacatggttggagctgcccaagactttgggagcctattctgcatcagtgtgccctggatgtgagacatgagtcaaaagagattattttggagccttaagagtgccccgttgggtttcagacttgcatggggcctgtaggccttttgttttggcaaatttctcccatttggaatgggaacatttactcaatgcctgtacccacattttatttaggaagcaactaacttgtttttgattttacaggctaatagatgaaagggacttgccttgtcttagatgagactttggacttggactttttgggttaatgctggaatgaattaagactttgggggactgttgggaaggcataattgtttttttattattttattttatttttttgagacacagtctcattctgttgcttaggctggagtgcagtgtcatgatcttggctcactgcaagctccacctcctagattcaagtgcttctcatgtctcagcttctcaagcagagtagctggcattacaggtgtgtgccaccacacccagttaatttttgtatttttagtagagatgaggtttctccatgttggccaggctggtcttgaactcctggcctcaagcaatccaccccctttagcttcccaaagtgctgggattacaggtgtgagccactgcacctggctcatgattggtttttaaatgtgagaaggacatgaaatttgagagaggccaggggcagaatgatatggtttggctgtgttctcacccaaatctcatctcaaattgtaatcc

SEQ ID NO: 29457 - DNA, 2300 bp, Homo sapien
aaattaagaaaagttatactagaaataagatataggtatgattattattaatcattagtttgtagtattactttgttctattattataataatctctgttttataattataacctagaaaaaaccaggccatacagaattaggagctgaagggacactgtgagagatgactagaagacaagagcgtgagccctctgtcatgcccagataagggcttcttgagagatccttggtctagtggtagcgccagtgcctgggaaggcacccgttgcttagcagaccttggtctagcagtagtgccagtgcctgggaaggcacctgttacttagcagactgggaaagggagtctccctttctctggaagagttagagaacactctgctccaccagctcttgtgggaggccaggcctgcctgcagtcatccggaggcttaaacatctccctgtggtgctgtgcttcagtggtcatgctccttgtccactttcatattctgcctgtacgcctggctcctccttttaagttcttagaagatagcagtagcaaaattagtgaaagtattaaagtctttgatctttctgataagtgcatagaagaaatgctgatgtatgctgcctttcctctctccctcggctacctgtcgggtggacacgtgacttgcgtgaccttatcaatcatttgagatgactcatactccttaccctgcccccttgcctagaatacaataaatagcagcgtgtccaggcattcagggccactaccggtctccgcgtcttggtggtagtggtaccctgggcccagctgtctgtctctctctttgtcttgtgtctttatttctacgatctcttgtctccgcacacgaggagaaaaacccacaggcctggtagggctggtccttacacttgttcaatgtagagacagagttagagagaggcaaatattgggatggattcatgatgtgtgacctgctcgcccactcctctgagctccaagagggccatagagaatgcccccttcaccaagacttagaacaataaattggtgaggagagcactggcatccgtggaaaacactgtcatggctgtccacttttggacaggaaaaagtggaacatacagcaattcaaaagttgttattgttgttgtttttcctccaacttcaacaaagatgaagccaggagaggcagaggcttggtagtagctcttgggcagcagacaaaaggatgagctaccagaacagacagattagacattagggacacagagctaataagagtggattgacctgcgggctgtttaaaagatgtccctgcgactgaaacagaagagcagcccactcctctgtctagcctgcttaatctgtaaagccctcctaccccgatatctaggtctggtgaatgaagccctgatttgaggacgctatggagaatgagggctcctccatgaattcccagaaggcccatcctgaccagctccaggccaggtaccatgcctacaaggtcaggggcagcatcgcaccagcctcctaagtgccgaccctaaagcgggagttctccatcaggggcagtttcctcagaagtaccctaatcccttggccctgggcagggttctggctggacatagtctggagtgaggatctgagtgaaaccgcgagggcgacatttcccattcagacaaggaatctagcaggaccggggtccaacaagtcggctcggccatttccaccccctaggcaccggccctgccccctcgtccctcgcaggcgccctggttccagccaacccctggcaggggcgcgagctgtctggagaggggcagccggtatccatgacatgtcctctggcggcggctcccggggcctcctggcgtggcttctgctccttcagccctggcccgggcagaactgggcgggcatggcggcgccacgcctcccgtcccctctcctctcagaggagggcggcgagaaccccgaagcgagcccggctccaggacctgaagcgggccccccactcaatctgtttacgtcctttccaggtgactcactgcgtgggaggcccggaggcggaggttggggcgccaggctggggcaggtgctacctgggagcctgcggtccgcggcccggggaatctgaagcgtggctcgggagccccgggggacatggcctccttcttggctgtcgtcggggcgcccgggggagtcaactcctgtgtctttgagtgagttcttcatcctacactatcctcaccccagtgtgtggccgaacccctctgagaatcgtgggaggagtggacgcggaggaaggg

SEQ ID NO: 29458 - DNA, 2300 bp, Homo sapien
tttctccatgttgcccaggctggatatgaactcgtgactcatgggctcaagcaatcctcctgccttggcctctcaaagtgctgggattacaggtgtgagccaccgcacctggctgccacttggttgttttaaacctgaactcagtggtggcccacacttgactaccaagtgtgatatgtcagaaattccttgtttgtgggcggcaagccacccaggtgcccaggcaagagactgaaggcacaagctgttccagtataataaagaaaataattaaattaagaaaagttatactagaaataagatataggtatgattattattaatcattagtttgtagtattactttgttctattattataataatctctgttttataattataacctagaaaaaaccaggccatacagaattaggagctgaagggacactgtgagagatgactagaagacaagagcgtgagccctctgtcatgcccagataagggcttcttgagagatccttggtctagtggtagcgccagtgcctgggaaggcacccgttgcttagcagaccttggtctagcagtagtgccagtgcctgggaaggcacctgttacttagcagactgggaaagggagtctccctttctctggaagagttagagaacactctgctccaccagctcttgtgggaggccaggcctgcctgcagtcatccggaggcttaaacatctccctgtggtgctgtgcttcagtggtcatgctccttgtccactttcatattctgcctgtacgcctggctcctccttttaagttcttagaagatagcagtagcaaaattagtgaaagtattaaagtctttgatctttctgataagtgcatagaagaaatgctgatgtatgctgcctttcctctctccctcggctacctgtcgggtggacacgtgacttgcgtgaccttatcaatcatttgagatgactcatactccttaccctgcccccttgcctagaatacaataaatagcagcgtgtccaggcattcagggccactaccggtctccgcgtcttggtggtagtggtaccctgggcccagctgtctgtctctctctttgtcttgtgtctttatttctacgatctcttgtctccgcacacgaggagaaaaacccacaggcctggtagggctggtccttacacttgttcaatgtagagacagagttagagagaggcaaatattgggatggattcatgatgtgtgacctgctcgcccactcctctgagctccaagagggccatagagaatgcccccttcaccaagacttagaacaataaattggtgaggagagcactggcatccgtggaaaacactgtcatggctgtccacttttggacaggaaaaagtggaacatacagcaattcaaaagttgttattgttgttgtttttcctccaacttcaacaaagatgaagccaggagaggcagaggcttggtagtagctcttgggcagcagacaaaaggatgagctaccagaacagacagattagacattagggacacagagctaataagagtggattgacctgcgggctgtttaaaagatgtccctgcgactgaaacagaagagcagcccactcctctgtctagcctgcttaatctgtaaagccctcctaccccgatatctaggtctggtgaatgaagccctgatttgaggacgctatggagaatgagggctcctccatgaattcccagaaggcccatcctgaccagctccaggccaggtaccatgcctacaaggtcaggggcagcatcgcaccagcctcctaagtgccgaccctaaagcgggagttctccatcaggggcagtttcctcagaagtaccctaatcccttggccctgggcagggttctggctggacatagtctggagtgaggatctgagtgaaaccgcgagggcgacatttcccattcagacaaggaatctagcaggaccggggtccaacaagtcggctcggccatttccaccccctaggcaccggccctgccccctcgtccctcgcaggcgccctggttccagccaacccctggcaggggcgcgagctgtctggagaggggcagccggtatccatgacatgtcctctggcggcggctcccggggcctcctggcgtggcttctgctccttcagccctggcccgggcagaactgggcgggcatggcggcgccacgcctcccgtcccctctcctctcagaggagggcggcgagaaccccgaagcgagcccggctccaggacctgaagcgggccccccactcaatctgtttacgtcctttcc

SEQ ID NO: 29459 - DNA, 2300 bp, Homo sapien
ctgcttccctcatgatgaacacaaggaaattggtcttgttggcggtgtctgtgggtggctggggctcccgtgtgacttccagagcccgttgtcctgagggtcggcaggcctgggtggtggggcctccccggggcccctctgtgtggccctctggctgtcttctcctcttgtggtatttctggctcgtctccactgaccatccccccacccctttctttctcaatactgttgccaaacatttggaagaaaagtgaaaaacttgcccccccgccagtcccggatgttgtcagatttccagatgtgggtgttctgccctccagatgagaggcagaacgtgttccagtcaggagcgggctggccccagccctggactgctgtccctccctgtgaggcggagtgacaggatgagagggactgggcccagtaggaagacagcagggcgtgccaggtagaggccctgggccccacagcacctctcagcctcaggcttagccccttgccacaccagggaaatccctggctttgaagtttctatcaaaggctccaggcacttaaaagtaaccaggagcacctccttcccaccccccaggcacagatgctgggcaaggaacagagcccaatgtgtttacaagatgtccccactgttggcgtccccatgcgggaagagccttgtgccacctcagccctcccacctccccaagtggcagtcccgtcaggctgtactctgtcactgtcatctgctgaaggctgggcttgggatggaccctgggggccgggcactgcaggatgggcactgggggtgggcactgagtggtaggaacagggaatgagcatcactgcactggggcagaccctgcttggcagcttggggttcctcagagaggcagaccctctcagagcccctgccaaaagggtcggcagagggcaacatgtggcagtggaatagcattggagagagctttctggaagagggccagtagagccaagccttgaatatgtcaggcagagggggcgagggcactctgggcagagggtgcagtggggagccaggcctggggtgtgtagggaaatgtgcatccctggggcctgtagagaggggaagtaggaatctaggggtgaaagctgagaaactggtccctgggccagcaggggctgaagagggaggctgctgaactggcctggggcgactgccctagagggagcagcatcctttctcttgccctttgtgggggttcctggagacccttggacccatagccagggctacagctgcctgccatgaccagacactcacatacagacacatgtaaacacccagacataaacacacagaagcaacacccgcagacacactcacatagacacatagacacaccacgcacacataaagacccagacccacagagacaaatgcagacacccgggccatcccttacatagacacagatacggagcacacataggcacgcacagagccccccaccacggaggcacccagacaatacacacaggtgtacacagacccccctccacacaaacacagacacagagagacccacagacacatagacaccccgacacagacacagacaacacacacagacacatgctgacttccgccttcccccacatggacacggtcatagacacagacacagacacaggggactttggagagcttaagttcagaggtgcccttagatcatcccagtccttctggccccaacacaacacgtagcatgtacttggtccacccttcttcacctcttcaacttacggacctgcagagaggcagcagggccctgtgtgggtatgtgcgggtgtgcagatgagtgtgtgtgtatgtgtgtatgtgtgtgttaagcagtggcctttgtccccctctctccctcccccttcccaacaggtgattgggaggaatggagatccctcctccactacccattcctgagcctgaacaatgccctccccaggccccaaaatagcccctaagcctagccatatccttttatggccctgtccctattgtgcactgcaggggtggggctggggtcatgaggtatccgggcaggataaaggcctgggtgaggcggctcacctaccctgctttctgcattcttctctccacatccctctctgtacttacagcccccaatggcccccaaaaagccagagcccaagaaggatgatgccaaggcagcccccaaggcagctccagctcccgcacctccccctgagcctgagcgccctaaggaggtcgagtttgatgcttccaagatcaaggtgggtatggaagctgg

SEQ ID NO: 29460 - DNA, 2300 bp, Homo sapien
caagaactgttacgacgctgcaaatacctggaaactcaggcgagtctcaggctcccacccaccatcccacttatgcctcactcatgccccacctgctgcccacagctcccagcaggtctgggggcggcatccagccttggcatccaggcgttctgaacctcagggagccccaaagggtttatgggtctcccaatgaatgggagcctgttgagctcggagggggccgggcccgagtaaacatggctgggtctgagctgccattctccccctacctcttccccagaacccaggaccaaaatacaacttcctgtccccggagctgagggccagacttgccccccagagccctgggctggggcccacaggaggaacgcaaactggcaggcccaaggctcgaggagagaaaggccttcaggttttcagactcccaggtctgcttgcatccaagacccaagtgcctgggcactttacagatcccctttgagcctgaaactgcccaactgttaacaacagatcaggaaactgaggccatgagcaggaaggcgtctggctcagggatccacaggtcaaagcagaaaaggccccagcctcctgcttccctggccagtgaggatggggcctgtgggcagggtagggcagtgcatgtggactcaggggaggtagaggctctggcagtcaagagccagggcaacagggaggcttgacagagcacaggggaactctccctcctttgggcacaactgcccactgacctccgctggcctggtcacagaatagcctacgtgtcccaggataccccttggagcagtgcacttcagagtagctggggcaggagtcccataagtgctgtttgtcatagtttcactatgtcccctggccagtccattctgctctttggtcccgtttcctccacctggaggccaggtatcaccgagcctgcctccctgactaacttgtgaaacaaaaagtactttggaaactctaatgagtggtaccctccccaggagcctggaagacccagggaggggggccctaggaatgtgcccaatggctgggggtggttggggccagctgcctcacatgcagggcactgggggctacagctggaatgtgctgagtggcagctgccacgtgaatcattatacctcatcaggctgagcctaggacttccagacacaaaccagctcagactgggctcaggcagaagggcagcctccagccgggtcacagggcctgggggtgaggtttctgggatcttgcagggtctctgcctccctgtctgcccacatcttcatcctgagcaaccagccctggttctgaacacagctcgttctacagacccacagagagaagtcatcctgtccacagccccctgcctttgagacctgtgacagcttaagcagaccctgggcctggaagggcctgggaggcagatagggagggcttcctggctgactcctcaccaggagcccacattccagtgggcaaggagtcagatatgaggtggctgtggggctgtaggggtcaggacacgggctggagtggaatgacggccccctccatctcttccgtctaggagccactgggtacccagtgctggcagatcaggctttcttgggcctcagttttcctgcctgtgacacaggcaagaaccacctccagcccccctctgatttctctgggtgccttaaacttgagtgaagtcactagtaggggctgtgttcatacctcgtggcagcctgatattcctgagatgtggaaaggaccagagggttagacagggacacagagactaagagagaggcatggcagggcaaggagaggactattgaggcacacacacgtgtctggcagcctgagtgggcccagttacctggcaggcagacccatgggtgctgaggggagggcccagccctgggcatctgaacaccggcacacttggatctgcctctgttgcctcctactcctgactaggagcctgggacaaagtcctgggccagtgtagggcttggtaaaaaataattaattttcttttcaagtggaagctctgactcaggtcttttcttgtccccagcagcactatccttgcttaggcctgagccacagaagctgctcagggactatccatggcctccccgtggccaacttgagtctgctctgcagctttaggcccgacttggaaggcccatgggctgcaggtgagtgggggccaggggagcctaggggcctgagcacagctgggaagcccaagtctgtggtttccctgggggtgagtgtctaaatacctgggccgtgctatg

SEQ ID NO: 29461 - DNA, 2300 bp, Homo sapien
taacactgaagaaccacaagtgttctttaggtgcccattctggcacctgggcctccgtcccaaggaggctacataccataggaggcagccctgaaatcacaacctccctccccagtaacggaggatgtgggcacacaaggagggaggggagtgtcctttacaccaggcagaagagtatgatcctggcagaggaagcagcaaggacaaaggcaggagagtggatgtgtgaagaagaccaggagtctagcagacagttcctgttagggagagtcatttttggaggaaactgtctcaaatagcacagcccttgaacaccagaaaaagaaatgagggcagtgggcacagagaagggaggcagccatagaaatgcatggggagggccaaggctggtggttcatacctgtaatcccagcactttgggaggctgaggcaggtggatcacttgaggtcaggggttcgtgaccagcctggtcaacatggtgaaaccccgtctctaccaagaaatgcaaaaattagccaggttggtggtacacacctgtagtcccagctacttgggagaatcacttgagcctgggaagcggaggttgcagtgagcagagatcatgccactggactccagcctgggtgacaaagtgagactttgtcttgaagaagaagaagaaggagaaggagaagaaagaagaagaaagtagcagcagaagaaatacatggggaatgcacctgggagtgcagtctggaagctggatgggcttgagccagcagaagggtggctgcagctggatcctaggccttaggacttgggcttgacagatttgcactgagggttggagggcaggtttgcaggctccgaggagctcaatatccacaggctgagtcttgagagcccctggagcccatgggccaggatgcccaccctcgtggaaactaaacagtaaagttaacattgcccttgaatcagctggccaacctctccattttgcagatgaggaaactgaggtccagacagccgaagagtggtagtgtccaggacacacaactggtaagcgggcaagcacaggctgttgcttagcccagactcatttcccagggcctcatgcattcgcttcctccgcgatccttaaagccctgcgctccaggcatccccagcccctccctctgcctcagtttccccacttggtaccgggaggtggtaggtttggggtcgaagggcccctcctcttagagctccagcgtgccctccccagccaaacacagaaatcccgccccgttcagccccaacccccgcggactcctccttgccttcccctaagtcgagggtcccaggcggcccggtccgagccggccgatagcttttgggagtgggggtgggaacgggggagggaggtgaagcctgagagtgggtgtctggattgagccccaggtctggcagcctcgagcctccggggttggggctgggcaagctggagaggcccggccagcagctgaatgggtcgagactcggagacccggacccgaagagacgctgggcagggagggagcgggatgtgtggctgcagacctgggcgggggtcggggctggcctagggccgagaggaacgacaggcctgggatgggactgagggcaggggacgaggcgagggtggggctggacgtgggggagggcggcagcagccaagccgggctcggggctggcagccgagcggcctccccagggaccccgacccggcccgaacgggagcccagtggactgacagcgtcgcggccgggggcgcgcgggggtaccgggcagcctcctcaggggattcgcccatgatgaaagagggctcgcttctcggctcagggtctctattcgccagcgggggccggatgatcaagggaaaaaaaatttaaaagcccgtgctttccagaagagaatgaagcggcggcggcgtcccgggttccctgctcgggtctcgatgttacagctgcccccgccccgtctccccagcactcacatcccgccgccgtaagactccgggcctcggcctctagcgcaatgtcccggggcggggggcggaaggctcctctcggcctctccacactcccgcgtcggcggctgcggagggggtgggggcgggagaggcccgggagggcgcgggggagggaagaggcgcccggccggggagaaggggagcggcagacgccgaggcgagggatgcgcgcggcgggcggtggctccgagcggcggccgggcggggggcgctggaggccaggccggccagcggggggtatcccgagagctccatgaagtccccccgggg

SEQ ID NO: 29462 - DNA, 2300 bp, Homo sapien
taccgggaggtggtaggtttggggtcgaagggcccctcctcttagagctccagcgtgccctccccagccaaacacagaaatcccgccccgttcagccccaacccccgcggactcctccttgccttcccctaagtcgagggtcccaggcggcccggtccgagccggccgatagcttttgggagtgggggtgggaacgggggagggaggtgaagcctgagagtgggtgtctggattgagccccaggtctggcagcctcgagcctccggggttggggctgggcaagctggagaggcccggccagcagctgaatgggtcgagactcggagacccggacccgaagagacgctgggcagggagggagcgggatgtgtggctgcagacctgggcgggggtcggggctggcctagggccgagaggaacgacaggcctgggatgggactgagggcaggggacgaggcgagggtggggctggacgtgggggagggcggcagcagccaagccgggctcggggctggcagccgagcggcctccccagggaccccgacccggcccgaacgggagcccagtggactgacagcgtcgcggccgggggcgcgcgggggtaccgggcagcctcctcaggggattcgcccatgatgaaagagggctcgcttctcggctcagggtctctattcgccagcgggggccggatgatcaagggaaaaaaaatttaaaagcccgtgctttccagaagagaatgaagcggcggcggcgtcccgggttccctgctcgggtctcgatgttacagctgcccccgccccgtctccccagcactcacatcccgccgccgtaagactccgggcctcggcctctagcgcaatgtcccggggcggggggcggaaggctcctctcggcctctccacactcccgcgtcggcggctgcggagggggtgggggcgggagaggcccgggagggcgcgggggagggaagaggcgcccggccggggagaaggggagcggcagacgccgaggcgagggatgcgcgcggcgggcggtggctccgagcggcggccgggcggggggcgctggaggccaggccggccagcggggggtatcccgagagctccatgaagtccccccggggccgcggacggggcgctggcttggggaggctgtcgggggggccccgacatccatggcaaggcgggggccgcggcggcgcgctcggagtaagtcggggctggggacccgcgccgaggggaagtggccggagtcggggaggagcgactccgggcctggccggagcagccaggctgctctgtctcggtgtcagtcggcggcgcctcctcggaacccgggggagtcgccagccccgcgccgctcggctcggtggcttttttggaaacttgcaaatgttttcgtagagagaaaagggggagggagggagcgagggagtgaccgaaacggagcttggggccgctggaagaactgaggccaaggccgggggagctagagacggactgacagacaggcagaccgacagagcgtcggggccgctgcgcgcccgagccgcacaggcgcaagcggggctctggccaaggatggggaaggggtgcgggaggcggctgccgagggtctgggatctcaggaggccgaacggccgggggctggcggccggaacacctaagggctcagtgtggctgcaaagttgagatcgcaccccctaactgcacgccccgcgcggctcagaacgcgccccctgcccggccctgactccctacgccgaaagtcgcggagctaaaaataacagtcctgcgcgccccccgcagaccgcgaccccgacccctcccccgccccctccccccactgggcgtggggcgaagccacagctcccatttccccaaaagaaaaaaaaagaaagaaagaaagaaagaaagaaagaaaaggcggcgcgggaggggggcggggggcgggccgggggcggggggcccggccatatggatgtgatttcttcgctccgaggcagacgggccgctccgcagcgctcggcgcccgcccgccgcccgcccggcctccggctctccctccctccctcctgtccctccctccctccctcctttgcgctgctcgctcgctcgctcgctcgctcgccctcagcgcatgggccccgcgccgggccccggggcctcgggccgccgggacgccggggtcccataggccggggcgtgggcggggcggccagcctgacgcagctctgcaccccctaccaccaccagggccggcggcggcggctgccccgagggacgcggccctaggcggtg

SEQ ID NO: 29463 - DNA, 2300 bp, Homo sapien
caccaggcccagctaattttttgtatttttagtagagacggggttccaccgtgttagccaggatggtctggatttcctgacttcatgatccacccgcctcgacctcccaaagtgctgggattataggcatgagccaccgcacccggccggctctgttttacagatggagaaactgaggcccaagttgaccaaatgaggaccacttgggcagcaggggcagggacccaggcttgactgactcttttttgggtccctgccaccatcaccccgtgcccccttccccatccccttacctcacagtctggacacggggaaaggggcacggggtgatggtggcagggacccaacccctggtgttgggcagggatcaggctctttgttggggctggggagaagttttctgggcccagaggggtgctactcgttccaggagttgaccagtctggagactcctagaccttggttggccaagacaacagagaccctgtcctgttttgttctcccagcttcttggttcacctctggccttttgtcctgcttcatccatcatagctctgagctgaggtttcctgagcacctccaaactgcatgccaggccttggcagagcaacccatccactacagggaagaaggcttagacagacccaggttagtgaggacaagagggttagtgaagggagggctagatctgcagtctgtggcccatgggcctctgaagggagttggaaggggaagagtggatgtccacctgtagccagcttgggaagggaagactcagggagggaacagcctaagaggctagttgtcccctggcagtggaggtggagagggggcggcatggtctcctattcccaagtgagagggggtgtggctttggggacccccacatactgaaagaatatcttgacttcagcctaagtggtctcgcggttatcaggacactctagttcatgcaggaaagaagactctggcagcttctgctgggtagccatgaatcttgtggcgacttgcagtcgaggccaccccaagtctttctaagctggggattgggggcagtacttgaggcccactggacccaggttggggtttgctcttccccgggaaaggtaacttgaccctgaggactttgctgctccaggaggggatgggaatgagaggggatcatctttgagtccagagggaaacagccatacagtcaggtccccctcactgtgcaggctttgtctgagctgagagtggtcacagaggggcttaggggcgcttgtcaggtgagtccggggagccactgacagctgcagaggtgtaagtcataccttgtattagggtgggatcgaagtggaggatcagggaaggcttttttttttttttttttttttttgagacggagtcttgctctgctgccaggctggagtgcagtggcacgatctcggctcactgcaacctccgcctctctggttcaagcgattctcctgcctcagcctcccgagtagctgggattacaggcacgcgccaccacgcccagttaatttttgtatttttagtagagatggagtttcaccatgttggccaggatggtctccatctcctgacctcgtggtccgccctcctcggcctcccaaagtgctgggattacaggcgtgagccaccgcgcccggcccagggaaggtttcttgaaggcattcgagccttgtcaggtcaagtggacaaggatgagtcagggcattccaagaggccagcatggagtgattagtgtggttagtacttgggcaaaaccggagcgatcgacgcactcttttctccttctctcaggtctgaattccacttgctgctctttcactgatcagcgttggataaatcgagccttagcttttttttttttcttttttttttttgctggctccccacccactaggcaagttgtccggaagaataagggcggggcggggcggggcggggcaaggcggggagggctcgcccataataaccccgcattgattggctttcaggacctcccagtctctcattctcgtccttggattggccgcgagacatttatccactctccttaggcctgcgcgatgcaagacgggagaaaaggaggggcgtacgcgggcaagatggaggcaactacggctggtgtgggccggctagaggaagaggcgttgcggcgaaaggaacggctgaaggccctacgggagaaaaccgggcgcaaggtgagaagtgtggagtgagggtcgcagttgaggcgtccagcgttcggggtccgggtcgcgcttgaggagagcaaagggctaataagg

SEQ ID NO: 29464 - DNA, 2300 bp, Homo sapien
cctttcccggggaagagcaaaccccaacctgggtccagtgggcctcaagtactgcccccaatccccagcttagaaagacttggggtggcctcgactgcaagtcgccacaagattcatggctacccagcagaagctgccagagtcttctttcctgcatgaactagagtgtcctgataaccgcgagaccacttaggctgaagtcaagatattctttcagtatgtgggggtccccaaagccacaccccctctcacttgggaataggagaccatgccgccccctctccacctccactgccaggggacaactagcctcttaggctgttccctccctgagtcttcccttcccaagctggctacaggtggacatccactcttccccttccaactcccttcagaggcccatgggccacagactgcagatctagccctcccttcactaaccctcttgtcctcactaacctgggtctgtctaagccttcttccctgtagtggatgggttgctctgccaaggcctggcatgcagtttggaggtgctcaggaaacctcagctcagagctatgatggatgaagcaggacaaaaggccagaggtgaaccaagaagctgggagaacaaaacaggacagggtctctgttgtcttggccaaccaaggtctaggagtctccagactggtcaactcctggaacgagtagcacccctctgggcccagaaaacttctccccagccccaacaaagagcctgatccctgcccaacaccaggggttgggtccctgccaccatcaccccgtgcccctttccccgtgtccagactgtgaggtaaggggatggggaagggggcacggggtgatggtggcagggacccaaaaaagagtcagtcaagcctgggtccctgcccctgctgcccaagtggtcctcatttggtcaacttgggcctcagtttctccatctgtaaaacagagccggccgggtgcggtggctcatgcctataatcccagcactttgggaggtcgaggcgggtggatcatgaagtcaggaaatccagaccatcctggctaacacggtggaaccccgtctctactaaaaatacaaaaaattagctgggcctggtgacacgcgcctgtagtcccagctactcaggaggctgaggcaggagaatcacttgaacccaggaggcggagattgcagtgagccgagatcgagtcactgcactccagcctgggcgacagagtgagactctgtctcaaaaacaaacaaaaaacagagccatgaggcacccacctgttgaggttaaagaaacaacatatgtgaagcaagttctgggccctggagttggggaatggggggagcccctccactggagcgtttgggaaggcttcctggaggagggagggggacccgtggcaacggtctaagcctctctgggatctgggagggcaccgcggccccgaaggtatttcaggctagtcctgctactctctaacttcccgccatcacactccacaaacagctagagctcaaaagttgcgtttcggtcttcccataaagcgacagagtagcacctggcatttgataagcgctacaaggggtcgtcatggtggtggtggagattattgttgaaggaccctcgccacctccacgcggcccgccgccccttccctgaatggcggcaaatgcagtcaggcgagcagcgtcctgggcggattcagaccctggggaagtctggaattcctcaccccgaccctcgtcccggaggctcaggctggcccttccaatggcactggtggggcagggcagcggggcaccctcccgggccgcccggcccataggcccctcctcctgccaggctctccgccctttacatggtcccaggagaggcggggcggcggtgactgcagcgaagtgcaggaagctgggcggcggccggcagtgaggaggaggagcgagcagacttgggtggctctgcgccgcggaggccacagccgcagacttccccagtagtaccgcgccgctccgccccggagtgacgccctccgcccatgggcctggccgagggcaaccggcgggcggcgcggaggaggcggcgacaggtggcgcgcagcagggccggagccgggccgggccatggccgcctcggagcggctgtacgagttgtggctgctctactacgcgcaggtgagcccgccccgccccgcgcccgcacccgcacccgcggtgcccccagcttcgcgcgccccgcgcctgctgcacctggcgccccgcgccgctggggccgcgtagccgcgcgcgcgggcgcgcgcgcgca

SEQ ID NO: 29465 - DNA, 2300 bp, Homo sapien
tcctcccaggccctggaccctcacatgcagcactgccaccatgctctcgtcccctgccattctctgccctctgaccctggctccctgagggactcccgtaccccgacacattgcagtctcaagccatggggcctaggtcagagttggcctgaggtcttccagggagaaacagtgagacccagggaggcaggacaggcagccaccccacccctgcctaatactgtgctttggagacctcgtcatcccctttcagagcccctgaaggctgtcttgattgtcccagccctgaacccagctcagcccaatctgctgaaagtttacaggactggacaggccaagggtgtggttctagggacagaaagtactatctacatactctaggagtatgtagagattgagggacccacccctgtgctgggaaggctgatcaaggtgatggccaccaggagggtgggaggttcctgctcaagtaccaaaagcccaagtcacacaaggcagtggggcatagggtgggaaaaggcctggataggaggatgtgaaccacagagggggagaggtggaagctggagaagcaggttctggttggaccagcagcctggaatgctgctcagcagttgagcctttatggggaggggttagacacggtcaaatttgggctttcaggtgctcagtagagctgcagctggcaggaagactcacattttgagtgactagcttgactgaggggcagaagagaggaagacagtattgggacatttttgaaggcagctaggggtctctgtggggccactgaggcaaggatcggggcccgcatggtcctcatgggctggcttgctagcaatcatgagtggtcctggcctagaactaaggtctggcttttagcatcctcaaaggtacactgaagacaaagtagtagataaggcatcccctgtggggcctcctgtttccccatctgcaatgggagaggttcagaagaaatggtccagggcccctggccacctctgctgtctcaggatctgggtattttgggctccttgctgattgttcgggaggaggctgccagcaggagagggtggagaggtcaataaatgtaactgacagacaaaatgtcatggttgtgtgggtctgcaccatggtggccctggcacctctctgagttgtctgggcttcagatctgcactaaactgtaccagggagttccccaatcacagggtggacggctgctctgcctaggttttttggggatctggctcaggtctgctgcagtcaggcctcttgccctggggccattcaggccttgcccgtggtctgggcccataggctgcaaaaattagccatccatccaaagatagttctggaggtccttgggtatgaggcccatggcccctggggagcagcctgaggcctgctgagtgctgactgtgatgtgtcccttgcctcttcatccttttccactctagctccccctgtccacctctctgactctaggaaagaaggctgccttttggactcagctggttaggagctccatatggggccagcctggaggagctcctgtataagccacaacccacccctggcccctgggaggggcttagagattagagcagatacgggctaggctaggatttatcagctgtgttcctgagcgaagagaactgcagagttcagatgaggtggccaggacatggcgggcggcggggcgggacaaaggtatggctgagtcttctacatcgacccctgtggcctgaggccttgcgcgcaggtcagggagctgtgggtgccttaagtgaagggtactgcagcagcaggatcagaaccctcacctggataagagctcttccaggcgccaacctcatgcttgtaaaactagtcttggcccacaagccccacccaggacaggtgactccacccctctgtaacaggtcccaccctctgtgcaggccaggtcgcttgcagcctctctcactggggcccagggtgccccggcccccccacatccctgcggtctgccgggaggaagcggtccccctcccccaccgtgactctgcgcttcctgccccagccccggggcgggaggagacatttcccgttcacaccaaagttttcctggcagcgcctagacctgggcttagccactgcccctcttgcccatggaaccagctctggggcctggggtccaggtaaccagcaagggtgggtggaggttcccggggcaaggcagggccgcacatgaggatgtgcgcatgtctgggtctgcctgtctaatggtacacgtgtgtcctgggatccacagttaa

SEQ ID NO: 29466 - DNA, 2300 bp, Homo sapien
ggaacagggtgagtcatgatgagccacagtgggtgacaccagccaggcttcagaagggccctcaagagagcctgtagggcagacacctcacagggtccaagggcagcaaactccaaaggccctgccctgggcttctgggtttggggatgggcctctgcttgttctatgtgaactgcctcatctcctcttgggagtctggcaagaccccaggattctgcctggaactcaggtagtagttgagacccctataccattcttccaggcccttagtgccaggctcactgttagccaaatgctctgactcctgggtggctaccccaggaggggtgctgagtggggatgggtgggcgtcagcctgattccctcccttagccgcccacaacccacgcccacaccacccacctgtgcccacagcaaacctctgaggaagagttgtgcaatctgctcaccaacgtgctgttctcggtgacgtggcgtggcgtggaaggcagcgatgaggctgcctggcgggagcgtggccaggttttctcagtgctcacccagctgggggcctcagccacacttgtgcgcccaccagactgcatcaagcgcaggtgagagggaaagtctggagggggaggggcttcaggaagcctcgggggaaggagagaagatagtcaggtagacccttgagttccccactcacccgccagcctcctggagatgatgctggagtcagccctgaccgacatcaaagaggcccccgtgggggtcctggccagcctcacccagcaagcgctttggctgctgcgtctgctgcaggacttcctgtgtgctgaaggccatggtaaccaggaactgtggagtgagaaggtgcgacccctcagagaggcgtgagccacatgaacactcatgttcatgcaagcctgcagggatctggtctgggaggtggatgggtacacgtgcgcaggtgtgggtgcatcagcatgaatgcctgtgagtgtggacttgcctgtgtgcacaaaccctacctggcccccagcgcaaactttactttgctccctttccatggactcctggcctcccctggtgatgtctgttgggaacctgttttctgtggcagctctttgaaggtgtatgcagcctacttgatcgcctgggagcctggccccacctggccaacggcacagctgatctccgtgagatggcgcagattggcctacggcttgtacttggctacatcctgctggaagacccacaggtgagcacagggtgagcatgggggcagggggcgtgtgagatgtcgggagctccaagagtggctgggtgccactcatctctcttgcgcccacagctgcatgcccaggcctacgtgagattgcacatgctgctacagactgcagtgccagcccgccgcgaggaggcctgctatgtgctctccaagctggaggctgcactggggcgggtgctgaacacctcttccttggagtcagccactgatgaggcagggtccccacttgcagctgcagcagctgcagcagctgcagagcgctgctcctggctggtgccactggtgcgcacgctgctagaccgtgcctatgagccgctggggctgcagtggggactgccctccctgccacccaccaatggcagccccaccttctttgaagacttccaggctttttgtgccacacccgaatggcgccacttcatcgacaaacaggtgcctggaggttggggcccaggaagaggagtgggggctggggcccacatcgagcactgttctcctctgcccaatcctccaggtacagccaaccatgtcccagttcgaaatggacacgtatgctaagagccacgaccttatgtcaggtttctggaatgcctgctatgacatgcttatgagcagtgggcagcggcgccagtgggagcgcgcccagagtcgtcgggccttccaggtgtgccacccggggtaagggatgggaaactgctccacacatgcacccaggagatgactgacaatgtggagaaacgggtagggcaggcagcagccaggggactgacctattacccccaccccaggagctggtgctggaacctgcgcagaggcgggcgcgcctggaggggctacgctacacggcagtgctgaagcagcaggcaacgcagcactccatggccctgctgcactggggggcgctgtggcgccagctcgccagcccatgtggggcctgggcgctgaggtgggccgggcttggggcagggtcgctgtggaggggtggggcttgggagggagggagccacctggagccccagactgcctttgg

SEQ ID NO: 29467 - DNA, 2300 bp, Homo sapien
gaaactgtccagcgccgagacatattcacgcatgcgtctgaagctggtgcccaaccatcacttcgaccctcacctggaagccagcgctctccgagacaatctgggtgagggagtgtgctgagatgggtccacccaactcgattgtcccgtctcctgtcctgccttgcttctgctgagtacccttggccccttgcaggtgaggttcccctgacacccaccgaggaggcctcactgcctctggcagtgaccaaagaggccaaagtgagcaccccacccgagttgctgcaggaggaccagctcggcgaggacgagctggctgagctggagaccccgtgagtggggccctggagagattggactggtgtggtgggcaaggggtctgctccagtgtgtgcatgcctctgtgggatcaactccctgagtgtgtcctcttctgctgcccgactacgtccccctgaagggactgtccaaagccagatggtgagtgggagagtctcctaacagggctgagagttgctcttttaacagccaggcacctgaggacagcactgagaaacacaaaccagagcaggaagggggcccagggagtgggcaggggctgggtgaggggagcaggggacaagggttggcatcctggcaaaatattcagaagcccagtgggtggcaggtgggggacaggggctgggaccagtaggttctggaccctaggcagcccctccccatctctgggagtcatgagagtatataccccatgactcaatggcacttggatgccctttgggcttgtgaagaagggggtcccagagcctacagcgtgaggtgggttgctggtctttaggatggaggcagcagaactggatgagcagcgtgagaagctggtgctgtcggccgagtgccagctggtgacggtagtggccgtggtcccagggctgctggaggtcaccacacagaatgtatacttctacgatggcagcactgagcgcgtggaaaccgaggagggtgcgtcctggtggtgtggtttaggaggatggcagggaatggctgagctctgggtggggctggggtgagtgactcccgtacctgctgttcctccccataggcatcggctatgatttccggcgcccactggcccagctgcgtgaggtccacctgcggcgtttcaacctgcgccgttcagcacttgagctcttctttatcgatcaggccaactacttcctcaacttcccatgcaaggtgggcacgaccccagtctcatctcctagccagactcccagaccccagcctggccccatcccaccccatacccaggtacggaaccaggtgtactcgtggctcctgcgcctacggcccccctctcaaggctacctaagcagccgctccccccaggagatgctgcgtgcctcaggccttacccaggtgagagccctgggtgtgagggatgtgaagtcgggaccctgaatcacggggcagtgctggacagcccacctggctcacatcttgtctgcccctgtccccagaaatgggtacagcgtgagatatccaacttcgagtacttgatgcaactcaacaccattgcggggcggacctacaatgacctgtctcagtaccctgtggtgagggtcccactctgcacccctccacccctgcccctctgacctgtcagcccttggttcccccaagtgtaggtacctgccagtgggccaagctctgagcttggtcaagggtagatgtgccaatgaagacctggcctctgttccctgccaacccccagaggtccccagcctcactcccttcccctccctgcctagcctctattcctcaaaaggaatcctgttccaggacactctgtccttctcccctgtgacccctctaagtggtgctcccccaacctgtgggcaggctctgtgcccgccttcttgagggtgtgggcagggcagggtgggctggtaggccatcagggccctcatgcagcccctgctcgggtgggtggccagttcccctgggtcctgcaggactacgtgtccccaaccctggacctcagcaacccagccgtcttccgggacctgtctaagcccatcggtgtggtgaaccccaagcatgcccagctcgtgagggagaagtgagcatgtgggcagggctgggctcagcgggtagggaaaggcgaggggagggcttctgctgacacgtccaactgtggccccaggtatgaaagctttgaggacccagcagggaccattgacaagttccactatggcacccactactccaatgcagcaggcgtgatgcactacctcatccgc

SEQ ID NO: 29468 - DNA, 2300 bp, Homo sapien
caaagattacccgggtgtggtggcacatgattgtagtcccagctactcgggagactgaggcaggagaattgtttgaacccgggaggcagaggttgcagtgagctgagattacgccactgcactccagcctgggtgacagagcaagactccgtctcaaaaaaaaaacaaaaaatttgcggccgagcgcagtggctcacgcctataatcccagcactttgggaggctgaggcgggcggatcacttgaggtcaggagtttgagaccaacctgaccaacatggtgaaacctgtctctactaagaatacaaaaattagccaggcatggtgatgcacccctgtaatcccagttactggggagactaaggcaggagaagcacttgaacccgggaggtggaggttgcagtgagctgatatcacaccattgcacaccagtctgggtgacaagaatgagacaacctctcaaaaaaaaaaaaaaaaaaaaaaaaaggccaggcgtggtggctcacacctgtaatcccagcactttgggaggttgaagcaggcggatcacgaggtcaggagatcaagaccaacctggcaaacactgtgaaaccctgtctctactaaaaatacaacaacaacaacaacaacaaattagccaggcatggtggcgggcacctatagtcccagctactctggaggctgaggcagaagaatggcatgaacccggggggtggagcttgcagtgaacagagatcgcgccactgcactccagtctgggcaacagagtgagactccatctcaaaaaaaaaaaaattcccctgtgcccctttgtagtcagtcccttccacatccctaactcctggcaaccactgatctgctttctgaccctctggttttgtcttctccataatgtcaaaaaagtgatatatagtatatagcatttgaatttgccttctttcacttgtcgtattgcattttagattcattcatctatgttattttgtgtctcggtaggtttttttttaattgctgagtagtccattgtattcatgtaccatagtttataaattcatcatttcagagacatttggctattgtgaatgttgctgctatgtacaagtcttatgtgaatattctccctctttgtgttttttttttttttttttttttttgagacggtgtcttgccctgttgcccaggctggagtgcagtggcgtagtctcagctcactcccacctctgcctcctgggttcaagcgattctcctgcctcagcctcctgagtagctgggattacaggcacacaccaccaggcccagctaattgtatttgtagtagagatgggtatttcacaatgttggccaggctggtcttgaactcctgacctcaggtgatctgcctgcctcatcatgcctggcctctccctcatttttgaaaggaagtttttttggggaaatagtttctctcaacattctgactctatttattcttcagttttctggcttcccttaactggttttgtgagacttggtctaattttcatccttctttaatcgggcttttctcttggtctgcttttaagaggctctctttgtatatgtctttctgctgtatgtttttatgaggatttctttttcttttcccagttggaattcattggacttttgaatttgaaggttatttttcaactatttctcttcatatctaatctcctgcttaaccgtactgtggaatttagggacaataaattggattgagtattggattatttcttggtttatgacacttattttgttttttattttaattttagaatttgtgattatagaaatgtccccagctataaagaataggatgctgtatctatctttaatcttaaaattctagaaactaagggtagagatgaaattagagatgaaattattttcatctctttgtcaattccttgggattctgttctgtgtgcaagacaagctgagtaattttgagtatagttgtaaaccagtgccaaatagggtttgatgtggttagtggtttagtcatgagtgacataatacttattagtgctttgattgtgtctatgatttagggagcaactttttgtggtccttattttctttctagatatgatacaccaacttctaaaaagaaagtacgaattaaagaccgcaataaactttctacagaggaacgccggaagttgtttgagcaagaggtggctcaacgggaggctcagaaacaacagcaacagatgcagaacctgggaatgacatcaccactgccctatgactctcttggttataatgccccgcatcatccctt

SEQ ID NO: 29469 - DNA, 2300 bp, Homo sapien
aagaggtcagttcacatttagcttgcttgtttcttaaaactgttatattgattgcctcggttgtggatatgtgataatatcagtaattatgaatttagcactgtatcattggtattaaataatcaaataattttttcatctcagtatcattcctttaacgtatctaaccgtacatacaccttgttagtagtttgtcccatggttttcctatagtatctttttaaagttggtactacatagcagggaactacaagagcaagatataataacaacaacatagttaagtgaaagatccagtttgttgttaaaaccagagttttaaaaagatgggaagtcatataaaatttgaactgtggggtctaaagaattggtaaagatctgaattctgcataacaagagtatgaacattttgaggaatcttttaaataagtgttttaaaagatctaagtaaaggttcattggcagcattattagtggagttacgatgtctttacctttctatgaaattaataaaattttctaactttctaatttgtaatataatcccagagtcttttatttaataaaacacttttaaaaacaaacaaaaaggaatgggcagataagtacttgttcttgcctctgtccttctcccaggagatttggcttgaggaaattgaggaagccttggggtttctgtggaactacattgaggaatacttcagaaaaaattcttggatttcaaaatgggggaggttgtctaagaatgaggaggggatctctctttgctagacagctgtttatcaaaagctgaagagatgtctgcatttttgtgtgtatgacagacatcatttaaatatgttgttacatagctgctaagtgtatatcacagacacttggtaaactttttaagaaaagatacccaggattggtccagtagtgtatatgtttaaaaagctacccaggtttaggaactactggtagagaatattaatcagtcctatttgatgttgtgattcttgctgatcagtcttattaaaagtttttctttcttaaggaaaacaatattatgatttttaaatatgcttgtgtttacagagatgtagttcttaataaagcagtagcaaaactgcactactcttgcagaaataatctgagtcccatccagaaattgaaaaagtcaactgtaggccaggcgctgtggctcaatgcctgtaatcccagcagtttgggaggctgaggcaggtggatcacctaaggtcaggagttcaagaccagcctgaccaacatggagaaaccccatctctactaaaaaaaaaaaaaaaagctgtgcatggtggtgcatccctgtaatcccagctcctcgggaggctgaggcaggagaatcgcttaaaccagggagccagagattgcagtgaccaagatcacatcattgcactccagcctgggcaacaagagcgaaactccatctcaaaaaaaaaacaaaatcaactgtagccaggtgtggtggctcatgctggtaatcccagcattttgggaggccgaggtgggtggatcacttgaggtcaggagtttgagaccagcctggccaacatggtgaaaccctgtctctactaaaaatacaaaagattagccaggcgtggcagctagcgcctgtactcccagctacttgggaggctgagacaggagaattgcttgaacccaggaggcagaggttgcagtgagccaagatcatgccattgcattccagcctgggtgacagagtgagactctgtctcaaaaaaaaaaaaaaaagtcaactgtacaaagtgatgtaatttttttttatgtttaatcagattataaagactttggaacacttgcccattcctactaaaaatatgttggaggaaagcaaagtacttccaattattcaacgctggtctcagactaagactgctgtccctccgttgagtgaaggagatgggtattctagtgagaatacatcgcgtgctcatacaccactcaacacacctgatccttccaccaagctgagcacagaagctgacacagacactcccaagaaactaatgtttcgcagactgaaaattataagtgaaaatagcatggacagtgcaatctctgatgcaaccagtgagctagaaggcaaggatggcaaagaggatcttgatcaattagaaaatgtccctgtagaggaagaggaagaattgcagtcacaacagctactcccacaacagctgcctgaatgcaaagttgatagtgaaaccaacatagaagctagtaagctacctacatctgaaccagaagctgacgctgaaata

SEQ ID NO: 29470 - DNA, 2300 bp, Homo sapien
ttgcttatacagcagtattattacttgagggtggggggcccaggcagagacagtgatatgtgccaaggcagagtactctccaggaaggcagaaggcctggtcctcatttggttacctcatctgtaaaacaagtaaggtgggaagttcctctgtatcagtggtttcccaaacctgggacattgattagaattgcctatgtaatgcttttttgtttgtttgttttttttaaaaaccaaaacctcaaaacaccccaaaaaacaaaccctttcctcatcttagagctcaatagctcgttgatatttgatatttcctagagtgtggatcacagatgagtatgtttttttttttaatttttaaattttttatttttttgagacagaggctcgctctgttgcccaggttggagttctgtggtgccatcttggctcactgcaacctctgcctccggggttccagtgattctcccacctcagcctcccaagtagctggggttacaggtgcatgctgccacaccctgctaatttttgtatttttagtagagatgggttttcattatgttggccaggctggtctcgaactcctgacctcaagtgatcctcccgcctcggcctcccaaggtgctgggattacaggtgtgagccactgtgctcgacccagatgagtatttttactgtgcactccatgtgatgccaggagaccactggtcttgatgacctctgatttttcatctctgatagaacacaagaacaaaccatattgagtactgagatgttagatattgccctttatacaaatgtctttcaaacatatgtcaggtttttaaaaaattctttttaaaaaatgctacctggaaaatagttataaaactgaaaaaagttatttatgtacgagaaagtaagaatggggaaaataggtaattgttgaagcttggagtggatacttagggatttattataccattttctatacttttgactgtgtttgaaaattttcataataaagatatatatagcttagtgaaattcatactatttgttattaaaaagggcttttcatttctccagtaaacattttaaactgtgcagtccatttgaaagtaactatttattgtagtagtaattgcttattttgttcatttgtaggcaaagattgaaaatgtgcagaaaacaggtttcatcaaaggaccaatgttcaaaggtgttgcttctagtcgatttttgcccaaaggcaccaaaacaaaagttaatttggaagaacagggacgacagaaggtgtcattcagcttcagccttacaaagaaaactttgcagaataggtttctcactgcacttggcaatgaaaagcaaagtgatactccaaaccctccagctgtacctcttcaggtagactcgactcctaaaatgaaaatggaaattggtgataccttatctactgcagaagaatcttccccaccaaagtcaagggtggaattgggcaaaattcattttaagaaacatctgcttcatgtaacatccaggccactgctggctactaccacagcagtagcatctccacctactcatgcagcaccattaccagcagtgatagcagaatcaacaactgtagactcaccgccctcatctccgcctccaccgcctccacctgcccaagccacaacactctcatcaccagcaccagtaacagagccagtggccttgccacatacaccaataacagttctaatggcagcaccagtacccttaccagtagatgtagcagttagatctctgaaagaaccaccaattataattgtaccagaatctttagaagcagatactaagcaggacactatatctaatagtttagaagaacacgtaactcaaatattgaatgagcaagcagatatttcctcaaaaaaagaagattcccatattgggaaggatgaagaaattccagatagttctaagattagtctgagctgtaaaaaaacaggttctaagaagaaatcctcacaatctgaaggcatctttcttggttcagaatctgatgaagattctgtacggacttcttcaagtcaaagatcacatgatttaaaattttcagcaagcattgaaaaggaaagagattttaaaaagagctcagcacctttaaaaagtgaggatctagggaaaccttcacgatctaaaacagacagagatgataaatattttagctattcaaaacttgaaagagatactcggtatgtatcttcccgatgtagatcagaaagagagcgacggcggagcagatctcactctaggtctgagagaggctctagaact

SEQ ID NO: 29471 - DNA, 2300 bp, Homo sapien
ccaggatggtctcgatctcctgaccgtaatctgcccgccttggcctcccaaagtgctgggattacaggagtgagccaccgcgcccggcctagaaactatcttaaaaaatgacatgctggctgggcacagtggctcacacctgtaatcccagcactttgggaggctgaggcaggtggatcacctgacatcaggagttccagaccagcctggtgaaaccctgtctctactaaaaatacaacaattagctgggcgtggtggtgcatgcctgtagtcccagctagtcgggcggctgaggcaggagaatcgttcgaaccgaggaggcagaggttgtagtgagccaagatcacgtcactgcactccatcctgggcgacagggtgagactatgtctcaaaaaaaaaaaaaaaaatgacatgcagtggctaggcttggtggctcacgcctgtaatcccagcactttgggaggctgaggagggcagatcacctgaggtcaggaattcgagaccagcctggccaacatggtgaaaccctgtctctactaaaaatacaaaaaaaattagcgggtgtggtggcgagttcctgtaatcccagctacttgggaggctgaggcaggagaattgcttgaacctgggaggcagaggttgcagtgagctgagattgcaccactgcacttcagcctgggcaacagagtgagaccctgtctcaaacaaacaaaaacaaatatgttacagctctcatttattgagtataaactctctgccaggcactatatgaaggaatttttttttttttttgaagacagggtctcactctgtcacctagagtggactagtaatgcaaacctggctcactgcagttttgacttcctggactctcaagtgattctcctgtctcagcctcccaagcagctgggaccacaggcaaacgccagtatacctggataattctaaaatttttttgtagaggcaagatctctccatgttgcccgggctggttttgaactcctggcttcaagcagtcatctcgccttggcctcttagaatgctgggattacaggcatgtgccatcatgcctggcctatatgaaggaatttttttttttttttttagacggagtctcactgtgtcgcccaggttggagagtagtggcatgacctcggcttactgcaacctctgcctctggattcaagcgattctcctgcctcagcctcccgagtagctggtattagaggcgactaccactatgactggttaatttttgtatttttagtagagacggggtttcgctatgttggccaggctggtcttgaactcctgacctcaggtgatccgcctgcctcggcctcccaaagtgtgggaattacaggcgtgagccaccacacccggctatatgaaggattttaaatagacactcgttctctttttaaagtaaatatagtactatttcagttttatagctagcttctttggcctccatttcttttagtaacttaggttaaaaaactttggagtcagtattcaaattcaggttgactgaatataagagcttttgctcctaatatattgtactgtgggtggtacctctccagctgacattttgagagtacaagatgggagataagagcaagtgggatatgctttctggacagaggcactagaaagaccatagcagacaatttaggctgtatagctttttttttttttttttttttttttttgagacagggtctcgctctgtcacccaggctgaagtgcagtggcaccatcatagctcactgtagccttagactcctgggctcaactgatcctcctgcctcagcctcttgagtatctgggactatagatgtaagccactatacccagctaattttttattttttgtagagacagagcctcgctatgttgtccaggccagtctcaaattcctggccttaagcactcctcctgttgggggcctcccaaagtgctgagactacaggcatgagccaccacacctgttcagctgcatagttccttttaggttatatagttcttaaactgtatacaggcctcagctgaatccaaaaatgtgaaatctgaaatgctccaaaagttaaaacttttttaatgctgacatgatgccacagtgggaaattttacacatgacctgatgtgaggggctgcagtcaaaacacagccaagctgggcatggtggcatgcacctgtagtcccttcaggagcctgaggtaggaggatcatttgagtccaggagttcaaggctgcagcaagctgggattgtactactgtacttgctccagcctggg

SEQ ID NO: 29472 - DNA, 2300 bp, Homo sapien
aaaaaaaaaaaaaggaaaaaatacacgagaatttaaaaatatataatcactgttagaaatccaaagcagtggatttctactacattaaagcaataaaaataaaaactccaaaacatgtaaaaccataaaacattcttgattccttccccactcaggtctaccaaagatgcacttctgagtccattttcccacatattatgaaaaattgtttttccccaagaagtgtaaggatgtgatccttaaagcttccggacttcaccaaacaacctggtaaaaggaagtgaaagcaggcacttagcctattcaggggttagcatgttactttgtacagagcaagtgctatataagcatttattgaatcgtgatataaaattttttttgaggtttttcaaactaaaaacctataacatgagctttgtaattggactgatggtgcagtaaatcaaaacaatcttacctaactgaccctgccagtagcaaaacaaaaagaccaatctaattaaggtaatgttaaccaatggccaagaacccatgaaaggaaaaagccatgttaacttactattgcaagtaagagttgggtttttagaaaagcaaaataatgatttatcttgttgtgcagaaatgaccaacacctcaacagaatccgtttgtgttgcaatcaaaactatcaattaagatccagacatttctggaccaatgtgagaagatgtggcaagggattcaaaaacgagccagagcaaacctaaggtaaaatgtgtcaaaacagcaaagctcttggaatcatcctggtcataaaagtttgacagtttcatgtgaaacccctatcaaccgataagttttaaatcaatagtatattcctaggtctaacaccagcaaacggtgtttaagaacggcttttcaaaacaatggtctcgtgagggttcagggaaagaagtgactccaggctttctgagatagcagatacagcagcagattcagacctcaagagaaatgtaaaggtgtcctagactgaaaaattactattgggcaaaactgtgtgtcggttttccacaacattgtcttctttagagaatcctcaaacgattcttggtttttaaccaagtcttcacaagaaatagaaagtcatccgtttagggtaagagattcctgttaccaagaaaattgtgtccgaaagtgtgaaaatctcacaacctgcaagaaaatgtatgtccctcaggaggctttcattttcaagcggaaaaacaaacccggtgtcacctcaacaacgggaccacacaaacctcgccattacaaaacccaagtgccaaaggtgcacaatgtgaatccggaagcactgcaaggccaggatcgagttcccaggaggaaaaaatcaaactcaggagtgcagcgcgggcccctccacggcccgggggccaggcaacccgcgctaggcccttccggtccgaggcgccgccgtcgcggggaggtcgggcgacgggtcgagcttccacccgagcccggggattcgcggcctaccctcaccggcgccctcttgccgggcccggcaccggcagctcctccgactctgccctttggctagcagcggggcccggacgagccacgaggagcccgagaggaccgccgagccccgggatggccgggtcggtgcggacacggcggtaaccgtagggaccgtggccgcccctcccccaccggcccggcccaaccgccgccgcgacacgagcagcggcgccaacgccgggcccaaccgcgggcctgctgcggccccggccaagcggctcgaagtggcggcgcgggcctgctcccgacaccgaccgcgcgaggccaccgtgggcctgttactcctcgcgccggcccgcgccgccacccgtcaggacgcgccgccctcggctggggataaggcggccgacagcagcggggggccgcggagctgatacttactcaggggtcgggtgctccgggtcgtagaaatcccccatcttcggaggcggctgcggctgcagctgcttcatcgggagcggctggagacggcgacgcgagccccctccccgcagcagggcgacgcgggggaggggaggggaggaggccgcaggtccgaccgcggcggcggcggcggcggcggcggcggcggcaggggcggcccgcgtcgctacctcgctcgtcgctccctccctccctcggacgcccgccagccgctctctccctctcaccctcacaccgggagcgacgcacaccccacccgcccctcagcttcgcaggcccggccccttaaagagacacacacgggccaccgatctgcc

SEQ ID NO: 29473 - DNA, 2300 bp, Homo sapien
aaaagaccaatctaattaaggtaatgttaaccaatggccaagaacccatgaaaggaaaaagccatgttaacttactattgcaagtaagagttgggtttttagaaaagcaaaataatgatttatcttgttgtgcagaaatgaccaacacctcaacagaatccgtttgtgttgcaatcaaaactatcaattaagatccagacatttctggaccaatgtgagaagatgtggcaagggattcaaaaacgagccagagcaaacctaaggtaaaatgtgtcaaaacagcaaagctcttggaatcatcctggtcataaaagtttgacagtttcatgtgaaacccctatcaaccgataagttttaaatcaatagtatattcctaggtctaacaccagcaaacggtgtttaagaacggcttttcaaaacaatggtctcgtgagggttcagggaaagaagtgactccaggctttctgagatagcagatacagcagcagattcagacctcaagagaaatgtaaaggtgtcctagactgaaaaattactattgggcaaaactgtgtgtcggttttccacaacattgtcttctttagagaatcctcaaacgattcttggtttttaaccaagtcttcacaagaaatagaaagtcatccgtttagggtaagagattcctgttaccaagaaaattgtgtccgaaagtgtgaaaatctcacaacctgcaagaaaatgtatgtccctcaggaggctttcattttcaagcggaaaaacaaacccggtgtcacctcaacaacgggaccacacaaacctcgccattacaaaacccaagtgccaaaggtgcacaatgtgaatccggaagcactgcaaggccaggatcgagttcccaggaggaaaaaatcaaactcaggagtgcagcgcgggcccctccacggcccgggggccaggcaacccgcgctaggcccttccggtccgaggcgccgccgtcgcggggaggtcgggcgacgggtcgagcttccacccgagcccggggattcgcggcctaccctcaccggcgccctcttgccgggcccggcaccggcagctcctccgactctgccctttggctagcagcggggcccggacgagccacgaggagcccgagaggaccgccgagccccgggatggccgggtcggtgcggacacggcggtaaccgtagggaccgtggccgcccctcccccaccggcccggcccaaccgccgccgcgacacgagcagcggcgccaacgccgggcccaaccgcgggcctgctgcggccccggccaagcggctcgaagtggcggcgcgggcctgctcccgacaccgaccgcgcgaggccaccgtgggcctgttactcctcgcgccggcccgcgccgccacccgtcaggacgcgccgccctcggctggggataaggcggccgacagcagcggggggccgcggagctgatacttactcaggggtcgggtgctccgggtcgtagaaatcccccatcttcggaggcggctgcggctgcagctgcttcatcgggagcggctggagacggcgacgcgagccccctccccgcagcagggcgacgcgggggaggggaggggaggaggccgcaggtccgaccgcggcggcggcggcggcggcggcggcggcggcaggggcggcccgcgtcgctacctcgctcgtcgctccctccctccctcggacgcccgccagccgctctctccctctcaccctcacaccgggagcgacgcacaccccacccgcccctcagcttcgcaggcccggccccttaaagagacacacacgggccaccgatctgccgccagtcggcgtgccttgcagctgttggcttgaccccaggccgggacgggcagagcggaacactgcccggcgggtccaggccgaccgtgcctgtggctctccggaacaataaacccccggccccagtgatgtgggccagaccggacctggagaggcggcaccgcgacccctcccgcaacccgcctggcggccgggggcagcgtgacccggcccgctaccgtgtcacagctggcgactgacaaacagcaggcgacgtcgggagaactccccgagacacccgagacatcagccttctcgctccgcggccctgcaggacctgcccgccgggagccccggagtccgcggcagcgccgagggcccctcccccaggcctctgggctctgaggtaacgcggccgcggctgctcccgggcccctcgtcccactcgcccctctcttttttatttttcctcgccctctctctcccttgcccgttcatctcgacc

SEQ ID NO: 29474 - DNA, 2300 bp, Homo sapien
gagacggagtctcgctatatcgcccaggctggagtgcaatggtgcgatctgggctcactacaacctccgcctcctgggttcaagcgattctcctgcctcagcctcccgagtagctgggattacaggcgcaccaccacgcccagctaatttattttttattttcattcatttatttatttttttgagatggagtcttgctctgtcgccaggctggagtgcagtggcacaatctgggcttactgcaacctccgcctcctgggttcaagcgattctcctgcttcagcctcccgcgtacctggaattacagccgtgcgccaccacgcccggctaaattttgtatttttagtagagatggggtttcgccatgttggccagtgtggtctggaactcttgacctcagttactccgcccgcctcggcctcctaaagtgctgggattacaggcgtgaaccaccgcgcccggcccactttcagtttttaaccactgtttctcaattggaagacacatcctttcctttccgttaccaattgctggtaaaatccgattcaaaattctagtggaaaaacaacagcaacaacaacacaaaaaacgctaaccctatgaacccccaatgtcaaaatgatctatcgccaaaaactcttcagcgtctagaaagtttagctattggatttacgcgttcctatctctccttccaaaaataacaactcgtagctctttcaagttattctacttagtctcatcttatcatttctgtaggaaagtgattaataccctttttttcatgacattgcctctaaggccccaagaaccacacaggagaggggagctgccgccttggagacttcgggtgggggcagagcgccgcgccgaggtggaggtaggagccccgagggcacagcgggaaggaaggcggaggaggctgccgggagctcggcctccgagcaatcccccgcctcgctgggcttccatgcttgctaaagggtcgagatgaacgggcaagggagagagagggcgaggaaaaataaaaaagagaggggcgagtgggacgaggggcccgggagcagccgcggccgcgttacctcagagcccagaggcctgggggaggggccctcggcgctgccgcggactccggggctcccggcgggcaggtcctgcagggccgcggagcgagaaggctgatgtctcgggtgtctcggggagttctcccgacgtcgcctgctgtttgtcagtcgccagctgtgacacggtagcgggccgggtcacgctgcccccggccgccaggcgggttgcgggaggggtcgcggtgccgcctctccaggtccggtctggcccacatcactggggccgggggtttattgttccggagagccacaggcacggtcggcctggacccgccgggcagtgttccgctctgcccgtcccggcctggggtcaagccaacagctgcaaggcacgccgactggcggcagatcggtggcccgtgtgtgtctctttaaggggccgggcctgcgaagctgaggggcgggtggggtgtgcgtcgctcccggtgtgagggtgagagggagagagcggctggcgggcgtccgagggagggagggagcgacgagcgaggtagcgacgcgggccgcccctgccgccgccgccgccgccgccgccgccgccgcggtcggacctgcggcctcctcccctcccctcccccgcgtcgccctgctgcggggagggggctcgcgtcgccgtctccagccgctcccgatgaagcagctgcagccgcagccgcctccgaagatgggggatttctacgacccggagcacccgacccctgagtaagtatcagctccgcggccccccgctgctgtcggccgccttatccccagccgagggcggcgcgtcctgacgggtggcggcgcgggccggcgcgaggagtaacaggcccacggtggcctcgcgcggtcggtgtcgggagcaggcccgcgccgccacttcgagccgcttggccggggccgcagcaggcccgcggttgggcccggcgttggcgccgctgctcgtgtcgcggcggcggttgggccgggccggtgggggaggggcggccacggtccctacggttaccgccgtgtccgcaccgacccggccatcccggggctcggcggtcctctcgggctcctcgtggctcgtccgggccccgctgctagccaaagggcagagtcggaggagctgccggtgccgggcccggcaagagggcgccggtgagggtaggccgcgaatccccgggctcgggtggaagctcgacccgtcgcccgacc

SEQ ID NO: 29475 - DNA, 2300 bp, Homo sapien
gacgtttactgaaagtttaagcctttaacaaatagctcatttaatcctcacaataatgagaagacctgtcggcagcaatattctcattttataatgagaaaaaccacagggaaattagtaataatcacggtgtgtaaaaaaatggccttgggagattcgaacctagggagtcagatggaccctggacctccatgctaaccctaaaggtaccaggaaaaaaaaaaacaaaagccaaaataatccctaagtgaaaaacaatgattataaaacactaatagacactgtagcctacatacatataaaggctattttaaaaagttaaccactgaaggatgtttattctttcgtatcatatttcagtttttttttgttgttgttgttttatttttttgagacggagtctcgctatatcgcccaggctggagtgcaatggtgcgatctgggctcactacaacctccgcctcctgggttcaagcgattctcctgcctcagcctcccgagtagctgggattacaggcgcaccaccacgcccagctaatttattttttattttcattcatttatttatttttttgagatggagtcttgctctgtcgccaggctggagtgcagtggcacaatctgggcttactgcaacctccgcctcctgggttcaagcgattctcctgcttcagcctcccgcgtacctggaattacagccgtgcgccaccacgcccggctaaattttgtatttttagtagagatggggtttcgccatgttggccagtgtggtctggaactcttgacctcagttactccgcccgcctcggcctcctaaagtgctgggattacaggcgtgaaccaccgcgcccggcccactttcagtttttaaccactgtttctcaattggaagacacatcctttcctttccgttaccaattgctggtaaaatccgattcaaaattctagtggaaaaacaacagcaacaacaacacaaaaaacgctaaccctatgaacccccaatgtcaaaatgatctatcgccaaaaactcttcagcgtctagaaagtttagctattggatttacgcgttcctatctctccttccaaaaataacaactcgtagctctttcaagttattctacttagtctcatcttatcatttctgtaggaaagtgattaataccctttttttcatgacattgcctctaaggccccaagaaccacacaggagaggggagctgccgccttggagacttcgggtgggggcagagcgccgcgccgaggtggaggtaggagccccgagggcacagcgggaaggaaggcggaggaggctgccgggagctcggcctccgagcaatcccccgcctcgctgggcttccatgcttgctaaagggtcgagatgaacgggcaagggagagagagggcgaggaaaaataaaaaagagaggggcgagtgggacgaggggcccgggagcagccgcggccgcgttacctcagagcccagaggcctgggggaggggccctcggcgctgccgcggactccggggctcccggcgggcaggtcctgcagggccgcggagcgagaaggctgatgtctcgggtgtctcggggagttctcccgacgtcgcctgctgtttgtcagtcgccagctgtgacacggtagcgggccgggtcacgctgcccccggccgccaggcgggttgcgggaggggtcgcggtgccgcctctccaggtccggtctggcccacatcactggggccgggggtttattgttccggagagccacaggcacggtcggcctggacccgccgggcagtgttccgctctgcccgtcccggcctggggtcaagccaacagctgcaaggcacgccgactggcggcagatcggtggcccgtgtgtgtctctttaaggggccgggcctgcgaagctgaggggcgggtggggtgtgcgtcgctcccggtgtgagggtgagagggagagagcggctggcgggcgtccgagggagggagggagcgacgagcgaggtagcgacgcgggccgcccctgccgccgccgccgccgccgccgccgccgccgcggtcggacctgcggcctcctcccctcccctcccccgcgtcgccctgctgcggggagggggctcgcgtcgccgtctccagccgctcccgatgaagcagctgcagccgcagccgcctccgaagatgggggatttctacgacccggagcacccgacccctgagtaagtatcagctccgcggccccccgctgctgtcggccgccttatccccagccgagggcggcgcgtcctgacgggtggcggcgcgg

SEQ ID NO: 29476 - DNA, 2300 bp, Homo sapien
gtcctcgtcatgtagactgtgaggatgcgcactggtctattcatccaaacctgaccactttctatctctaggcctctgctcaggtgaccccctgcctggagtacccttttctgtcctcctatgctgtctgccttcctgcgttccactctctctccaaggctcagctgaaaatcagcttccttcctgaagccctcctggttttccttcacatgaaacgtttctgccccttccacaaaccacagtgatccccctccttcacgcagttttcagggtctcgatcagccatgtccaacagagatacaatgcaaactacaaatgtaagccatacatgtaattttatattttctagtaaccatgtaagaaaagctaaaaagaagcaggtaaaaataattttaatatgttttatttaaattttaacccaagatatcaaaaatattatggtttgtttgtggggttttgtttgttttgttttgttcttttaagacagggtcttgctctgtcatccaggttggagtgcagtggcacagtcatagctcactgcagcctctaccttctgggttcaggcaatcctcccacctcagcctcctaagtagctggggctacaggtgtgagccactgaacctggccccaaaatgttataaattcaacatgtaatcaacatttttaaattattgagatattttaccatctgacatggtttggatctctgtccccacccaaatctcatgttgaaatataatccccaatgctggaggtggggcctggtgggagatgattggatcatggggatggacttcccctttggtgctgttctcatggtagtgagtgagttcttatgagatctggtcatttaaacatatggcacctccctgcccctcactttcttcctcctgctcctgccatgtaagacgtcttctcctgctttgccttccaccatgagtaaaagctccctgaggccgcccccaaagcagatgctgccatgcttcctgtacagcctgtggaaccatgagccaattaaacctcttttctttataaagtacccagtctcaggtgtgagaatggactaatacaccttcttttttggtgctgggtctttgaaatctggtgtgcattttacacttgcattatatgtcagtcaggaccagccacatctgagtgctccatagctacatgtggccagtggctgccatagtggccagtgcaggtctagcccctgagcagcgtctgctcaaactttaccctgtgaagacacccctgagccattcctgggagggcagatgctcaggccccctgatgaatagactcagcagtctgggtgggaatgggtagttctgctgcatttggaggcaggggcctctagccacacatgctaagaaaggctgctctggggcgtgaccgatctgttaatgaagcctggactctgcccaccagccttagtcaagtgtcctccccaccatccacagggagtctccacaggtttgggctgaaaggcttcactgccagcacagagatgggctcctaccagttttgtcccctgtatacacttccctcagggacctctctgctgccaagccacaaggccatgtcaggacaggaggcgtactgggctctctcagcctcccttcagcaaggcttatggctatcatgtctaaccctgcatccaacatctggggcctggacctcccagagtggcctcagcttgctcagcccttcattctgtgagagaaggggcagataatgggtaggtaagtgtggggaaaagcaagagagatcagattgttactgtgtctgtgtagaaagaagtagacataggagactccattttgttatgtactaagaaaaattcttctgccttgagattctgttaatctataaccttacccccaaccccgtgctctctgaaacgtgtgctgtgtcaactcagagttaaatggattaagggcggtgcaagatgtgcttttttaaacagatgcttgaaggcagcatgctccttaagagtcatcaccactccctaatctcaagtacccagggacacaaaaactgcggaaggccgcagggacctctgcctaggaaagccaggtattgtccaaggtttctccccatgtgatagtctgaaatatggcctcgtgggaagggaaagacctgaccgtcccccagcccgacacccgtaaagggtctgtgctgaggaggattagtaaaagaggaaggaatgcctcttgcagttgagacaagaggaaggcatctgtctcctgcctgtccctgggcaatggaatgtctcggtataaaacccgattgtatgc

SEQ ID NO: 29477 - DNA, 2300 bp, Homo sapien
tccacctgcaataaagtcttcctttgcacacccgtcttgtgagcctgctactcagcagccctttaacacccaaacatttagggaccccatgccatcttgcacttactgaaatactgcttgttaccattcttacgtcgcttcatttgagtgggtttcagttcccaaaattaaattacaagctgcttgaaggcaaggattgtgctttttatctcttttgaatcccctcacaatgtccagggcagagcccagcacagagtaggtattcaggaaatggcggtggttggtgatggtaatggctggaagtcagagggcagctgaatcttcatatgtgggtctatcttcagtcactactgagagagtcccaaggggcatatgatgtcactccccttccatgacaactccaaccaaagcccacagcccttccaggaggacacttggtttccaggtgcaaaaatccacatccagcacctcaccacacgctttttttgtttttgtttttgttttttgtttatttgtttttgtgacagggtctcactctgtcacctaggctggagtgcagtgaaacaatctcggttcaccgtagcctccacatcctgggttcaagcgatcctcccacctcagccccgcaagtagctaggactacaggcgtgcaccaccacgcccgggtaatttttgtatttttcgtagagacagggtttcgccatgttgcccaggctggtcttgaactcctgagctcaagcaatccgctcacctcagcctcccaaagtgctaggattacaggcgtgagccacggcgcccggccccctccctttctccctcaggaccttgtggggaatgtctctccttggggaaccaccctttgatatttctggtataacaaagcaagtctctgaatggccaccaggagacttctgtgttaaggcgctcgaggtttcctcatttgtctttagtgggaatgaacagaattggcaacaagcagccatgaagactagacaagaggaaagggagcgtttggtggggtggaaggcaccaggtgggtccctatcttccagtgctcccgtccagatgaggggctgtcatggggaaccctcatagctacccgtagcggcagcaccaacacccgaatccaaaacactgggtccaactgcacctggccttggctgaacaagactaggatgcaggcaaaactagactttctcctttttctcacccaatgtgccggacccccgcgtggagcctgggcggcagtgggctttggacccattccggtccctctctggagaggtttcctcacctgtaacacgaagggctccgactggtgatcccaaagccccctctagttcgaaaactgactagtacggaagagtccagacgacctctggctccctgcctcacggcctctatgtcctggacgcgacgtgggacccctttgtgggaccaatgaacattagctccgaagaccgtaagccgcggtcaggttgaaaggactcccgcgacgtcgagccctccttcgcctgggtttcagagatgagcgacccagctgggaacccccagataaagcggtttttggaccccagccactttcagcagtccgggcgcacacccttttcccgtctccccactcccaccggcgagcagcccctgctcaccgttcaccaggcagcgacgctcccgggacgcgactgccgcaaccgaaaccacctgcactccccacgcggggctgcctggctgtgtacatagtcgccatggcaacgggtcgcttccggggattccggaagtgtcggggtggcggaaatgaagtccgaggtcctacgtcgaggatacgggtgaggtcatggccgaatcgggaagacgagagatggggccgattgatctagaaagacttcggcggatgcacatgcgaagtcaaggtcgagatagcgagggaacgaaggccgcacatgaaccaggaagcggagtggcggggcttccggcgccgaggagattcaactacggcggccgcggaggcccgtccgattgctgctccgcgctccgagcggctgtcggcgtgcgctatcgccccgccctggttagtgtctagccggccggcgaggcctgcgcagttgcagcggccggggaagatggtggaggacggcgcggaggagctggaggatctggtgcacttctccgtgtctgagttgcctagtcgcggctacggcgtcatggaggagatccggcggcagggcaagctgtgcgacgtgaccctcaaggtaccgcggactgggcggcagcgggctgagggaaaaggggtcgagcgggga

SEQ ID NO: 29478 - DNA, 2300 bp, Homo sapien
agcctgtgccacacagcgagactctgtctcaaaaaaataaaaataaaagcaaaaaaaccgaggcttacagagattaagtaacttgctcaaggttacaactaggattttaatccaaatccttctgctttcaaagccatactcaaccatcctactctaccatctccagaggtctgactcaactatgttgcagaagaaaagtttccttaaccatgtagaaaataagaagagcaggctgggcgcggtgactcacgcgtgtaattctagcactttgggaggccgagacaggcagactgctgaagctcaggagttcgagaccagcctgagcaacatggtgaaaccctgtctctactaaaaatagaaaaaattagccaggggtagtggtgcgcgcctgtagtcccagctgctggggaggctgaggcaggagaatcgcttgaacccaggagagagagtttcagtgagccaagatagcgccactgcactccagcctgggcaacagaacgagactccgtctcaaaaaaaaaaaaaaaaagaaaaaagaaaagaagagcaaaagaatctctgcatagttttattttttcttttatttatttatttgtgtgtgtgtgtgtgtgtgagagagacagagagaaataggagaaataggatcttgctgtgttgcccaggctggagtgcagtggtgtgattacaactcactgcaggcttgacctcctaggctcaagcgatcctcccacctcaccctcctgagtagctgggactacgggcacaggctaccatgcccagacaattttttattatttgtagagacagggtctccctacatagcccaggctggtctccaattcccccactcaagtgatcctctcgcctctcaaagtgctgggattacaggtgtgagccaccatgcctgccctgtttgttttttaaacagggatcacgcacagatgctgagagctttccagctaaagcccaacagggagccccactgatcatctccccaaccggacgtctccacatggttcggtggcttggccaggcagcagcacagcatgcctcttcctcatgaaaagacccaggcacaggagggaggctggctctagcgaccagaatgctggtggggaacaggtggttaagatatctttccctcttaatatcagtcagcatccctctccccacgcggccagcaggcccagccccggggacctttgtggtggtgagtggtgccttccagtatggggcagggtggcttcccacctcaaaaattttccagagaagattttaaaagctcttaagagacaaagtagtaattcaacaattaagggcaatgattcctaaggagaagccttctcttctagaacagcacagccaagttcgacaggcacaaagaaatatctgtagtgacaagagaaggttcttcagtggtgcccatcagcatgtggagccggccaccgcccctgcctccatagaaggtaagtccattttctcttgtctgcatgacagaaaaaggaggctgtcacccgtgtctcccactccaagggcctaagcggcgcacctctcaacctttcctttcaagggctgaaaggttgtcctcttcctctccccactcggccccgatccccttttgctcggcacctctctccccactactcggcccccctcacacctcttctccccacccctctccctgctagacctctctttctctgtcccccgcccctttttactccccgctcgaccccttttccctcagcccgctgccgcccagtccgcggtaccttgagggtcacgtcgcacagcttgccctgccgccggatctcctccatgacgccgtagccgcgactaggcaactcagacacggagaagtgcaccagatcctccagctcctccgcgccgtcctccaccatcttccccggccgctgcaactgcgcaggcctcgccggccggctagacactaaccagggcggggcgatagcgcacgccgacagccgctcggagcgcggagcagcaatcggacgggcctccgcggccgccgtagttgaatctcctcggcgccggaagccccgccactccgcttcctggttcatgtgcggccttcgttccctcgctatctcgaccttgacttcgcatgtgcatccgccgaagtctttctagatcaatcggccccatctctcgtcttcccgattcggccatgacctcacccgtatcctcgacgtaggacctcggacttcatttccgccaccccgacacttccggaatccccggaagcgacccgttgccatggcgactatgtacacagccaggca

SEQ ID NO: 29479 - DNA, 2300 bp, Homo sapien
agagagataaagaagaaaaaaagttgtaactatatactgtctcaggagagatttgagaaaatattgcattcatgaaagatgaacaggattcttttaaaaaggaagcttttgaaaacaagaactctaggaaattaaaaatatgatagccagtataaaaacctacaacacagaaagattgtaagatagggttgaagaagtttcctcactgatagaccaaatgaaagagatggaaagtgaggaagaacaataagaaaattagaggattattccaagaaatctaacacctgactaatagaaatttctgaggagaaaaaattacaataggagggaggaaattatcaaggattaaatggtgtaaagagatttttccagaactgaaataatgtctgtagattgatacagcacaataaaagaaaaccaataccaagatacaatactgtgaaattttagaactacaagaatacagagaaaatcctaaaggcttctagagagcacagttacatacttagagttaggattcaaaatagcattggatttctcaataacaacaaactaggccaggtgtggtgactcacgcctgtaatcccagctctttgagaggctgaggtgggaggattgcttgaagccaggagtttgagaacagcctgagcaacaaagcaggacctgtctgtacaaatatatatatatgtatatatatacatatatacatatatatgtatatatatacatatatacatatatatgtatatatatacatatatacatatatacatatatatgtatatgtgtgtatatatatacatatatacgtatatatgtatatgtgtgtatatatacatatatacgtatatatgtatatgtgtgtgtatatatacatatatacgtatatatgtatatgtgtgtgtatatatacatatatacgtatatatgtatatgtgtgtgtatatatacatatatacgtatatatgtatatgtgtgtgtatatatacatatatacatatatatgtgtgtatatatatacatatatatatttttaaacatagccaggtgcacactagcatgcctatagtctcaactactcaggagactgaggcaggaggattgcttgagctcaggaattcaagtccagcctgggggacagagtaagaccccatctctaaaaacaaaagaactagaagacaatggagcaatactttcaaaattttgacaggaaaaaagtctaaactttgaattttttaaccaactaaattattatctaagcttgagggtagtaaagacattttcagacattgtacatagaccccttcttatgaggctctactagaagacacatttttatttgtttgagatggaatctcgttcttcttgcccaggctgagtgcagtggtacggtgtctgctcaccgcaacctccgcctcccaggttcaagtgattcttctgcctcagcacctcgggtagctggaattacaggtgtctgccaccacgctgggctaattttttgcatttttagtagagacggggtttcaccatgttggccaggctggtctcgaacccctgacctcaggtgatccacccgcctcaggctcccaaagtgctgagattacaggtgtgagccaccatgcccagcctaaaagacactttctaccagaacaagtgaataaataagaaagaggactacgtggggttcaggaaacgggggtgttagtataggtgagggaaacagaattcccaggaagagttccagtagataatgtctcaagaaacagacaacttaaaacaaacaactgatagagtacctgactgaatatattaaccagagttttatgctctagggaaaagaaaaattatacaaaaaggaaatatatactgacagtatacagcatggcttggctacaaataatatttacatagacttaatgcaactcttcatattaatttaaccaaaatttgacctaattatattggaaagatagggagagtgtaggggatagtacatgaagaaaggtatcaggacaaattcttaatcttccataataggaattagattagtaatataatagttatcttttgccgcataacaaactaccccaaaatttgtgacttttttgtttttgagactccatcccaggcaggagtgcagtggcacgatcttggctcactgcagcctctgcctcccaggttcaagcgactctcctgccccagtgacccaagtagctgggattacaggcatgcgcccactaatttttgtatttattgtagagacagggtttcatcatgttgcccaggctgctctcaaactc

SEQ ID NO: 29480 - DNA, 2300 bp, Homo sapien
cgcccaggcaggctggagtgcagtggcaacaatctcagctcactgcacctctgcctcccgggttcaagcaattctcctgcttcagcctcccaagtagctgggattacaggtgcccgctaccatgcctggctaatttttatatttttagtagagatggggtttcaccacgttggccaggctggtcttgaactctggcctcacatgatcctctcaccttggcctcccaaagtgctgggattataagcatgagccatcatgccaggcctttttttttttttttttttttttgtgagacagagtctcactctgtcacccaggctggagtgcgatggcacaatctcagctcactgcagcctcagcctcccaggttcaagcatttctcctgcctcagcttcccaagtagctgggattacaggtgtgcgccatcatgcctggctaacttttgtatttttagtagagacggggtttcactatgttggccaggctgttctcgaactcctgacctcagatgatctgcccacctcggcctcccaaagtgctgggattacaggcgtgagccactgcgccaggcccgaccttttttttttttttttaaagtgagagaaattacagcatatttgactgctgttgggagttttccagaagagagggaagaattgataatattggagaaatgggagagcagttgttggaatgatgttctggaataagtgaggacagtctagggcataagggtgtgcatctttgataggagcacaagccatccatatccacagtagcaggagggagagctggggcacacgcccagggacgggggacaggtagattcttactgaaattctcttctgattttctattttctcacctgagagtgaggatgagggacgaaggttagaaacttaaggaaggccgggagcagtggctcacgcctgtaatcccagcactttgggaggccaaggtgggcagatttgttgagctcaggagtttgagaccagcctgggcaacatggcaaaaccccatctctactaaaagcacagaagttagccaggcctggtccagcttaaactcctggcctgtaatcccagctacttgggctgaggtgggaggattgcttgagctgggaggcagaggttgaggtgagctgagattgcgccactgcactccagcctgggcgatggggcaagaccctatctccaaaaaaaaagaaagaaagaaagaaaagaaaaaagaaatttgaggagggattaaaaggtatgatttattttcctctttcctctagaaaagggggatgctagagaggtgaagcgggcttgataggagcctgggagaaaagtggatcctgggcttggcagcatagacactgtggtttcgaggaaaaagcctcattccaaaaactaggtgtcctgtccctagctcttaaactaattaatatgacggggggcgggggggcagctcacatttctttgagtgatacatttcataagggctgtagggctttagagggagaggtccttgtggttggagccattaagaaaggctccttggagaacatggatctagagccaggccttaaaaataggggagtgggtttagatgaagaggaggagatgagggcattttagatgaggggggacagtgtaaacaggagaaccagcccagccttgccggagtacagagagggtgatggagggagtttagagggagcaggggtacaggagcagcgggaagggaaacaggcattttgttttcacagaaagtaataagatgccattgatgatttttcactaggaaatcataatcataatgaaattcaggaagctgttctagtagcctaggaagtagagagaaatcagggatttcagagacaagtaggagaaaagattgatgggcccaagggactgcttcagtataggaagtggaggcattgagattggaggcctggggtgtggcctctgggtgggaggatttgctgccagaacatccactctcatgacaggtctttgaagctgcattggcctgggtcagatacgaccgggagcagaggggtccctacctgcctgagctgctgtccaatatccgcctgcccctctgtcggccccagttcctttcagacagagtacagcaggatgacctggtgcgttgctgccacaaatgcaggtgagtgagggtggacctgcacaggacactgccaaaggtctaagcagggaagaggagttggccacctgttccagttctggaaagaaagcatttagagtgatcagtctaattcatggcacacagattggtctgccctctgtcta

SEQ ID NO: 29481 - DNA, 2300 bp, Homo sapien
tctccattctcccctcccctagcccaacagacaccattctactttctgtctccataactctgactaactaggtatctcagataagcagaatacagtatttgtccttttgcaactggcttatttcacttagcataatgtcttcagggttcattcatgttgcagcatgtaacagaatttcattcctttttaaggctgaataatattccattgtatgtacacacatcatctttattcatgcatccatccatcactgcatggattgcttctcttttggctactgtgaaatggtactgctatgaacattcatgtaatttcattttcttctgctctaactccaactggaatgaagctaggcccttgactaagtcttgaaagggtttgaggtctcacaacaaagggacctgggctctaccttgtgggtgaagcctgtcttagaatcccagatcccacccacatcccacggtctccataatttttctttttcttttcttttttttttttttaacacatggtttcacttttgtcgcccaggctggagtacaatggcacaatcacggctcactgcaacctctgcctcccgggctcaaggttcctcccgcctcagcctcctgagtagctgggactacaggcgtacatgagccaccatgtcctgctaatttttatattttttgtagggacggggtttggccatgtgggctaggctggtcttgaactcccgggcttaagcgatccgcccgcctcggcctcccaaagtgatgggattacaagcgtgaaccaccgcacccggcatcgtggtctccacatttcatccagaacgagtcaaaggccttgacctcgagcttaacacggacctgaacctttgctcttcccttgttttcccttatcagtaaacagccccacagccacccacctgcacaagccagaagcttggaaatcatattcgacgtcctcatgcccttacatccatccattccaagttctgatacttttgtctccaaaatattcctcaaatatttctcaaagtgggcaaaatatttctttgctcactttttacttccctctgctccaagccacaatcacctgtctcctggaagactacaaaaggctcactgatctcccagctcgcacttttgcactcactatctccaggccattctctgttatttctattgttactattattattttgagacggagtctcgctctgtcgctcaggctggagagcagtggcaagatctaggctcaccgcaatctccgcctcccaggtcaagcgattgaacctccagcctcagcctcccgagtagcctattatttatttctaaaagtaggtgatacagccatatgatttaacaattcctgctctataggtcccctctccagaggcaacaggtgctctccattccgtggtctccttccagatactgtgggcgtccctgggtgctcacctggccgtataccttcccccacccacttccccacagggcccggggcctcctcactccgcttgagaccctccatccaggcgctccctccctatcgtccgtctcccttgggcactgcccggcctcccaggctgggctgagtaggccagtctccggtcagtgattctgttccaaagctcgaaagccttcgcagcactgggactgaaacccccagctctcagccccgactccttcaggccaggtgctccctccgcaccctctctaaggcccgttttcgcgtcatctctttccagcggcccgcccgccacgtcatctctaccacagcaccagtcctccacggctcttgacaatacgtgggagggcaagttcataggtgaggtctcatgctcttcctaggagggaggagcgcggcgggcgggacccgcagctgggcttggcccgggagcggggaataagctcgctccgcgcctctcagtttagtggatgaagactactatcccagaagccgtttcgcctcgggctggcgagctcctccccgccctactccctccgcgcgaagaagactgagcatgcgcaacagggacagcgcctgcgcaaaagactacgcgagcgggtggctgggttcactgcaactcccggcaggccgctggcatttttcattccctcccgtgaccagtgacttccggcacgaaggggcggggctgggctcgtggctgagccagcagctgcagcagctacgggagtggccgggtggccggcgggtgccagccgccatggaggccgtgccccgcatgcccatgatctggctggacctgaaggaggccggtgactttcacttccagccagctgtgaagaagg

SEQ ID NO: 29482 - DNA, 2300 bp, Homo sapien
ccctgctagtcagccttagcctggctcaagggagaagcttggggagccccagagttctgtgcaaacatccctgaagcttcaagattggaccccttggacaggagcccttccatcctctgccaaatgcagagcaggagactgagggctgggcaggacttctgagtttccctgttccctccagcttgggtgtccttggactcgttgccctggttctcagagccatgttgtcctgattgtggataacagcagtgccccctctgtctcaccttcacatgggtgtgagcagccccaggcccctaacactgtcccctccctccccaggagcgctgcactccatgctgggggccatggacaagcgggtgtctgaggaggtgaggagaggggcagtagtggaacatgtggacataccagggaggggcagcctcccaagtatggatgaatcctgacccatggagtggacacaggccatcctcccactccctcccagggcatgaaggtctcctgtacccatttccagtgcgcagccggcgccttcgcctacctacgggagcacttccctcaagcctacagcgtcgacatgagccgccagatccttacgctcaacgtcaacctcatgctggtgaggaggcgccctggttggagtggagttgaatccagggaaggggatggccagggagggggcagttgggcctggatcctggaccaaggcagtgagggacaagcaaggggccttggctttgttgaatcaggagcaccgtggtgctgcttggagtgggggcagctgggggagagggcagtgaagagggatccctcagtctgcccctggggaaggataaagggaaggggaagcgggaggccttgggtgagcgagggagtgcacctcacgtgtcgccccagggccaggctcaggagtgcctcctggagaagtcgatgttggacaacaggaagagctttctggtggcccgcatcagtgcacaggtagggacggggctgaggggaggccttcactttactgctgactcccccactcattgggccccaccctgttctcaggtggtagattactacaaggaggcatgccgggccttggagaaccccgacactgcctcactgctgggccggatccagaaggactggaagaaacttgtgcagatgaagatctactacttcgcagccgtggctcatgtgagggcctggggccccagggcggggcagggcggggctgagtggccacagctcaggaagcaagtcgtggcgtctcttcttctttcccagctgcacatgggaaagcaggccgaggagcagcagaagttcggggagcgggtgagctacagcgaggaggggactggggaccaatggcagccttcagtgagatgccggtgtgctcccgctccttacacaccagggggtggccttctctgtctcaccctggccatcaccctgctggaggcctggtgtcttaagtgttgtcccatctgtgcagccctcgtccctcggggtctgaggaggtggggcaggctccctacagagcaggtggctggggcagggtgtggcgccaccttgctgctgttggctggggtggtgcccggctgcctcctgagctgcttgtcatctgatggacaggcagggccgggtgggaggcaggaggagaaagggtccaagcagaggaggacagagcaggctttcctgccaccctccacaggttgcatacttccagagcgccctggacaagctcaatgaagccatcaagttggccaaggtaaagctgaggaaggcctggctgccctgagggtataggagcaagcccggtaggactgagggggtgtcctggtgccagccttggttagtgctaaggccccacccctgtccctaaccccacagggccagcctgacactgtgcaagacgcgcttcgcttcactatggatgtcattgggggaaagtgagtctgtgggggtggccctggttccctctttttgtgaagggtcttgtccctctgctggcatctacatgggaagtaggttctggatccccactgacaccccgtgactgcccactccccctgctcctgatccccaggtacaattctgccaagaaggacaacgacttcatttaccatgaggctgtcccagcattggacactcttcagcctgtaaaaggtcggggagctgagaggtgggggcagaggtgacggtggggtggggacaggacacaggaggctgcctcaaggactctgcgtgggcctgatctccacaattcccacccccccaggagcccccttggtgaagcccttgccagtgaa

SEQ ID NO: 29483 - DNA, 2300 bp, Homo sapien
tgagaccaggccagacctggtagtaggggtccgaggtcacaatttgctctctgctgagacctcagattgagtggtgaggcttgccctagcggctcctttgacatggtcagagttggatcagcacccagcacccacctggccctgttgctccccacagccagttcatggattcaatgcagttggatcccgagacggtggacaaccttgatgcctacagccacatcccaccccagctcatggagaagtgcgcggctctcagcgtccggcccgacactgtcaggaaccttgtacagtccatgcaaggtgagtaaggggcagagcaagcaggtggaagggagtgtggaggtcatctgctgtggcctcctccgtgtccctggtcactgaggatggaggctgcacccctctaggccctggcttgggcatccacacccactcctctgaatcagcatacctcttgcaccctgctcagtgtgcgctgggcctcacttaagccctgacctgagggggcggttctgtctcttgggggaggggcccatgggtgcccggtcagcctgcctcaggggctgcctgtacaatccacaaccccagtgctgtcaggtgtgttcacggatgtggaggcttccctgaaggacatcagagatctgttggaggaggatgagctgctagagcagaagtttcaggaggcggtgggccaggcaggggccatctccatcacctccaaggctgagctggcagaggtgaggcgagaatgggccaagtacatggaagtccatgagaaggcctccttcaccaacagtgagctgcaccgtgccatgaacctgcacgtcggcaacctgcgcctgctcagcgggccgcttgaccaggtccgggctgccctgcccacaccggccctctccccaggtgagccccaccagaccccattgggagactcgagctgggggtttctctggcctcactgaccactgctgcccacagaggacaaggccgtgctgcaaaacctaaagcgcatcctggctaaggtgcaggagatgcgggaccagcgcgtgtccctggagcagcagctgcgtgagcttatccagaaagatgacatcactgcctcgctggtcaccacagaccactcagagatgaaggtgggctgggtgagcagggtagaggggctctggctccgggccccacccttaggagtcgaggccctgagtgtccgtccctggcccccaccccttcctcagaagttgttcgaggagcagctgaaaaagtatgaccagctgaaggtgtacctggagcagaacctggccgcccaggaccgtgtcctctgtgcactgacagaggccaacgtgcagtacgcagccgtgcggcgggtactcagcgacttggaccaaaagtcagtgcccagtcctctgctctttcccggagccacctggagcccagccccatggttcacctggagctggcccttctgcccaccaggtggaactccacgctgcagaccctggtggcctcgtatgaagcctatgaggacctgatgaagaagtcgcaggagggcagggacttctacgcagatctggagagcaaggtggctgctctgctggagcgcacgcagtccacctgccaggcccgcgaggctgcccgccagcagctcctggacaggtttgtgtggccctggggctgtggtgcggctcgggtccagacaggctggggtgatgggagcctggccccactttttccttgcctgtcgcacagggagctgaagaagaagccgccgccacggcccacagccccaaagccgctgctgccccgcagggaggagagtgaggcagtggaagcaggagacccccctgaggagctgcgcagcctcccccctgacatggtggctggcccacgactgcctgacaccttcctgggaagtgccaccccgctccactttcctcccagccccttccccagctccacaggcccaggaccccactatctctcaggccccttgccccctggtacctactcgggccccacccagctgatacagcccagggccccagggccccatgcaatgcccgtagcacctgggcctgccctctacccagcccctgcctacacaccggagctgggccttgtgccccgatcctccccacagcatggcgtggtgagcagtccctatgtgggggtagggccggccccaccagttgcaggtctcccctcggccccacctcctcaattctcaggccccgagttggccatggcggttcggccagccaccaccacagtagatagcatccaggcgcccatccccagccacacagccc

SEQ ID NO: 29484 - DNA, 2300 bp, Homo sapien
gctgcctgtacaatccacaaccccagtgctgtcaggtgtgttcacggatgtggaggcttccctgaaggacatcagagatctgttggaggaggatgagctgctagagcagaagtttcaggaggcggtgggccaggcaggggccatctccatcacctccaaggctgagctggcagaggtgaggcgagaatgggccaagtacatggaagtccatgagaaggcctccttcaccaacagtgagctgcaccgtgccatgaacctgcacgtcggcaacctgcgcctgctcagcgggccgcttgaccaggtccgggctgccctgcccacaccggccctctccccaggtgagccccaccagaccccattgggagactcgagctgggggtttctctggcctcactgaccactgctgcccacagaggacaaggccgtgctgcaaaacctaaagcgcatcctggctaaggtgcaggagatgcgggaccagcgcgtgtccctggagcagcagctgcgtgagcttatccagaaagatgacatcactgcctcgctggtcaccacagaccactcagagatgaaggtgggctgggtgagcagggtagaggggctctggctccgggccccacccttaggagtcgaggccctgagtgtccgtccctggcccccaccccttcctcagaagttgttcgaggagcagctgaaaaagtatgaccagctgaaggtgtacctggagcagaacctggccgcccaggaccgtgtcctctgtgcactgacagaggccaacgtgcagtacgcagccgtgcggcgggtactcagcgacttggaccaaaagtcagtgcccagtcctctgctctttcccggagccacctggagcccagccccatggttcacctggagctggcccttctgcccaccaggtggaactccacgctgcagaccctggtggcctcgtatgaagcctatgaggacctgatgaagaagtcgcaggagggcagggacttctacgcagatctggagagcaaggtggctgctctgctggagcgcacgcagtccacctgccaggcccgcgaggctgcccgccagcagctcctggacaggtttgtgtggccctggggctgtggtgcggctcgggtccagacaggctggggtgatgggagcctggccccactttttccttgcctgtcgcacagggagctgaagaagaagccgccgccacggcccacagccccaaagccgctgctgccccgcagggaggagagtgaggcagtggaagcaggagacccccctgaggagctgcgcagcctcccccctgacatggtggctggcccacgactgcctgacaccttcctgggaagtgccaccccgctccactttcctcccagccccttccccagctccacaggcccaggaccccactatctctcaggccccttgccccctggtacctactcgggccccacccagctgatacagcccagggccccagggccccatgcaatgcccgtagcacctgggcctgccctctacccagcccctgcctacacaccggagctgggccttgtgccccgatcctccccacagcatggcgtggtgagcagtccctatgtgggggtagggccggccccaccagttgcaggtctcccctcggccccacctcctcaattctcaggccccgagttggccatggcggttcggccagccaccaccacagtagatagcatccaggcgcccatccccagccacacagccccacggccaaaccccacccctgctcctcccccgccctgcttccctgtgcccccaccgcagccactgcccacgccttacacctaccctgcaggggctaagcaacccatcccggcacagcaccacttctcttctgggatccccgcaggttttccagccccaaggattgggccccagccccagccccatcctcagccccatccttcacaagcgtttgggcctcagcccccacagcagccccttccactccagcatccacatctcttcccaccccaggccccaggactcctacccccacaatccccctacccctatgcccctcagcctggggtcctggggcagccgccaccccccctacacacccagctctacccaggtcccgctcaagaccctctgccagcccactcaggggctctgcctttccccagccctgggccccctcagcctccccatcccccactggcatatggtcctgccccttctaccagacccatgggcccccaggcagcccctcttaccattcgagggccctcgtctgctggccagtccacccctagtccccacct

SEQ ID NO: 29485 - DNA, 2300 bp, Homo sapien
gacttctggctcatggtccatgagcagaaagtgtcagtcattgtcatgctggtttctgaggctgagatggagaaggtgagaagagggggtgggtgcccacgagggcagtgtggggtggcagggcaggggatcctggaaaaccaggtctgtcttggcttatctgtccctcagcaaaaagtggcacgctacttccccaccgagaggggccagcccatggtgcacggtgccctgagcctggcattgagcagcgtccgcagcaccgaaacccatgtggagcgcgtgctgagcctgcagttccgagaccagagcctcaagcgctctcttgtgcacctgcacttccccacttggcctgagttgtgagtccactgctctggatggtggttgggggtctaagtgctgtccagtccttggtgctgggagggatgagagcctcaggtcaggcctggctcataggctcttcctggccccatcctgtcccacagaggcctgcccgacagccccagcaacttgctgcgcttcatccaggaggtgcacgcacattacctgcatcagcggccgctgcacacgcccatcattgtgcactgcaggtagagggtgggcctgagggtctctcctctatgggctcttggcctagcctcataccccggcctcataaccccttcttggcacagctctggtgtgggccgcacgggagcctttgcactgctctatgcagctgtgcaggaggtggaggctgggaacggaatccctgagctgcctcagctggtgcggcgcatgcggcagcagagaaagcacatgctgcaggagaaggtgaggatctgggcagatggggctgggatgggccttctgtcccagggtgacgggcccctgcccagctgacctggccaaatgcacctgtgcagctgcacctcaggttctgctatgaggcagtggtgagacacgtggagcaggtcctgcagcgccatggtgtgcctcctccatgcaaacccttggccagtgcaagcatcagccagaaggtgaggaaggttccgtggaagctgctgggagagccacagccttgggactccctctcctcactcactctgtcttctcagaaccaccttcctcaggactcccaggacctggtcctcggtggggatgtgcccatcagctccatccaggccaccattgccaagctcagcattcggcctcctggggggttggagtccccggttgccagcttgccaggccctgcagagcccccaggcctcccgccagccagcctcccagagtctaccccaatcccatcttcctccccgccccccctttcctccccactacctgaggctccccagcctaaggaggagccgccagtgcctgaagcccccagctcggggcccccctcctcctccctggaattgctggcctccttgaccccagaggccttctccctggacagctccctgcggggcaaacagcggatgagcaagcataactttctgcaggcccataacgggcaagggctgcgggccacccggccctctgacgaccccctcagccttctggatccactctggacactcaacaagacctgaacaggttttgcctacctggtccttacactacatcatcatcatctcatgcccacctgcccacacccagcagagcttctcagtgggcacagtctcttactcccatttctgctgcctttggccctgcctggcccagcctgcacccctgtggggtggaaatgtactgcaggctctgggtcaggttctgctcctttatgggacccgacatttttcagctctttgctattgaaataataaaccaccctgttctgtggcccgtgtctgagtctgcccattgctgcctcagctccagtagcactgccaggaacttaacttacttagcaccttttgtggatgacaggatggtaccaaactgccacactaccaggacagttctttaagggccctgcagttctggcttgctcatcctccccgtgccacactgtatgtatgtttcctcagcagctctgaggagggtccaggcagagtgtgtgcacaaacaattccaagagacacaagtagctcccaaagtgcctgacagatgatgatatggttttttaaaaaagtttaatattattacagtcaggaggcagcggctggaagatactcggctctttcccccaagtccaggttcagtgcattggcccccacacagcaccccagcctcctgcctgggcaaggaggccctgcgctcagtccagcttctccagcacagagggcacatacaccaggctgagctcactgccaaag

SEQ ID NO: 29486 - DNA, 2300 bp, Homo sapien
gcaccccagccccaactgcagccttcgggcggagagcctggtccacgtgcacttcaaggaggagattggtgtcgctgagctcatcccccttgtgaccacctacatcatcttgtttgcctacatctacttctccacgcgtaggttcatggcagggaggctgagggctttctccaagctaaacgggcatttccatgtcacctgcttccctggctctggaggtggcttggggtagagagatagaacacacctggtggtcatcagagctagggctttgtcccccagcagggtcttaggagcttgggtggggccggggctcttcccactttcagccccttcctgggttagggttcctaaaaggtgtactgtgtccatgacactgggaagtgcttgtgcctgtccctttcctttggtgaaaccaggagttttcccttcctcgactgtcagggcaacctactcccgggagccccagtgggccgggggctgggggaggggccgccctgatacgccctctctgccctccagggaagatcgacatggtcaagtccaagtgggggctggccctggctgccgtggtcacagtgctcagctcgctgctcatgtctgtgggactctgcacactcttcggcctgacgcccaccctcaatggcgggtaggtccctagcaggctccactgggccacagggtgggctcaggccagagagccttgcacttctgggttcttggccttccctggactttgctgtgacctcacgtcttcacattgttgtttttgacatttaagaggtacattttcttcctcttctttgtctggcttgtattcatacttgtgtttgtatatagcatatctagctatagtgagtgtccatatgtacaaaagtgcatatttgtgggctgggtgtgtatataaggggtgtgtgttggtatgtttgtgtatacatgagtatgtattgcatgtgtgtagtcggatttgtgtgtctgtgtttatgtattctatatacacacaccacacacacactgcagcttgatggcttaagccactggaggtgtgagatagagaagagaacattttttttttcatgattagaacatttaaatgcctaatgaaataggtcattttagaggaagctctttggaagatatgagcacactgtaatttgtcgcctttttcactgatgtttactttccccttgccactcctctctgaaccttagtctggaagcccttccctcggcttgtcctcaggctttgatcttggctctggctaggcccgcctgcctgtctattaatggttattaatggattatggattggcctgtccaccactttggcccatcaggctggtcgtatgaaaagcgacgtcgtattttgtttctggtagtttcgttgctcttagatacctgctccctttcctgagcttgacactgttaaacaccaccctcccccataccgtctgccatacccttcacagggccctcccttccttcggctccaaagcagaggtcctgcaaggtataacttggctggcgttcctcgcacatagactttcttagggtttgctgcggggagtgtgggacagtgggctcagatagctggtagagctttgtgtaggaacagtcgttcttctccacacacagcttctcaacaaaggtgagtgggccttcaggatggtttcatctccttgcatttagctgtgatgggtccacccagagttactggtgtgggtcttggcagcagtcattgtctttagccagcagtcttctcctgggaagggccagcagaagtgtggtctagcagtggcgctgcacagctctccctgaggggcctcttccagccctcctgtgctggatggctagagacaggatggctgctggcccctctgcaaggctctggagcctgcctgaaagctgagtgctgtgtagatgcaggtcttgttgggtgaggtggacaagggagggtttctgcccagcacctgtgggagtcactcagcagcccccatgacaggctggaaaccccacagccttcctgagggccccagtctgttgggaaccaccacaacactgtcctcaccttctccttctctgtccccagcgagattttcccctaccttgtggtggttattgggttagagaatgtgttggtgctcaccaagtctgtggtctcaaccccggtagacctggaggtgaagctgcggatcgcccaaggtaacgcagtgggagagttgggcagagggctgcaggaggggctggaatggggcctgttcctcttgctgttaacgctctgtgagcaaacagagcccttga

SEQ ID NO: 29487 - DNA, 2300 bp, Homo sapien
aaagaagttagccaggtgtggcacttcgggaggccaaaatgggaggatcacttgagcccaggagttcgagaccagcctggcaacatagtgataccctgtccctacaaaacatttttgaaaattaggcgtggtggtggtgcacacacctctagtctcagctacttggtgggtgggggtgctgaggtgggaggatctcttgagcctgggagattgaggtttcagtgagccatgattgggcaatagagcaagaccctgtctcaaaaagaaaaacaggcatgggccctgatttggcctacaggccatcgtttgcctacacctggtcccacagtgctttgcccatagtagatgtgttattgagcaaaagaggctcgctgcccaatgtgctagaagccaatactgtgacaccaggatttggggaaaagaaaagctttatattgaaggttgactccctaggagaccggagtccagctcaaatctgtctccctgtgctggctttaaggcagtaattttattaggaaaggtttagagggtggatactaggattagcagatgattgatggaaggaagggtgatttctgggaagtctttgagcatgcccagttatctcttgatgccacctcacaggtcccatgtgcaaattccggggggagttagtatgaaacatggcagtggaaattcaggctgtgacatcggcaagctcattctgcacaactccagtcggccatcttggttccagcttatttcagccagttcttttatctcataagcggagggagtttctgggtttcagcaaattgtttcttttcttatctgccatcctgcaaactcaagaacttgtattagtcattggtttctttaactctgtggggcacggtttccaatgcccattaaatcccttgaattggaccgtctttcttcttcctgtgctcagctgccctttctgccctccctcatttcttctgcagtatgtgggtgccccggtggcttatgtccagcagatatttgtgaagtcctcagtgtttccctggcacaagaacctcctggcagtagatgtatttcgttcacctttgtcccgggcattccaactggtggaggagatccggaaccacgtgctgagagacaggtacccctctcagggaccctggcctccctgaatcccattctgtactgaagggagagttacagtcctcagtgtaactgcagtgagccagtcagctctgcagagatagaacaagcaagaaggatggagggtgagctagccttgaatttctcagcatccttgtgggtctacggtggctgcattccgcttggacctatgcagatggcacacacatagccttgagtctcatccttacatctcagatggagtcagtgtccactgtgctaactcatgacccacatggcttcctgcctgtgggttatggtgtgaatgtaatggtggtgtctctgccgacgagaagcaagctctacctgggggtaccttctgaagccccagcccaagtcgtgctcccctgcctatcagtgggtccctgggttatgctggcttggcatacaatgtgtgtaattggcaagctgcatcactgccaggttttagttagctagtggcgttgacagatattttggtgaactaaatgaagcccctaatttaccccggtccctgctcatccactgaactggccagggtgttttagtgggtggggttgtgcatgctcttatagtacacttgcccgtcctcagagctgatgggcttttgggcttcagatgcactttgaaagtcagacagccacatgtttaggttattggccacctggaagtacttccccctgctgccctagtggtcaggctctttggcgataccagagagcaaatatggggcattgaagaacagacagaggatgtcccctaagtacagcaggtctgccctgtggtggcagacacagcaggtgccttgtcctgtctcctgtgcagctctgggatcaggagcttggaggagttgtgtctgcaagtgaccgacctgctgccaggccttaggaagctcaggaacctactccctgagcatggatgcctgctgctgtcccctgggaacttctggcagaatgactgggaacgcttccatgctgatcctgacatcattgggaccatccaccagcacgagcctaaaaccctgcagacttcagccacactcaaaggtagccccagtacaagttcccttcagacctgtaaaggtgcccattggtcaccgtctttttgatgtgtgcttaggcagatcagggtttaccctttgtttcccagggtggggg

SEQ ID NO: 29488 - DNA, 2300 bp, Homo sapien
cagcactattcacaataggcaaaacatagaaactgcccaaatgtttatcaactgatgaatggacaaacaaaatgtggcatacccatttgatgaaatattcagccataaaaagtaatgaagtggctgggctcggtgcctcatgcctgtaatcccagcactttgggaggctgaggctggcggatcacttgaggtcaggagtttgagaccagcctggccaacatggtgaaacttggtctctatcaaaaatacaaaaattagccaggtgtggtggcgggcacctgtaatcccagctacttgggaggctgagtcaggagaatagcttaaacccaggagacagagatttcattgagccaagattgtgccactgcactccagcctgggcaaccccatctcaaaaaaaaaaaagtaatgaagtactggccgggtgtggtggttcgtgcctgtaatcccagcactttgagaggctgaggcagctggatcatttgagcccaggagtttgagaccagcctggaaaacataatgagaacctgtctctacaaaaaaatacaaaaattagcagggcatggtggtgcacacctgtaatcccagctacttggaaaactaggtgggagaatcacttgaacctgggaggcagaggttgcagtgagccaagagagtgcccactgcactccagcctggtcgatagagtgagattctatgtcaaaaaaaataaagggttcctggattggaaacttgcatgtgcgcttaacgcttctgctttcggaaaggtagaacgagcaataggcattccttttggcttttgagttggctgtggtgtgactccttttgcttcttgtttctgatcttgacacttatgaggagtcatctttgagtctgggttttcatcagtgagtacagtcaagccaagaaatgtgtctgggcaggttccctctagcacagaccgaagaaaacagcaacatggaacaagagaagtaggtttaaacttggattccatcagagggctcagtagggaagataattctagatccctgggcctcctagagttttctattctgattttattggtttaatgttatttgtttgaaagcaccagaaattaactttggccaacataagcaaaaagataatttattagaagggtatagaatagcttacaaaacggaaaaaaaagttgatgagccagtcctcagaaaggatgggagccagaacagcctggggatcttgggagcaggaacctctgtgggatgaataaacatcatgaatatccaagttcctgtttgtttgtgtttagaagtcaaagtccagggagagaggcccaatttgtgtagcttgggtcggcacggggcaccttgactcatagttaatccaggttaaatcctgtggagcgaggtggttcccctgagccataccaggctgctgttaacttatggaaggggacgggtactgggcaggcaggaacaggagctgctctctgcctttgcactcccaggaacaactataggaccaagagcagagagttctaccagagtgaattttgcttggtgaccattatgtcagagacctaagctttttagcgtttttatgttgagggctgacctcgctagaccttcttcacgagtgaatcactatttgtacaacagtgtgttttgaggaggccatccctatgtaaagggtttctctgtatccctatgtaaaggacttttctcagtgggatttgtgcatagaggaggggggggaagaatgcctgtttgacagagagcagctgaaggtgacgtctgttacacaggcatggtttcgtgtgccacacatgagaaaaatgccctttggggagtggccttttagcattgcctaatataggagggagggagttgggcggggagggagagagagagagagagagagagagagagagagagtgtgtgtgtgtgtgtgtgtgtgtgtgtgtgtgtgtgtgtgtgtattttgggattgaggtcactagaccttgcatataggcattctgaaaccattccccagccacataactatcgcctccctccagcagccctagtgtgcagagccaagtactctttgttaactggcttttctcccttcttaccaggtacctgcacatgttgttctttgtcagtgctgtcaagtgtgtgccagggtgatccatggtcactttccgggatggcagcaaggtgacttcggctgaggatgaccctgactgaaaggctgcgtgagaagatatctcgggccttctacaaccatgggctcctctgtgcatcctatcccatccccatcatcctcttcacagg

SEQ ID NO: 29489 - DNA, 2300 bp, Homo sapien
gaggactccttcatgcccaaggtttctgaggggacaaatgatggtatttcaagggatcagacctggagagagtgatgtcaggataggtaaggggtgtaggtaagttcccctgaatgctctctattgttgcttctctctcatttaatacaacaaacaggatgggcacggtggctcatgcctgtaatcctagcagtttgggaggccaacatgggaaggctgcttgagcccaggagtttgagaccagcctgggcaacacagcaaaagaccccatcttgataaaaataacaaaaacaaaaatggcatggtggcgctcatctgtagtcctaccttcttgggaggatcacttgagcccaggaggttgaggctgcagtgagctatgaccacaccactgcactccagcctgggtaaaggagtgagacctcaaatgtaaaaataaaaataacctaaaaaattctttctttctttttttttttctttttttttttgagacggagtctcgctctgtcgcccaagctggagtgcagtggcatgatctcggctcactgcaagctctgccccccgggttcatgccattctcctgcttcagcctcccgagtagctgggactacaggcacctgccaccacgcccggctaattttttttttgtttgttttgtatttttagtagagatggggttccaccgtgttagccaggatggtttcgatctcctgacctcatgatctgcccgtgttggcctcccaaagtgctgggattacaggcgtgagccaccgcgcccagcgaatactttctttataggatcaaaattcccatattaagccaaaagacaatgctgaaaatgtcataaccctgaaagtcactttgggccaaggcccactgtccccattgttactttcattgtgacaatagtgtggtgggcaaggagggaggccagagtccggtgggaactgggttttaggaggaggtatctgaagaatgtgtagtgggtcgggggctggtgcggtcagaagggccacctctaatttctgccttgcattggtgactagatctgcactttctggaactcccagagaagtttgctggtgcctttgagggcaggtacagggcctgccttatccaggtagccctggggtgggtgcgggtgtctcgggcagtaggcaggggctgaggggaggcttacctctgacacaagacctgggtacagcaagggcatgcagtagcatgatcaaagtccccccagagtggtccgggcagcgtctctagttgggccagagctgggcaggtggggacctgtgtttccctcgaggggaggcagcctccccttccccttctgtgaggccctgtaacaagacctacctcggattttcaggagggccaaatgcgaggacatgtacaataccagctccgcaactgacacctagtaaacagtgaacgtagctgttgctattataacaaatacctgttccctgtggaaaatggttaaatgtcaacttatgcttttaaatgtctatagggaaactagttttatggacattatttattcttctcatctgcatttgcagtgtatctcggcccagctgcttctaattttttgccattataaaacagggaacatgagcatcttgtgcagggtgggttttttgttttttgtctcactgtggcctcgacctcccgggctcaggtgatcctcctacctcagcctcctgagtagctgggaccacaggtgcgcgccaccacagccggctaattaattttacttgtggagacggaggtctcctacgttgcccaagttggtctctaactcctcggctcaagcgatcttcgcgccttggactcccacagtgttgggattacaaccgcgagccaccgtgcccggctttctgcaagttcttgatgaccgatgagagccggtgggcccaaacccggcgggccctaacccggcttcacgctccgcccggcccggcccggcccggccgtccatacttccctccggtgtccaccagagggcgaacgggagacgcgaatgtggttcgactacgcatgcgcacgccgctgggcgcacgtgcggagggcggcggggcgggagggtaaaggtaggaggtgagaggtgaaggggcgggcacccggcggccaggagagagagggagggcgccacgcaccggactgcgggccgagagcgcgcacgccgcgctccgcccctgctgccgcccccgtcgccgccgccgccgccgccgcagcttgggaggtgctgccaccacaggtaccgtcacgcgggtgctcagggcgcctgcccgcgggcccca

SEQ ID NO: 29490 - DNA, 2300 bp, Homo sapien
gaaacatctcattcttggctgaaggatctacatccctttgacacagagaagcagccttgatttccatcccaggtgcagagcttcagctaacgattacattccacatcgatcttaaccttgtagtttccacagaaatgaccctgggtcccctttgcagtccacgccagattaggactccacacacagctgtgctgtgctttgagcatatcaaacaccggttcacttaaatttcacctgaattcgactctttcccaaatcatataacaattattttagtgactgtcaataaacttgactttggtggaattacaggtttgtccactgatctgaggctgattgggctagaacaaaactatatacggtataatagatataaatgttatggaaaaaaataaaagcaaggaaaaagaagtgttgggaaagggacagtttgtgatttaagtaaggtgctcagggaaggcctcacgaataaagtgacatcggagcagagacctgaaggaagtggggaattttaaaatcagcttaatatctgggaaaaggggcattccaggaagagggaagagttagtataaaggctctgaggacaggcatacagggcgtgttgcaaccacactgttttttaacgaagtctcacactgctgcccaggctagagagcaatggcgtgatctcggcttactgcaacctctgcctcccaggttcaagcgattctactggctcagcctcccgagtggctgggatgacaggcgccccccaccacgccaggctaattttttgtatttttaatagagaagggggtttcactatattggccaggctagtctcgaactcctgacctcgtgatccctccgtctaggcctcccaaagtgctggcattacaggtgtgagccaccgcgcccagccgcaaccacactttcttagtgagacccaccctgacaacctctttaattctggaacctacccctgcccccattggtactctctaatcccactttgcttttctccacacaacttttcaagatataattccgtgtcggccgggcgtggtggctcatgcctgtaatcccagcactttgggaggccgaggccggcggatcacgaggtcgggagatcaagaccatcctggctaacacggtgaaaccccgtctctactaaaaatacaaaaaattagccgggcgtggtggcgggcgcctgtagtcccagctacactcgggaggctgaggcaggagaatggcgtgaacccaggaggcggagactgtagtgagccgagatcgcgccactgcactccagcctgggcgacagggcaagactccgtctcaattaaataataataataataataataataataataataataataaattccctgtcctttgtttttgttcatcgatgtagcccaagctcccaggagtgtggggcatacagaaggcgcttgacagccacgtgtggagaaaaggagcccggggctgggcagagagcgaggccaagggaagaagaatactcggtcgcgtggagccttgggggcccactgggagggctcgggcgccacgcagatctgcgcggaatgagccgccagaggccgctggcagtcgcacagagaagcccatcgtttcctaccacctgggactcgacggacgtctacgcgcgtgcgcagcggtcccatcgaggcacccgcctcattggctgtggctggctcgcaaaagtggcattgcgcatgcgcgcttccttgcgcgagccgggctgtcgggtgtgttttgctctccagcctccgtcgtctctgcagcactccgggttctcctccagagcgctagtcccaggagctcggaatgttcgtggaacttaataacctgcttaacaccacccccgacagggcggagcaggtaagaggtcccgctggccggaagggggcgggacctggcagggcagcggaatactgcatccgggaggcggtgcgcacgaccccggggaatggcgcgacgacccggcacggggtacctgggagttgtagtccgcagaggatcgacccggggattggactggaggcttgggcccgccgaaagtgggcttctgggccatctcgcatattctcaacggctgtgcgtgtccttaaaagtccctgggaagcggccgggcgcggtggctcacccctgtaatcccagcagtttgggaggccgaggcgggtgcatcatctaaggtcaagagttcgagacaagtctggccaagatggtgaaacccccgtctctacgaaaaatacaaaaattagccgggcgtggtggctcatgcctgtaatctcagctac

SEQ ID NO: 29491 - DNA, 2300 bp, Homo sapien
cagaagattggggtaattctatgattaggtaccctgatatatcttatttacagggaggcatctttgcaaagccagtatgtgataaacaactggtatcaggccaaaaaaaaaaaaaaaagaacttgtatcaggctaaagagattggtaaagaagtggtactcttatttgctgggaaatgagatgtttggttgtggcttggacaatgtacatgttttgtgttcaacatgattatggagtgttctagttttgtcttgatccgtcacaatcagtctgatgttggtgttttatgaaattgtttatgctcaacaggaacaccaagacctagctgtgagtgtcaggccaatttttttttctctttctcacatttcaataagcatgaaacatctcattcttggctgaaggatctacatccctttgacacagagaagcagccttgatttccatcccaggtgcagagcttcagctaacgattacattccacatcgatcttaaccttgtagtttccacagaaatgaccctgggtcccctttgcagtccacgccagattaggactccacacacagctgtgctgtgctttgagcatatcaaacaccggttcacttaaatttcacctgaattcgactctttcccaaatcatataacaattattttagtgactgtcaataaacttgactttggtggaattacaggtttgtccactgatctgaggctgattgggctagaacaaaactatatacggtataatagatataaatgttatggaaaaaaataaaagcaaggaaaaagaagtgttgggaaagggacagtttgtgatttaagtaaggtgctcagggaaggcctcacgaataaagtgacatcggagcagagacctgaaggaagtggggaattttaaaatcagcttaatatctgggaaaaggggcattccaggaagagggaagagttagtataaaggctctgaggacaggcatacagggcgtgttgcaaccacactgttttttaacgaagtctcacactgctgcccaggctagagagcaatggcgtgatctcggcttactgcaacctctgcctcccaggttcaagcgattctactggctcagcctcccgagtggctgggatgacaggcgccccccaccacgccaggctaattttttgtatttttaatagagaagggggtttcactatattggccaggctagtctcgaactcctgacctcgtgatccctccgtctaggcctcccaaagtgctggcattacaggtgtgagccaccgcgcccagccgcaaccacactttcttagtgagacccaccctgacaacctctttaattctggaacctacccctgcccccattggtactctctaatcccactttgcttttctccacacaacttttcaagatataattccgtgtcggccgggcgtggtggctcatgcctgtaatcccagcactttgggaggccgaggccggcggatcacgaggtcgggagatcaagaccatcctggctaacacggtgaaaccccgtctctactaaaaatacaaaaaattagccgggcgtggtggcgggcgcctgtagtcccagctacactcgggaggctgaggcaggagaatggcgtgaacccaggaggcggagactgtagtgagccgagatcgcgccactgcactccagcctgggcgacagggcaagactccgtctcaattaaataataataataataataataataataataataataataaattccctgtcctttgtttttgttcatcgatgtagcccaagctcccaggagtgtggggcatacagaaggcgcttgacagccacgtgtggagaaaaggagcccggggctgggcagagagcgaggccaagggaagaagaatactcggtcgcgtggagccttgggggcccactgggagggctcgggcgccacgcagatctgcgcggaatgagccgccagaggccgctggcagtcgcacagagaagcccatcgtttcctaccacctgggactcgacggacgtctacgcgcgtgcgcagcggtcccatcgaggcacccgcctcattggctgtggctggctcgcaaaagtggcattgcgcatgcgcgcttccttgcgcgagccgggctgtcgggtgtgttttgctctccagcctccgtcgtctctgcagcactccgggttctcctccagagcgctagtcccaggagctcggaatgttcgtggaacttaataacctgcttaacaccacccccgacagggcggagcaggtaagaggtcccgctggccggaagggggcgggacctggcagg

SEQ ID NO: 29492 - DNA, 2300 bp, Homo sapien
aagaagaagatacttaaataattaacaaaatatatttaaaatgagtgggagaacttcctccattaaaccctgttgaaaatgtgtgagtggttgtcatgccccagacatcaaggaacccatccatgaggtcttcccacacagactggcctcaggaagggaaggaggaggtaggccgctctgacagccacaacccgagttgaggaaacaagcaaaggaacacagagagtctacatacagtaaaaggtgacaggagttaagctgcacacaagggaagcagagatgggttggaggcagttaagggtgcgttgctgcctctgtggctgaggtgagtgcaaagccctacatggtcccctgtttagagaaggctattgtttcaaacatattttacttggtccccggaggcagcatgaaactatgaaagaaagagccttaccccttttttcaaggctctccagaccacagttctgggatgggtgtgggtggttgccattcgttcatttatgcctgtctgatatggagcctccctctgttaccagccctgtgcactcaagtgccttgcagtccagtgaggaataactgtagataagatgagatgatgggcattaagtgtaactgctgagaagccttcatagagggaaaggtgataagaactgagtttttctggcatgaggagtttaccaggcaggagaggtggagacgctaggctaggcaaataggctgcagccatagttctgctgagaaacaggttttgaaccaaggcaactccatctggagatatgtatcagaaagattaggagatagaatctccatcttggtcacttatttggtcttctaagacagcaatgggaccgtctcttaaatactggagttgtcctatctccttgggctgataccctgaactgtcatttgggtgagtaacacattaaggggtagacggtcggtttgggggaataaactaagtaactaggttgcggttcctcctgccgactaagcagacctcctggtgcgtggtcttgggttgccctgtgagccctgaagctgtgaatgggccccacagatcactctaaagccaagcatccatgtgtgcccggctggggatctagacccccctggtctacccaggaacctgagttttggtggtctgagacacctgggggacgacgtatcccggagaagggaccaggattaaaggccgctccccaggctgcccggagactagaaggaaggcgaggtagccgcagtcccagggagggtcttaccccttgctcccgggatgcgttatggcgggcctggctgtgcgagatctaggctagtggctttggctgcgaacggattagatctgatccgattagagcctgggcggtcggcttcgcccccttgccaggctctgccaacgcccgcccctccctcgtggagacccggagacctccctgagagccttcccgcccggaacacgggattggtgcagaatccgagaggctccatgcgccccgggcctggcttgtttccacagtgggggctcgtgcttccgccccctgcggctcttctggaccccgccccgaccctgcgggtaactgggcccgcgacgtccccgcctccgtgcttgccgcgtggcgggtgggttcctccgggtcggggccccgtgccgcctgttcacctggggcgggaccgtggccccatcccacaggtctcccgcccgtgcacctgccgcctaacgccgcgcgccgcgccgtgcgcctgcctcgcgctccccgtccgcctgccccgcactccccgtccgtgtgtctcctagtccccagcgaggggtctgtctgttcccctggcaggctgaccaaggggccggcgtcaccgctacgtgcggcggggccggcgcggcgggcggggtgagggcggcgctgagcgcagcggcggcagcggcggcgcgggaggcggggaggcgcggcgcgccggggacagcggcggacggcggcggcggcggcatgcggctcctcgcgctgcccatcgtgggctgaggcggccgcagaaccggcgggaggcgcggcggccgggcgagccgagggcgcagccagccgggcggaccgcggacagcggtcggggcgccgcgccatggggcgagccgggggcgggggcccgggccgggggccgccgccactgctgctgtttctgggggccgcgctggtcctggcctctggggccgtgccgggtaggtatgactgcgcccgggacccccgcggccctcgtgccccacccagggcaggggtcccgctggcggcggggacaggtggagctgtgagctgtgg

SEQ ID NO: 29493 - DNA, 2300 bp, Homo sapien
agagcgaaactctgtctccaaaaaaaaaaaaaagttgctccacatggtgaggccctgtgtttgcttgtgctatgtggctttctcccagctggtttggctttggggtaatgaaattcaagaggcctttccaatctgtttgcagacccattgcctgaacaagattatcaccttcaggttgtgatgtccttagatgacagcacttgctcaactgagaatccagagttttctgcagtccagaggtggtggtcagcacaaagaactcagaccccctacctcttagcccttccctttctgggggatggtgtaaagaggcacatcgcgtaaaatggtcacagagcagattgccatgcagcctagaaccaggagtctggtcttgttgctgtgttccctggtaagagatcatggcattatttcttaaatggctaagtgaaggtgggagagttggggaggggaggagggaggtcctctgttctgccaattaatagtctacctctgtgtcctgattcctcttctcaagcaggaatgaaaagcctccatattaaaacgaaagggtttggaatcagggtcttagttcaaatcctgtccttaccacttcactagcgtactcttggacaaaattgctaattctctcagtttgcagatgtgtaaaataggactgacgatatttgtagtgtgattgtgaagaataaggcaaattagcacaaggaaaactaaaaactcaatatgtttgtgttagcctgtttgtgttgctataaaagaataaagaatatctgagattgggtaatttataaggaaaagtgtgtttggctaacggttctgcaggctgtacacaacatagagccagcatctgcttccagtcagggcctcaggaagcttacaatcttggcggaagacaaaggggagccagcatcacatggtgagagcaggagtgagagagaaagtactaggttcatgtaaacaaccagatctcacatgaacccatgaagcaagaactcattacctcgagcaccaagccattcatggggagtccacccccatgacccaaacacctcacactaggctcacgtccgacactggatgtcacatttcagcatgagatttggagggaataaaacatccaaaccatatcaatgttagtggttaatactgaggacttaaagccaggaatttccagtccacacagctatgcccccagccatggcaactggagcactcctctggactgcagccccctggtcaagccgggggtttttcatgcagtcggaggctggctgcattcgtggcaatggaccttgagcctacctgagctctggaggcaggctgccaacccagtaagaacctcagaggcatgaagaaactgttgacacataaaacatccctgatgcccaggtgcaagagacataaatacggggacatggatataaggacgtcagtttccctttctttcactctgtggttcctacatcttctatctcttctttaccctaccacagtcctgtgctcagaagaaatactcatttgactctctggttaccaagcattttcacatatgagagacaggttgctaactcaaagtcacgctgcagctgaatcctgcccttcccatcacgttccactgactgaattttcccattcatcttgtggaggtgttacccaaccaagtgtgctatgctcagttctcaaactgctagtgagatccactagggaagatcagaatgaaactgagtggcaacaattgatttaaagtctcaagttgggccgggcacggtggctcatgcctgcaatcccagcactttgggaggccaaggcgggcggatcacctgaggcctggagttcgagaccagcctgagccaacatggagaaaccccgtctctacaaaaaataccaaattagccgggcgtggcatgcctgtaatcccagctactcgggaggctgaggcagagaatcacttgaacccaggaggcagaggttgcagtgagtcaatatcacaccattgcactctagtctgggtgacagagtgagactctgtctcaacaaaaaaaaaaaattccaaattgaaggaagcgttagcagacttcatctccaggaaagggaagaagaagatacttaaataattaacaaaatatatttaaaatgagtgggagaacttcctccattaaaccctgttgaaaatgtgtgagtggttgtcatgccccagacatcaaggaacccatccatgaggtcttcccacacagactggcctcaggaagggaaggaggaggtaggccgctctgacagccacaacccgagttgaggaaaca

SEQ ID NO: 29494 - DNA, 2300 bp, Homo sapien
ctgtgattgtgacactgcaccgttacactccagcctgggcaacagagtgagaccctgtctctgaaaaataaataaataaataaaaattcagtttctgaaatactgggataaacttttaagaggaagtttactgtagctacttggtatttggctcttgatggtgctaaagcatcatattcacattaactgctcacagaacatctaaggagtgctagcatctgcatttactttgtaaaagatgggcagagaggtgcgtctactttcttccctaaatgagattttgatgataatgggtgtttgtatgccatgcccctcacccacattgtttcacttatttctcattctcaccttacagttgaagaactgatgcatggcaaggccgcatagctttgctgcatggtagagccaggattcacactgagctccatctgattccaaagtgaggccagtgccacagtgctgcctcccgtgacggaagactaaggggatttatagcagattcagatacagctattctagtgaagcagttccgcaaactagagttcataaaaatagtctttggaagagaaataggtcattttaatctttttactttctcacaaaaataggcttttctaaagtgaatttgtaaaggaaagaattattgagtgcagtgcatgatgagaggttttttttttatttttagtctatgacaagatagtctcatgattttttattgaaataaaatgtacattttggataatgcacaatcataaatattcagctgagttttttttttttttacttcctttatacttgcagaattgatgagttttaacagagaatattcatgtgtaaccaacacacagaggccctcatcatactgagtcaccttcccttccaaggataacaactgtcctgacttctagcgccgtagactagttgggctggttgaatgttatctaaatgtaaccacaattacatttattatgtctggctgctttccttgttttgttttgtttgagacagacagggccttactctgtcacccaggctagagtgcagtgacattatcagggctcactgcagcctcaacctgccaggctcaagccatcctcccacctcagcctcttgagtagctgggaccacaagtgcacaccacgacaccccactgccttttaaatttttttgtagagacatgggctcactatattgcccaggctggtcttgaactcctgggcttaagtagtcctcccgcctccgcctcccaaagtgttaggattacaagcatgagccaccatgcccggccacatctggcttcttccactcaacactgtatatctgagatgtgtccacattattgtttgtggttgtacatttgttccttctgtttgctatacagtgttctgtggctgtactatttattagtctgttctgttggacatttgactgatttctggattttagttattatgaatagtttgtgctgttgtgaaatacatgagcacgtcttttgataagacatatatgtacatttctgttgtatatatccctaaggtgtagaattgagtatttatgaacctaagagtggatcataggatatgcatatgttcagattaatagatgctgccaaactttttgcaaagtggtggtgcctgtttacactctagcagtatgtgagagttccagcaattcaagataataatttttccaaattaccccttttgttgggttgctttggagtttgaatataaaatcaagtctgttaaagagtaaaattaaaagcaacagcacattaggctgggcgcggtggcttacgcctgtaatcccaacactttgggaagccaaggcaggtggaccacttgaggccaggaattcaagaccagtgcctggccaacatggcaaaagcccatctctactaaaaataggaaaattagccgggtatggtggcacacacctgtaattccagctactcaggaggccgaggcacgggaatcgcttgaacccaggaggcagaagttgcagtgagccgaggtcatgccactgcactccagcctgggcaacagagtgagagaccctatctcaaaaaaaaaaaaaaagaacaacagtaaattaaacccactattttaaagttaccagttcagaaaaagctggttctagcacgtaggtctgatagaccatattctaaaggtcagctaaaaaggactttcaaaccagggcaagtaagattgtccgtagcattttggggccagaatggctttagtctctgagttgccacagggtaaggtaagaactatgagcaggtccttccaactcatgat

SEQ ID NO: 29495 - DNA, 2300 bp, Homo sapien
gtttatttgcctgtgtgcggtaggggctcttcaagcatccacctgagttccttattgctgattcttggaagtttgcaaatactcctttcagaacagtgttcatatctcatttgcatagcattccatggtacacaggaaattgtatctagtttcgttttttgttttggggggttttttttggtgtttgtttgagacagggtctcactctgttgcccaggctgttgtgcagtgtcatgatcttggctcacagaaatctctgccccctgaactcaaaggatcctcccatctctgcctcttgaagtagctgggactacaggcacatgtcaccacacttggctgatgtttatttatctatctatctgtttattttttggtggagacgggggtttcaccatgttgcctagagtattcttttatttctaaaccttgaactatatgcacatcaactcttagagttaaagtttggattttaaaccaatttttactataatgaattcaggtctatcctcacaactttctttttctttcttccttttttttttttttttttgagatggagtctcgctctgtcactcagactggagtgcagtgttgcaatctcagctaactgcagcctctgcctcctgggttcaagctattctcctgcctcagcctcccacgtagttgagactacaggcatgcaccaccacacctggctaatttttgtatttttagtagagattgggtttcaccatgttggccaggcttgtctcgaactcctgacctcaagtgatccacttgcctcggcctctcaaagtgctaggattacaggcgtgagccaccaagcccggcctgtcctaacaactttcaacttgtgtgtgaatgtatgttttggattgtttctattcatccaggagaaaatagaatctttatcttcctgatgtgtgactgctaattaaaagagagatatgatgatatagctgcatgtgaatggagcttaattgcataaaggatttttgtggttttgcattggaaatagaaaaactcttattggaaggaagaagtttggccggaagtactttttgtctttccctggtgattcatcagtatatacttctggaacccttgtccctatatataagtacatatctgtcaatactgtacataccctcccatgtattaatcagggtattaatctgttactttttttttttttttttgagacaaagtcattccgtcatgcaggctggagttcagtggtgtgatcttggctgcctgcattttgttttctttgtgtgccaagaactgttgctaggtctcaaagtccttaacactcttgttgttaagtactatattttgtgacagaagtccttagtatctgctgtaacagaatctcaatttctctctccatttttgtatgttcttttctgaatttggtctcatggattctacttattgccccgccgtgatctcccttaaagaactgctgtgagaaattacatagctatttgcagagccaaatccacatgacatgtgtgaaatacagaagtgataggcagcagaggttgagagcatagattgaagagctaccacactggcagcattgaattctggctccatcagttaccaaccctgtggctaggacatattctctaacaactcagtgtttgtttcctcacccataaatgggatgatagcagaccctacctgcaatatagagcgattatgaggattcaattgtcagacatacattgcttataacagtgccctgtacacagtaaagtatagatatgtggtagtgaggcagatagcctatgtaaccacgtgttagtttccaattctgcagttaactaccaccatgaccaagtttgaatttatgttacttcacattaatgtcattagattacttgttgttatacattaataaacagttgttttgcatattcgtggttctaaattcactcataactttaaatgtgcaatataatatcaatgttttttatgctcttgtcttaatttgttgttgtatttttaaggaatctgaagatttttgagtttctaagtaacattgtttctgagaggatacatgtccaccttatgaattttgccattgctttttagatacttggcatatcgaaattttatgattgacacgtatcgtctaaacccccaagagtatttaactagcactgcttgtcggaggaacttgactggagatgtgtgtgctgtgatgaggtaaactgtttgactttttctgagacatttaactgtaggaatttacttatgcatgctgtctaatgtttgcttgattaaactggttg

SEQ ID NO: 29496 - DNA, 2300 bp, Homo sapien
aatgcaatgcaaagaacacaaagatacaaacatcagacaaacttaaattgagggtcattctacaaaataaatgccttgtaatcttcataggtatcaatgttgttaaggtttaaggactaaggaactgttccatattgaaggagatgaaactttattaaatgcaaagtgtgattttgaactggaaacttttgctataaaggacttcatggtgcaataggaaaaacctgaatggggtctggggatggcatcagtgttaatttcctggtataaatgattgtattgtgattatgtaagagaatatatagactatacttgtctgtagaaaatacacattaaactttttgatagtgatgggtattatgtcagcaacttactcttagatgattcaggaaaagttctttgtattatatttgcaacttttctgttaaatctgagaaagtttcaaattaaaaactttttttttcagacgagtttggctctgtcgcctaggctggagtgcagtggcgtgatctcagctcactgcgatctccacctcctcctgggttcaagcaattctcctgcctcagcctcccgagtagctgggattacaggcatgcaccaccacacctggccaatttttgtagttttagtagagacggggtttcaccatgttggccagggtggtctggaactcctgacctcgtgatcagtctgccttggcctcccaaagtgttgggattacaggcgtgagctatctcgcctggccctcttgatcacattctattaacttttttatttaatatattttactgtccgtgacacagccctcaggagatcctgaaaacatgtacacaccctcatttttaaaagatctcagaaacttaccagcagttagtcacgttctcacaagcaattagttacttgcttctctgcgatcatatagcattatgttcacaactccattatggccagtcatactttttatgtttctgaaacagggtttcgctctgtcgcccaagctgaagtgtagtgagtggcgcgattatagctcactgcagcctccatctccccagctcaagggatcctcccacctcagccctccaagaggctaggaccacaggcttgcaacacaacgctggctgatttttgtattttttgtagagacggggatgggtgtggtggtctagagctcctgggctcaattgatcctcccgcctcagcctcccaaagtgctccgcacccggccaatataccttgttaataatttaaaaattttcggcttctatgtgggccattcattaactcatcaagtatttactgtacatctgttccttgtctcaggtgttcaggatacacctgtgaacaagttaagattaggttctcatgtaatttatgtggaaggtaaatgagaaactagaaacgccgggtcgtggtgagcgctatgcagaaagtgtatgggtgtgaacagttgttcaagattgttaagatctgacaactactttctgaagtcctttgaagcagtgaatctgaacgcgtctcgtaagtgcaaatcagaagggaagacctgctgaggtctcgaaagagccagtgcaagggcccctggggcaggaatgagccgctgtggctggacccctgagggagtggaaggtctgtgaagccgaaaagcctaggcgtgggagtcccagatggctgttcacaaatgccgccgggccgctgggggtggagggcctgagggaaagcggggcccggcgcagtcccagtccgggtgcagggccctcggccagcactcgataccctagacaggctttcccttgggcatttctcgcaccaggccttttccctccagcggaggcgggctatgacacataacccacctgcggttgttgaccgcataatgattcgacgtcggtagcgagggaagagcaaggctcaaaaaccggcgctcactagggcagaatgcagcctacggaggatggcggaagaggcggctgaggccgcaggacgtgctattccaaggcacggccgcacgagtgctacgcatgcgcgtgcgctggctcgcgtcagatacagtgccagttcccagatggggcggggccgggcgtccgcgccggaagagggttggctgggcggggccgggaagcggcagtggcggctacgcgcgcgggggtgcgcgcgggaacgaccgggaaacaccgcgagggccggggtgggccaggctgtggggacgacgggctgcgacgatggccgcagcggcgggcggcggcgggccggggacagcggtaggcgccacgggctcggggattgcggcggcagccgcaggc

SEQ ID NO: 29497 - DNA, 2300 bp, Homo sapien
aatcctttcagtcactatggtacagatctcaaagtcatctctccacacacttgtggcctgggctcagtctgctgctcaacagtcacccccccttttttttctttcttgcttttctcactgttgagttaaatctttcattctctctcgggatctaattagcatgctagtttctattttcccagctgattcaaccctttcacttccagaggaagctttctaaattacagtattggcccagcgtggtggctcacgcctgtaatcccaacactttgggaggccaaagtgtgtggaccacttgaggccaagagttcgaggccagcctggccaacatggtgaaaccatccctagtaaaaatacaaaaatgagctgggcatggtagtgcacacctgtaattccagctacttgggaggctgaggcaggagaatcgcttgaacgtgggaggtagaggttgcagtgagccgcaaccaccccactgcactccagcctgggtgactgagtagagactctgtctcaacaacaacaaaaaagtgcagtattttactctcctaataattttttaaatgtcttaccaaaaaaagtaaaaattccttagtatggcactccccaacagtttttcagttctatttcctgtaaagcttgcacacacatccaaccctgtggtcacactgaactactgaatattcctaggatttgtcccttgttccactcgtatgtctttgttcacgttcctttcattttgccattcaggagtaaccactcctttctctgaactcttggagtacctaatacctcctttccagcatttaccactttccatttccttcacacaatgttgtcatcttctctactaggctctaagtcccttgaggcagggcctttgtagcctccacaccagcttagcaactgatacacagagcactcagatgtccgtgcagggatctctctattctccacacaacacagcaccatgccctgttcagatgcactaattatttgaatgaataaatgatgttccacccccacaccccggtcttctagccaatgtagagagaaagaaaagagatacatgttgaactgtttgcacacaaaagtgacgggatatggcactaattcttcatacagcctcaaaggtcacatctttttttttttttttttttaagtttcattcttgtcgcccaggctggagttcaatgacacgatctcggcttactgcaacatccgcctcccgggttcaagtgattctcctgcctcagcctcccgaagtagctaggattatatgcgcccgccaccacgcccagctaatttttttgcatttttagttgagacggggtttcaccatgttggccaggctggttttgaactcctgaccgcaggtgatccacccgccttggcctcccaaagtgctgggattacaggcgtgagccaccacgcccggcctaaaggccacatcttaaaaccatactctgtaaaatcctgacccagcttcagagctacgccactgcgttgtttccttttgaagctgaattccactgaacctatacttgaaccttatctagaggactacagcgtgtaattgggacaatcccctttctcattcctaagaggtgatgtggccgggcggacctccagatttccagcaactatgactggcactctccccgcgaccagcaagtgccaccttgtcctttgcctaacgttgtacagtttacgaaatcaacgaaccaacacgttgatttcatcttccctgcaaactggggagacaagacaaaaatgctcacctccctaaaaaaacagattagaggggagatggggaagagaagaggcgtggctacgagctgtggcggggaaggcgggtggaatcccggagcccgagctggaaaccgttccccgctcagccatgacccgggctgtttattcgcatcaggaggcgcgggtggctcgcagagggcgagaagacccttcccgctttcacactgcaggcagctaagtcgccgagaaaggcagcaacttgacgcccgaccccgccacccaaacccgctcgctctgcgaccccagagcagccggcgccaacccgtccccttcgcgactccgccggaagtcccgcctgcaccgccgccgcgccccattgggccgggtgctggggcatcccgggcgctgggtgccccgagcggctacgacgagtcccaggtggggccgggctccaggcccgcgggggagcggagccgtgcgccgcaggcgggctccgtgacgccgggtggggaacgccgggccggtggcgggacttccgccacgggactcgg

SEQ ID NO: 29498 - DNA, 2300 bp, Homo sapien
gatcgagaccatcctggctaacacagtgaaaccctgtctctactaaaaatacaaaaaattagccgggtgtggtggcgggcacctgtagtcccagctacttggggggctgagccaggataatggtgtgaacctgggaggtggagcttgcagtgagccgagattgcaccactgcactccagcctgggcaacagagcgagactccatctcaaaaaaaaaaaaaaaaagaaaagaaagaaaagaaaggggtttccccttattaatctatcagatctcttgagacttactcactactatgagaacaatatgggagaaaccacccccatgattcaatgacctcccaaccacgtccctcccatgacacatgggaattatgggggctacaattcaagatgagatttgggtggggacacaaccaaaccgagacaaagacccccctgggaacaaactagttggttggcatccctggttgttgtttttttttttttttttgtctttttgagacggagtctcactctgttgccaggctggagtgcagtggcgcaatctcggctcactgcaacctccgcctcccgggttcaagcaattctcctgcctcagcctcccaagtagctgggactacaggcgcgtgccaccatgcccagctaatttttgtatttttagtagagatggggtttcaccatgttgaccaggatggtcttgataccctgacctcatgatccgcctgcctcagcctcccagagtgctgggattacaggcatgagccactgcgcctggctgatttttttttaacataaaaatctaaacatctgttcaacacatgtgttgtaaactagaaaaaatagtataatgaacctgcaagtacctgtcacccagcttcaacaattaacaactcatggccagtgttgctttgtgtatagctcttcattttggcttctttagaggcaactaagaaatcatggcatttcagccttatgccaaatggctgtcagaaaagagtgctatcctgagggcttcctcaagtgccacaaagggcttgggtcctgctgtccaggtggggcctttctgtctagactgttgtctccttcagctttcagataccattttcttttccttttttttttttttttttttttttgagatggagccttgctctgtcacccaggctgaagtgcagtggcatgatcttggcttactgcaacctccgcctcctgggttcaagcgattctcctgcctcagcctcccgagtagctgggattacaggcgcgcgacactatgcccggctaatttttgtatttttagtagagatggggtttcaccatgttggccaggctggtctcgaactcctgacctcaggtgatctgcctgcctcggcttccgaaagtgctgggattacaggcgtgagccactgcgcctggcgaggaacagcactttcactgctggactttacgctggaccagctcaattcttggcagtttccaaagctgggtgttttcaccttcccctccagccctggggattaaatctgtttcctgaagaggtcttccttggcctggctccagattttctttttcgttttttaaacttttaatagagttggggtttcactatgctgcccagactggtctcaaaatcctgggctcaggggatccatccgcctcaacctcccaaagtgttgggattgcaggcatgagccacggcgcctggccctggctccagatcttcaccaggtttactttgtaagccgttaaataagatggggctgccaatttgccagaggcacgtgagaggtagttaggaacaattggtaggacctagagggaactaacttcgcttccttagatgacattgagctaaggcctagcattattttccccccaacagcctcattccatcttcctgccttccatccacacgactgctggtttagatttgctggagagtgagctctgcagggtcctagccctgggcagcgccgagcccgcctactgaaggcccagggctgtggtgagcgaggacgggctgctgatgccctcgcctaggcttgggcttcgggtccgcccggcccgcagggggcgcgcggcgctcgggccggccgctcccgttctcttcgcccggtccctgccgcgcacaggcctcggggtcggcgggagcacgatggcggccgctaggagactcatggcgctggccgccggcatctctccgcgcctgcagccgctgggtccccgcgctgctgggcgacagggtcgctcgcgcggcttctcttcaagctgcgcccaccccgaccacaccaaggaagccgc

SEQ ID NO: 29499 - DNA, 2300 bp, Homo sapien
cgaacccctgacctcaggtgatttgcctgcctcggcctcccaaagtgctgggattacaggcgtgagccaccgcgcccggcctgaattaactttagttcattttttaaaacgtttattttggtaagttaacattttcctagttcataatttctccctccatcaccatgtcagccaaaatccaaaatctcttagagattacttggcacaacttatgcgttggagctcctgagcttgtctgggctggtttttggggagccccagagcatagactgagtcttgcatgtccccctgcagagcctgggcctggtggacaggaacaacgaaccgcttacacacgccatgtataacctggcctctttgcgtgagctgggtgagacccagcgccgaccatgcaccatccaggtgcccgagcccatcctccgcaagatagagaccttcctgaaccatgtaagaggccctgcatccctcaccacccctgctccctgtagtctgcctccatctctccagactgaaggcctccacctgcgacaggcagtagtacctccccattctcttcactgagtttggggcctgggatccccctggcctgaacagcccagtcttgcccacaaggatcccggggcagtcatggactaaattaatcctctgcccagcgggttgggccacaacatctgacccaggcgaatcctgcagagtggctggttgtgtgtgaatgaggaatttctttttcattgttttgcttgcctccctgccctccagtaccctgtggagagttcatggatcgccccagaactccggctgcagagtgatgacatcttgcccttgggcaaggactcagggcctctgagtgaccctatcacaggcaagccctatgtgcccctgttggaagcagaggaggtacgtctcagccagagtctgctagaactgtggcggcggcgagggccggtctggcaggaggccccccagctacctgtggacccacatcgggacaccatcctcaacgccattgagcagcacccggtggtggtcatctctggggacacgggctgtgggaagaccacgcgcatcccccagctgttgctggagcgctatgtgaccgagggccgaggtgcccgctgcaatgttatcatcacccaacctcgccgcatctctgctgtgtctgtggcacagcgggtcagccacgaactgggcccctccctgcgccggaatgtgggcttccaggtgcggttggaaagtaagcccccatcccgaggcggggccctgctcttctgcactgtgggtatcctgctgcgtaagctgcagagcaaccccagcctggagggcgtgagccacgtcatcgtggatgaggtgcatgagcgggacgtgaacacagactttctgctgatcctgctcaagggcctgcagcggctcaacccggccctgcggctggtgctcatgagtgccacaggggacaatgagcgcttctcccgatactttggtggctgccccgtcatcaaggtgcctggcttcatgtacccagtcaaggagcactacctagaggacatcctggccaagttgggcaagcaccagtacctgcaccggcaccggcaccatgaggtgagggacacccccatcccacccaaggctcctggcctttcctccgtggatgcccctcctccctggccctggggcttggtgcctggggcaagttaccctccccagtcctcggtttccttgatagaaactggggactaaccctgcctgcgtggcacacgtgaggattggagttgatgtcaagcggctccgtctcactgagtcaggtggctgtgtccttggcatgaccccttaccccggggctgtgactgtggcctctcttcccccaccccagtctgaggatgaatgcgcactcgatttggaccttgtgactgatctggttctgcacatcgatgctcgcggggaaccaggtgggtgcctccccatctgtcccatgctagccctggccacgtttgcagcaacagctggctcatgccccagggctcctttacaggtgggatcctgtgcttcctgcctgggtggcaggagatcaaaggagtgcagcagcgcctccaggaggccctgggcatgcacgagagcaagtacctcatcctgccaggtgagagccccggcggagggaccagggacctttggaaaccagcctgacctctgtcctagggactgacccaactgggactccaggggccccggtttctgaccaagctgtggcacttttcactgggcatagtgtttatctgcgcctgtttcatcaaaatggggtcaaaatc

SEQ ID NO: 29500 - DNA, 2300 bp, Homo sapien
aaaaaaagaaagcaagaattcaactatgttgtattaccaaggcctttctgtacccaatctcgcctcatattttttcttttttttttattttttgagacggagtcttgccctgtcgcccaggctggagtgcagtggcgtgatctcagctcactgcaagctccgcctcgtgggttcacgccattctcctgcctcagcctcctgagtagctgggactacaggcacccaccaccatgcccagctaattttttgtattttttagtagagacagggtttcaccatgttagccaggatggtctcgatctcctgacctcgtgatccacctgccttgggctcccaaagtgctgggattacaggcgtgagccaccacacccggccaatcatattttttcttgttactaattagaatcatgattctcctggcattcttcattttgttatacctcacttccttttccttagcaagatctttgccatagagtatggaaaccaggttccttgccagttaatctgtattgtgctttgtcatgtattgttactaaacagctcaagatcaaggggaagaaatgtatatgaggctcagttcatgttcagtttttttttttcagcattgcaacattgccactcatcatcatgagtgtagccctgtgtcaggtactgaaggtaatggaaaaggtatataaggttgatccctgtactcttgttgggaacttgagtggtatgaatagagaaggtgagttcttggggacagaggctacagtttagcaagctttcctatgcggaccttggtaatttctttacattttatagaccaaagaacaatcttaacttgcccttttttctaaaggcattgtttaaaaactgtcatcaaatcattgcagtttatggcaaatggcctttttttaaaaaaaaaaaaaaagcaatctaaatcttttcttcatcttggaaaaagacttctcttggatttctgatagaatatttccagtatgctatgttattgcaagacagtaacttacagctagacaagaaaaatcagctttgttcaaagtaagagtatagcctgtccttatagtgtaatttttttctcacagttttgttttatggttccttcagtttgaatatacaatatttgagctcaaagcccagggcagcaaaggaccatgctgagttaaatgggggcagtaagctctggtgagtggggaaaactccaagctacaattgttagagtccctaagtctggaggtcagagaaagatgcactgcccccagtgtgttcacatgacacctaacagattattaggctggaaagagcagggcttggtagtggagggagcaacccagctcatccaaggaaccaagtgggggcagggacaggcgtaaatgcataaggggtatgttgtcacacaaatgtcttataattagaatatctatccccaaagccctgatcactgaagtctttaaatgaaccctttattaaactcttccattatgcagagctacagatggagctcttacgggttttggggaccccactcaagtcagttttcaagttagtttgataagttgctatgacagcaaacccactcttcctctgagaatgaatgcctgcaatcttaatactacgttaaggtgtggttttttttttttttttttagtccaattttgaacaatttcctggattcattgttcttcagggttatagctggggattggcaaatgagtctcggttatttttaaaacagttttctgagtggttgaatgtggaagggtgggcatggtatcagataaatgagtgtgtgggtatgcacgtatctatatcagtgaaagccaaaataattactatccttagtgcttggattggcaccatactgtgttttaaattgcagatctaaacagagtgctagttcacgggaaattacattctcagattaaagtagcattttgttgtgcagaaagcagcaggttccttcctttctttcgctttcattcattcttcctttctttctttctttcacatttgtaagtgcatttaatactcaactgcttgaggagagaggggcattgagggagagatgaattttgtcatgaatactggggaattggtgtgatgtcactgcaagctctgtgtgatcgtaggtggtattagagctccaggagcgaaagcagggagagcagtggaggagagacgatgtcgctctcagacaagcagacagcctctctcactgccgcgtacggtcagctcagtaagggcaagcctgcagagtgccgaatggactccccaaaagaaatcagtcaagccggatt

SEQ ID NO: 29501 - DNA, 2300 bp, Homo sapien
gtttgtttgtttgttttttgttgtttttaagaaacaataacgaggagttttttgtttggaattttagccaacttcatgtattgcggtacccctcccacacaagccaaacaagtttgcagacccagtgaccgcaggtcaacccggcccaagcctgccagggtccctcctgagctgctgggaggctctcctccatggaagactcttgatcacaggctgggccactgctctttgtctgagtcaggttgggtctctggttcatcctcctgtggtgggcctgggaaccaaagaaaaagtattcatgttgactcacttgaaccccagagggatcttggcagggaggcctgggatatagaaagcacaccaataatgatgaagaaaaagaagaagaaaccaaagcaaaagagatattctcaaccacgggctggaggaccttcggatgatgacaatgcagataagcctaaaggtcatccatttgcagctgacacacaaaaatcaggtgttctccccagccagcctaccactatgggtacagaatatggacttgtatctggagaaaacttgaaaagggaatgtttagttaactccagtgcagccagactggtagctgagaactttgtctcagagagtctcagaattcctttatatccttctgaagaagcccccaaaactgcaataagttctcagtctaagctgagagtagaggaagagagcaaaagtaacaagtcagtactacaaaaccaagacaagaaattgctgaagcaacatgaatacaaaccacagcctgcaccccacctgaagactcctgtagataaaagccagtcagtaggccctctcaatctgaaaggacccctagcagaagtttctgcatacaatgtagaaacccctttggatatcagacttaaagagggttgctctcctttcttggaccaagaggttatgggtgtagtttcaaaacccacagcagcaaaagaaataccaaatttggtacccactttgatagcaagtaatccattagaatgtaatctaaaagaagggaataatgaaagtaaaatgactaaactgcagaatgtcaaactgaaggagtttcctgaaggagctgaagaggataaagaactaaaaaaggaagcttttcccaacgaaagacaagagatcagcatctttacttctgagcagctgcagggccaagtgttggtacaggtccctggggtagagaatgaaccatttaagagaatggcaggtgatggcaaaagcaggaagggaaggggaagttctgggaaaatgagaacagattctgggaaggtaaaagcaaaatctgagctgccatttcttctggacagccagaaggacggaagggctgttctcataccgagtgagccagtctctaaaactgaaggaatgactactcaggataagagtgaggagctggggctgaattcttcaaagcaaccaggcactaaggctgatctcacggaggcagtggtgatgggggagcctaaagagatgactcagcctaaggtggcaggcaccatgcaggcattgattcctttggaaagtggatcaggcatgactcagacttctggtgttagcacagaaacaggagatgtagtcaaagatatgggtgtcaataaccagagcaaggaaggaaggtgtccatggaaggatcatgaggcagctccctggatttctgaaaagcctaaaaagagaggcaatgaaggcaaaagcaaaaagtttaaaaataattattccacacagcctgctagaatggagaggaaggaagaaatccttaacccaccttttgaagggaaggatggagatactggtagtattccccataaaagcaaggaaataggatttactttccccaaaatgcatgattcttcgttctcacatacaccagatacacccacagtggaagcagttgacaggaagggtggaaattttcaggttaattttgttgagcttgggactcttggggaaaacaagataagcacagtcaaggcttctactgttactgaaccacctgccaaggtgacagatgtgagctgccaagagcaaatccagggggcaggatttgttccttcagtagtatctgaggagaataagacagatgcagccaatagatacactgcagtggctgacaaaccaagtaaaaggagtaatgatggaaaaagtaaaaaggttaaaaatagttctcctgagaagcacattctggagaataagatagatgcaacaaaaatacatgttcccatggaaaccacaggggaccagggaattgaaggaatggcctatatggacgaaaa

SEQ ID NO: 29502 - DNA, 2300 bp, Homo sapien
aaaaaatttaaaaaattagccgagtgtggtggcagaagcctaaggtcccagctacttgggaggctgaggtgggaggatcacttgagcctgggaggtagaggctgcagcaagccatgaccgtaccactgcactccagtctgggcaacagagtgagaccctcccactgggcttaagcgatcctcccaccttggcctccaaaatgctgggattacagctgtgagccactgcctggccctggggaaaaataaatattaaagaaatttcggacccttcagccaggcacggtggctcatccctgtaatcccagcactttgggaggctgaggcgggtgaatcacgaagtcaggagttcaagaccagcctggccaagatggtgaaaccctgtctctactaaaaaaacaaaaattagccaggcacggtggcaggcgcctgcaatcccagctacttcggaggctgaggcagagaactgctcgaacctgggaggcagaggttgcagtgaacttagatcgtgccactgcactccagcctgggcgacaaagggagactccgtctcaaaaaaaaaaaacaaacaaaaaacaaaacacttaggggcaggcatggtagctcacgcctgtaaatcctagcactttgggaagccgaggcgggcggattgcctgagttcaggaattcgagaacagcctgggcaacacggtgacacgtctctactaaaatacaaaaaaaattagctgggcgtggaagcgtgcgcctgtagtcccagctactcgggaagctgaggcaggagaattgcttgaaccggggaggcagaggttgcagtgagctgagattgttccactgcactccactctgggcgacagagcaagactccatctcaaaaaaacaaaaaacaaaaaacaaaaacacttcggaccccaattcactattccaaaaggaaaaaattaagttgaaagctgagtcatgcacaaactgcctttcattcctaagcagacatacttgacataatacacaattgactattcccctacctgctccttttctcttgttccctccctattttccctccagcccacttttcccctttaaatactgaattcctcaaattcatctttggagaaaggcagagaccacagactgtttctgtgattctgtgttttttcctttcaggaatgtccttcaccttggcaaaataaatttctaaatcaattgagacctgtctcagatacttcttggtttacagaagggatggaagattccaatacttttgagttttcctagccatctaactacaaaggagctcaaagccaattctattcctgaagtctgggacaggaatatgctggctactccaggcagcaggaagaatgatcaaagtaactttaaagctcccacctgtgtgttttcctacaacagtaagttaaggattctacaaaatctggggctttggaatgaagtaatgttaatttcaacagaaaaggaaacctattttttttatttgagacagggtctcactctgttgcccaggctggagtgcagtggtgcgatctcagctcactgcaacctccgcctcccgggttcaagcaattctcctgcctcacgttccgaagtaactgggattacaggcacttgccaccacgcccggctaatttttgtatttttagtagagacgaagtttcaccatgttggtcagggtggtctccaactccggacctcaagtgccttccagagtgctgggattacaggcgtgagccaccgcgcccggcctcaatatttcttagttaaccaaatataccccaactgtcatcaattttgttataattaattatcccacttgtaaccatttaaaaattatagatgagtttttttttttttttcggtactaagtcttggaaatttggtgtgtattgtacacttacagcacatctcaacttgggccagccacgtttcagagctcaccagccacatgcggctcacgggagcggagccccgccgaggacctgtggcgtcctcccgctcctctaagggttccttccagagcccagatggcccgcgacctaggccccgccccgcgcccctcccaagttacatcacagagcccacaggccccacccgctggtggcccggtccgcgtgtgcgccgactctcgcactctcctcgctccgggcgcccagactctgagagagagcgacggccatcatagaacagcgaaggcagtcgatcggcctgcggtccgcttcggcattcgcaggccgcaggcgggaggctagagcccccaggcgcacctcgccccaaccgcccgcggctcgg

SEQ ID NO: 29503 - DNA, 2300 bp, Homo sapien
ctcccggcaagtacggcgttcctcctcacctcctggctgccgagggccgtttccttagaaagcacttcccaccagccccaagctccccttctccagcaaccttgacctttagttttaatctcctttaggacgtgccccccaccgtactgccttccccagtccccgcccctcctctaggtgcccaccatccctccacaaaccacagctattgtcatggtaataattccattattagaaggagctttatgctcagcggaccagagctccctgagagcagggattgtggtattatttcaagcactgaatttgttctagtaatccttaaataaacatatgttgaatgaatgaatgcagtaacaggaatgttgagccaagttttgtttttgttttttgagacggagtctcgctctgttgcccaggctggagtgcagtggctcggtcttggctcactgcaagctccgcctcccgagttcagccattcttctgcctcagcctcccgagtagctgggactacaggcgcccgccaccacgcccggtaattttttgtatttttagtagagccggggtttcaccatgttagccaggatggtctcgatctcctgaccccgtgatccgcccgcctcggtctcccaaagtgctgggattacaggcgtgagccaccgctcccggcctgttgagccaagtattaaaccacataaaacacaggaggagaggaaagtattcagagatacgacagggagaactatttgaaacagtgggaccacagaccatgtgaactgtgcagagaggcctaaatagcctggggtttctggagggaagggaggttcctgggtggtggagcactggtgcacagaaaaggagatgaatcctgagagagaggttcctcactgtgaagggtctggtgttggggccaaaggtttggggtttccacctgtccagcatggcttttcaaactgtagggttttttttttttgagtggggggcagggggtgtctcactttgttgcccaggctggtctcaaattcgtgggctcaggcaatcctcccacctcgccctcccaaagtgctgggatgataggcgtgagccactaagcccagcagtaggttgcaattaaatcatgcacttatggccctcaaaatccgtctaggagctgccacaggttcggcgctgtaaaagtaaatatgcccacttagaaaatggggataattcctatgtcacagagttgtaaagattaaatgaattaatacagattaacacactgggaacagtgtcaagtgcataagcattatgtaaactttagctattatttgctattattgtgtttgctgttatttctctctaggagctcccagggggctaagaagtggtgggaaagaaagaaatgattctaagagcatccaataagggctagaatggaagtgagcaaaaaatgctgaggcccacagcacaggttgtactgcggggttcaaatcccatgaggccagcagcacccagggtctgtgagccctccagagttgggccctggtggtcgagtccagtcctgggggtcattgcattccctccctcattataaaatggggcctggaggcccggggcggaagaaaggggtccacaatactgcacggttagaggccgagccaaggctggatccggccagacctccacaggtcttccttagcctccacattgcctcagagtgtggggcgcccggctgggggcgaggtagcggaggcccaaagggggccgaagctaactggacggcagctcgcgatgggaactacgcttcccagcatgcgacggggcaaaggggcctttcagccgcgagcagcgcctcgcaggttctgctgggagttttcattgacctctgctccccctctcattttgatccccgctcttctgctctgggctccgcccccttctgagagccgatgacctggcagagtcccgcgagccgctttcttcttcccctctcattggcccagcctagctgccattcggttgagaggaggagaagttgcttactgattggtggattccgtttggcgccaactaggaaaggggggcggggcagcagctggccccactgagccgctattaccgcgaaaggccggcctggctgcgacagcctgggtaagaggtgtaggtcggcttggttttctgctacccggagctgggcaagcgggtgggagaacagcgaagacagcgtgagcctgggccgttgcctcgaggctctcgcccggcttctcttgccgacccgccacgtttgtttggatttaatcttcaggttgccggcgcccgcc

SEQ ID NO: 29504 - DNA, 2300 bp, Homo sapien
gttcagtttgtcgtggcatggggttgggattgagaactctcaggctagaagctgcagatggcctcctgtgaatttagtgcctaggtgattataccaacagcaagtagaattgcaattgcaaatttcacacatatactcacacacaagtacacacatccacttttacaactaaaaaaactagcacccaggacaggtgcagtggctcacgcctgtgaccccagcagtttgggaggccgaggcaggtggatcacctaaggtcaggagttcgagaccagcctggccaacatggtgaaacctcatctctactaaaaatacaaaaattagcagagatcttgttagaaatggaaattctcagacctcaccctagacctattgagtcagaaactctggggttaaggcccagcaatctgtgtttcaatgagccctgcaggtgattctgatgcacaatgaagtttgagaaccaatgccttagaacaatagcagcacctgagcttgaagaaggaccaacttggagatgaaaccaaggctctgagaggttgagtgatatgcccaggatcacacagcaagctaagcacagggctggacagtcccccaggcctcctggccaacctggggcatctccttgctgccagactcctctggaccctccacatttgtccctcctctgagaagggagaggaaactctaggtcttgaccttgggcaggaatatgctacccctcccagcccccacgacccagccctggctaatgccaaccatgtctgacccctccttccccagatcacgcgagccctcagaggcttaagaaaaaatctcctggctgggcgcagtggcttacacctgcaatcccagcactttgggaggccgaggcgggcagatcacaaggtcaggagatcaagaccatcctggctaacgtggtgaaaccccgtttctactaaaaatacaaaaaattagctgggcatggtggtgggcacctgtagtcccagctactctggaggctgaggcaggagaatggtgtgaacccgggaggcagagcttgcagtgagccgagatcgcgccgctgcactccagcctgggcaacagagcaagactccatctcaaaaaaaaaaaagaaaagaaaaatctccaagtggccgggcttggtggctcatgcctgtaatcccagcactttgggaggcagaggcaggcagatcacctgaggtcgggagttcaagaccagcctgaccaacatggagaaactctgtctctactaaaaatacaaaattagccgggcatggaggctcatgcttgtatcaacctactcgagaggttgaggcaggagaatcgcttgaacccgggaggtggaggttgcagtgagccgagatcacgccattgcactccagcctgggcaacaagagcaaaattccatctcaaaaaaaacaaaaaagaaaaaaaaagaaaaatattcaagaagcatttcaaatggctgtttccaaagcagtcaaaccaaaagcctgtgcctaagactttctttttttttttttttttttttttgtaaaggacatatcatatttattcatacacatgctggaattattggtgcagacatttaaatacattttctttgagaaagtcctttttttttttttttttttgatggagtttccctcttgttgcccaggctggagtgcaatggtgcaatctcagctcacaacaacctctgcctcctgggttcaagcaattctcctgccacagcctcccaagtagctgggattacaggcatgcaccaccacgcccagctaattttttttatttttagtagagacggggtttctccgtgttggtcaggctggtcttgaactcctgatctcaggtgatctgcccgccttggcctgccacagtgctgggattacagtcgtgagccaccacagctggcctgggaaagtccatttttttttttttttttttttaaatttatttttttattgataattcttgggtgtttctcacagagggggatttggcagggtcatgggacaatagtggagggaaggtcagcagataaacaagtgaacaaaggtctctggttttcctaggcagaggaccctgcggccttccgcagtgtttgtgtccctgattacttgagattagggattggtgatgactcttaacgagcatgctgccttcaagcatctgtttaacaaagcacatcttgcaccgcccttaatccatttaaccctgagtggacacagcacatgtttcagagagcacagggttgggggtaaggtcacagatcaacaggatcccaaggcagaggaatt

SEQ ID NO: 29505 - DNA, 2300 bp, Homo sapien
gaaaccaggttgcacagaagcccacttcttccttctctcaaggccaggtgtgcaaccggtggccttcgtccaggcttccaccttccaggagccctgctgtccaagcccccaagtgtcccacaggccaactgaggtcaagaggtaccccaggcctcagggccacatggccagtccacagaggagctgggaccggaatttgcctcatggacgctggacccctctatcactttggccctttatctctcctggctgtgatctctccctctcccaacaccagccacccatcccagcttggtgtctcagctagagcaccaaacagggagtaatttgaggtcgaatcaggagagacttcctggaagatgtaggggcaaagaggagattgctgtgcctggttggaggtcagggaaagcttcatgaggtgaaagggcaggccaaacagaaggatcggggcagagctgggagaaagagcaggaggctcagatgagcctatgtgatgggggcatacgtgacagtctggcacttgcagtgtgcagggctggggtgagggcagtgggaaccaaaaggccacaggccctgatgccagcctagggggtgtgtgggctcctgaaggtagagggttgaaatggccaaattggtggtttaaaggaacccctggacaacggtgtggagggtggactgtggtctggggagagcctgaaacctagagaaggtggagtctggaggctggggcagcattgcatgggagagaagatggcggcaggagccaggcaggggtggaaggagaggccagaggggagtgctttcgggaggaaggagccaaaggtgcttcagggctcatgcagtgggcactcagcagaagagcagtcaaggaggcccagtggggacaaccgggacgttcatgggagtctcgaactcagagatacagactgggtggtgtctgcctattataactggtgtcctgggagagggcgtccccagggaaacccgaggccagggaagagaagcagcccaggaggtgaccccacacgctctcaatattaagaagacagcccttaggggagaccaagaaggagccaccagggaggcaggagggacagcaggagagtggcatcaggggagaccggggcagcaagaaggaaggctcaccagtgcctgtgcagacaaagaccaggcttgagggtggccatggaccaagggtgggttggccagccttcagtggccttcagcatgaagaagagtgaaaagatggggtcaagaagcgtagacaacctttcctaagacttggcttgggagaagccatggtgaaaggccatgtctggaggggcttgggaacattttgagactgaaaaaaacagtgaagaaggatgcagaaggggatagatggagcagagccttcgtctggctgacggctgggtccagagagcatgtggtatggccttgaactgaaagggcaacttgtcccttgcaagagtgagtctctaggttgggggtggctactgtcttcatttaccagttcttttttttttttttcatactgagtctcactctgttacccaggctggagtgcagtggcatgatctcagctaactgcaacttctgcttcccgggttcaatgggttcaagtgattctcatgcctcagcttgtagctgggactacaggtgtgagccatcatgcgtggctaattttcatatttttagtagagatggggtttcaccatgttggccaagcttgtctcgaactccttatctcaggtgatccgcccaccttggcctcccaaagtgctgggattataggcgtgagccaccgtgccctgcctcattcatcaattcttaatcgatgcctacagggtgccaggcaatgcctagagctggagatttagcagtccatcatactgactcctgaggagtagaaggatgtagaataggcacctggctctcttcctctctggagggatttaacgctcttgagcacccctggctatgacaatctccggtcaggtctgggaggttgtcagagatgaagaaaccacttcctcatcttgcacacaaggaaggcctcactcactgcccagcaagtcctgtgaagcaatagccaggggctaaagcaaaccccagcccacaccctggcaggcagccagggatgggtggatcaggaaggctcctggttgggcttttgcatcaggctcaggctgggcataaaggaggctcctgtgggctagagggaggcagacatggggaccatgaagacccaaagggatggccactccctggggcggtggtcactggtgctcctgctgctg

SEQ ID NO: 29506 - DNA, 2300 bp, Homo sapien
ggcgcatgcctgtaattccagttactccggaggccgaggcaggataattgcttgaactcgggaggaggaggttgcagtgagccgagatcgcaccattgcactccagcctgggctcaaaaaaaaaaaaaaaaaaaaaccaaccttggccgggcgcggtggctcacgcctgtaatcccagcactttgggaggccgaggcgggtggatcatgaggtcaggagatcgagaccatcctggctaacaaggtgaaaccccgtctctactaaaaatacaaaaaattagccgggcgcggtggcgggcgcctgtagtcccagctactggggaggctgaggcaggagaatggcgtgaacccgggaagcggagcttgcagtgagccgagattgcgccactgcagtccgcagtccggcctgggcgacagagcgagactccgtctcaaaaaaaaaaaaaaaaaaaaaaaaaaaaccaaccaaaaaaaaaaagaatccaaaaatattagcggggtatggtggtgcgtgcttgtaatcccggctactcaggaggttgaggcaggagaatcgcttgaacccaggagagggaggttgcagtgagccgagatggcaccactgcactccagcatggtagacagagtgagactccgtgttcttttccctaaaaaaaaaaaaagagtaattggggaagttgtgcttcaaaagagtaattggggaagttgtgcgtcttagggcctctggaataatggctggtaatatttagaattccagcccttctcatcctaatttggtggctggtggcctttcattcattttacaagaacagtttagcccttgggaagggctattatttaagctataaactgaattccttcccaaggctactttggcctatgcccagaagtggacaaagacagtttagaggttgaaaggaagatgaggtgggttagatctgatatcttttactgtcattgataaggctctgatgactggaggaacaccagggtccttggtctctgataggcttaataacacagacacacgtggagtggttttaaggagcgaaaagtttaataggcaagaaagaaggaaggaagacgaaaacagctcccccatacagagacagagggagcggggattccaacaaagagaaagcgccgtgtgcggaaaagtggctgcttatctgaggatgctggaggaggcggtgtctggtttccatagggctcaggggattagtttgatcagatgtgtcatttatgtggcagccaaaaacctggccctcccaccctagctttttaatatgcaaatgtagggctccatgaagttctacacacgtgggaatatgtggggggtggccatgttgccaggcacatgtcagggcaaagaaaaggacggcgggaatcgccatgtttgggtgcgtccagtttctaatggcctgtatttccatatcaaagcttgccatcctgctctaggagcccaggctttcctgctagacaagaaacctttctggagctgctttaaaagaaacaaaaacttcccaaggacccctttccttctctatctgcttaaaataatttcttaataactcctataacatcataatttccttaggtataattttgcaaaggcggtttcaaaagctctttggggtcctcagtaatttttaagagtgtaaaaggattttaacaacaacaagtttgcgaaccactgtccttgagaagctctccatggatgcgcatgagtctgtccaattggagtcctggtgtatttctacattagataccacacagcagtgaacacacaatgaacaggtcaacacgtgtcattatagaactgcgcaaaagagctagtagcaggcattgtaagtgtatttatataatgtttacaaccatggaaaacaacactatattttgcttatgggtacctgtggtaagcacaaccccaaatattgcggccgagggggacctagaaggtcaaagtgcgcctcagcattttctctcgccctgcacaagccgcatttcgccccgagaactacgcttcccggcaggctgcgcgccgcgcggtgacgcacttcacccagtcctgcttctttcttctggcgccgccagtggcccgcggtgcgcattctaatccgtttcacacacggtgctgctacctcgtttgcttcgtgcgtgcgtgcgcgcgcagatgtgggccccgcgggagcagctactgggctggactgcggaaggtgagtcggggccgcgagatcgcctcccccattcggtgctccagccgcaggcgccgcgcaggcgtcggccgtatccaccagggat

SEQ ID NO: 29507 - DNA, 2300 bp, Homo sapien
cctcttatgccatagcatcctggcaatggggaggggtttgagggtgggatggtgaagagattctgggattccattttattggagcatttttttccccttgcttctcataaggtgtctgtcggggagagatctgtgtcacttattgcagtttgttgcatgctggaatgctgcagattctggaatgccatctgtatcagttgtctggaatttggtttcacataaggttcttgtcttctgtttaactggtttgctgggacttctgaagtcctgatgatcatactgggaaggcagactcaggggtggcgatgctggctgtggccctcatctgctgggccatggtggttattgtgttgcttcttttgctgtgtcctagaacaggggctttactgagccacccatgtcctctgagagctttgcaacttacaaggactgttctcttccttcaggggctgggatgacttgctgatttaagcccctttgttgagatacagaggtattgtcataatgactgggacttgtgttgctcatctttgaggaagatttgtttaggcttgctgttatccaccatatcttttatttagagtagtttgctggctaactcactgggtcctttggcctactgcagattcagttgctacaactccgtcagtgattccgtgtagggagaagtaatgggttgtcatttttggagtcagggttgggggcctggggtttgagaatcaggtcagaattcatgggttgaggtttagggatttgaggttgggattaggaggttagaagataagcatcaagggctcaggatctagagaccaggtctaggattaaaggattataaatttagggactagggcttgggttaggattggaactgagtagcagaggagttaagattagaatagggggtggtggtcaagggtctaaacaaaaagagaagagatgcaagggtctgcggagagactggaaaaactttcctcgtaagttcccaaaggtgactgggtatcaggaaactattgggaagtggcttcttattgctgcagggacagaagccatgagttggggataaaccttccaagagggcaacacctgtgtaggcagacaccgaagtcagttaaatgtgcaagtaagtctttacattgatgacagttatcgtttattttcattcttctcattctcagtgatttccctcaaaaaaaaaaaaaaaaacccaagaaaccaaaacactttttttttttttaaccatctttattcaacctgtcaccaagtttctggtcacctgccacagctgacccccgatccattctccctgtccccatcctctccatacatcacagtacacaccaggaatacccccagttctcatctcctcaccctgggctgcgtcaatagactccagagtaacccaaaccacaccctgctgcccagattcctaatgacacgtgaaaggccgttatgacttgctttcctcatgccctatgcacacctgggctccagccaaggatcctccttcatcaacccccatattagctacgatccttcatgctaatgtatcgctcagagctcaaaagactttgaagggcctgtgccttcgctatcgagcgcttaagttctttgccctccgcgtacttttgacaaatactgggcatcaaccatgttccaggaactaccctgggcaaagaaaataactgggcaaggtttccatcggtgtctctgctggcgggcatcgcccccgccgggccgccaccctgaacgagcccgtccggtcctctgggttccgccaccctgcgtagcgctgcgccagcacccggcccagcactccctcccgccgagggcgcccaggccggcttccgagggcgcccaggccggcttccgaggggcggttcccacaagcgagttccggcgcccagaacggcttcatcctctcgtcccgtccgcggcaaatgcatgcgcctggaaaacccgccaccctccagggcaactcacacctcacctcacgccgcggcgcaaccggactaggaccccgagcagggctgcccagggagcgcctgaaggaccctgcgagggccgcaggctatccagcgtggcgcctggtggccgggccctgtgccggaggacaaggtgaacccgcagccggacttctgctgcactggggctccgaatgacccagaatctggggtgggcttaggccccgggtacgaggggtgagggctgcgcggttgcaggcctagagaagtagggggctgggtcgagagttgaggccgtgagcccggggggctggagggcgtggccacgggggtaggggc

SEQ ID NO: 29508 - DNA, 2300 bp, Homo sapien
aggagatgattgtgggtgtgggctgtagcttggttcgtttgcataaaaggcactctcctttgctatctggctaggcctgggaaggagagtctctccccagtcagcaagatcacaaatgccagagcatcaagaatacagaaaattaaaaatatacagagaatacaactggccctgtgatggatgccagacaaattcagaatctaagagaacacggagcaccctggcaaggtggccagtaataggacttacctcatctagccgttgtgaggattaaatagatgagcccctgtaaattgtttagacgggtgccttgcctgcagaaggcgccatgaaaggtgtgctgttacttctccccttgctacgccccctttacttcccatgctgtgtcgtccctccctctctgtcctactctcaggctgcccaactccttatggatccctcttctcaggtttccccagctgcctgctttaatctactttctcctagacaatgtccggaccattctctcacctgcatcttatcttttgcttagactattacgcagttaccatttcacatctctcaaattttacatctcttaactcttgtgacatttagatttgtcttcatctattgttgcaatgtgtctttctctgccgcttttctggtagcaccccgccaccaccaccccccaacacaccttcctgttcctctattttttttgttgttgttgttgagatggagtctcgcactgtcgcccaggctggagtgcagtagcgcaatctcagctcactgcaacctccacctcccagcttcaagcaattctcctgcctcagcctcccaagtagctgggattacaggcacccgccaccacgcccagctaatttgttgtatttttagtagagacagggtttcactatgttggccaagctggtctcaaactcctgacctggtgatccacccgcctcggcctccccaagtgctgggattacgggcatgagccactgtgcctggcctctgttcctctatttcaaattcattcattcactcattcggcaatttgcttcagtttccttatgtttgcctctttctcatctgtcctcttttccattttattcctactctgtctcagtccacttacagttatatttcctatctgtgtattttataatatttgtgctttaatacttttaaaatatcctttattttactgtttcttctcttcccttgtcatattttaaagtgttttatttctcagccttctatatctttgcattaattctgttcctctacaatagagtccgttccaagctttctgtcttcctgtgtccttccacggctctggctctctctgcattatttcctatttatggaatacaaatcttttacccttgtatttttctcactcctctccacacaccccttgactcgcctttccccacgcccctctaggtgcttcttggtctttgcttttcctttttatttcctcaccatgtcaatttgtatttttcctctctcttactactgtatcataaatgggactcccgacaaccactcccgtgtgtctgcctggaggcagcagttttaagaagggttggccactgagcctcacagagggacccctgtcttatgctgcagcaaagtaccatagactgggtggcttacaaacaaatttatttctcacaattttggaggagagaagtccaagagtcacctgtcagcacggtcaggttctggtgtgggccttcttccaggttgcagctgacaccttctcatgtcctcgcatgatatgaacagggctagagagcgttctggggtctcttttataaggtcactggtcccatcataaggactctgcctgtgacccacttacctcccaaaggccccccacctccaatcacaccaagggttagaatttcaacgtaggaattttgagaggacacaaacacccaggctatgacacggtctttagaaaatcccagaatgagttgtcaggttcttgggagatctgtaactgtgggaaagcgtcacatcccagggaaagccaccagctgggagagccatcccagacaaggcctgctccctttgggcggacctctgtggagaagccagcttggcacgttctttctcctccactgcaaagttaaatgcgagaaggtagaaacccagaggccatgctggcgctgagagatgagccccactcaccagattcaagatcccaaggtaggcacagacacagggcaagcagactccaattccaggagtttggaacttaaatagagtcatagagacactcagatctgatcaaagtgagtgcactc

SEQ ID NO: 29509 - DNA, 2300 bp, Homo sapien
atattactgcataggcaacttgttatagtgtgaaaaatcaaaataatgattacatttgggtgcggagagccatgggggagttgttaaatagagcacatgcaaaggggacttcaggagggcttagaagtggtacattggtaatcacttgtgataatttattaaacttcgtgctcttttcttatatgatatactttacaatttttttaaaggctaaagaatcatctagaaagacaactattctatcttgtatgtaatgtacaaggttgaataacaattttaatgatagttaatacattttgggttcctactgtgtcctaggcagaattctaagtatgtttcatgagatgtgaaaggtaatgacagcctcattagaaggcatgatagaaagtgacttgctgaaggctgcactgtgagtaggaggcagaggtgatttgaacctatgaagtctgatcattctttgcgcctgttatgtaccaagttcttgtctcggagcataatgtgtagttcctgttttcatgttcactcctccaaaatattgagatgtggagaactttcatatcctctgcccagaagcaagaagatctgatttggaagaggcttccaaataaacatgggcagaatgaaagcacagtaggtgtaagggttccttgaacacaggtcgtgttactctcgttttctagggtaccatgatctggtcaagcccagtccaggagttccatttctcaaatctggtaaccctccctcagatgcatctcgccatcactatggatcggaaaaaaactatcaaagtgtggaactgtcaggacagggacgctctggctgttctccccatgccacagccctgttattgcatggaagcctatcttacaaaggatggcccattcctgatggtaagtgagccctgaatttagaggggaccaaaaaatcaaatgcctgttgtcttgtcaggcatccgtgtcacattactgtcctatcccttttttttttttttttttggagacagagtctcactctgttgctcaggctggagtgcagtggtgcaatcttggctcactgcaacctctgcctgctgggttcaagcaattctcctgcctcagcctcctgagtcgctgagactacaggcacacaccaccatgcctggctaattttttgtatttttagtagaaactgaccaggctggtcttgaactcctgacctcgtgatctgcccacctcagccccccaaagtgctgggattacaggcataagccacagcgcctggcctatttctcttgtcatcccttccacataccctgcgagtcaatcacagtatatcaatgaatgttatacaaacctccacactatcttgccccttgacttgcctcaagtacatttccccagcaattcttctaaagacaaaaagccaaaaacttcctgaattactttatatgtgccttttctttcaagtggtgttattgtccagtccatgaacttggttggggacagttgagggagaagagatggctttggggtgacattgagaaaaagcatagtgttgatgtgctaatgaataactgtccttgagaagaatgctttggggcttggaaagttttattccatgggattatcccaacagtgtctcaagctagactggtcagaggttttgatctccattatgtgattgaagaaacagtggcatatcttgcagctcatagtgctgcctcctctgtacttcaggatttcacatatcttcctattgatatggtggggatgctttggtttcaggttggcgatgctgcaggtgacatctacacatttacactgcctgggttaagagatgtttctaaagttactgcatttcaatatggtattgtacttctacactgctctcctgacaagaaatgggtatttgcatgtgggacatacagtcgtaccttgccacaggtaggtgctgttctgtgtatttcaatttcaggataggaatgtcaagttaggaagcatgcagagaaactgcagagctcagtgaggaccaggcacactgctccttcctctctaagaccacatcacaaggggaatccattgtgatggtcaggaaacaatgctctttgaagtaacaacatccagttgctgtggcaaatgtttaacaaaaactcgttcatgaagcccgaatttgccaaagagatggaagagggtgagacaggtatcaagaaatagggattgctgggcatggtggcatgcacctatagtcccacttactcagaaggctgaggcgggaggatcacgtgagcccaggagttccaggccatagtgtgctatgctgat

SEQ ID NO: 29510 - DNA, 2300 bp, Homo sapien
gtctttgcagctccactatgtgggggtttgtagggctttatgttgaggcactgagaatcccatgctgctagtaggggcaaggggtcgtgtggtttggggctggggctgagctgacctagccgggactgggctgtgctttaggtccaggtaacataagccatcttacgttacgtaagctcacggtctgtttcagtggaggacgtgagatatgcgtccgtggccagaatctggacgtggtacagacgccaagaatccgggtgaccgtggtctcgagaatgctgcagcccagccaggggcttggacggaggcgtcgcgtggtcccggagacggcatgttcccttggaccctcctgcagtagccagcaagtaggacacccttgggtacccccacactctccccttgccccataccacaccctggggacagccagagcaggtgccagaggaggctcttcccatctttgcttggcccctcgtcaacctgcctgtcttccttccagtttgaggagccgtgccatgtcaactcctcccagctcatcacgtgccgcacacctgccctcccaggcctgcctgaggacccctgggtccgggtggaatttatccttgacaacctggtctttgactttgcaacactgaaccccacacctttctcctatgaggccgaccccaccctgcagccactcaaccctgaggaccccaccatgccattccggcacaagcctgggagtgtgttctccgtggaggtacagctcctacttggacctggcagggccccgagacccttcccttggctggacagcactgctgtgtgtggcggagaggccgagacagtagagcaagggccggtggatggacatggctcctcatccttgctgtggtgggggcagagggggctggtggggggtgcctagcctagcatctggcacgagctggactgcttggctggtggcccgggtcctgatgcactccatggcaggctctggaatgactgcatttgtatgttcggcctgtgcagtagctgggtggtgtggtccacataggccatcgggctgacccccgttggcagcctggctcacatggacatgcgctaggcatgtgtcttggacatacacagtgggcagcagatgggcatgcgggcagaccacaggttgatacagcatcatcacccccctggtgagtcatcagacacagattgggggctccagctttgttaggtagctgggcaggatttgggaggcagctttatgttctccagatttttcgttctggagaagaaagataggaaagggcaacaaagggtgatgaggagcagcttggaggacactgtgtgactggcctgcactcgggaagggtgctgagaggctgtcagctttgctgctgcggctgggtctcagggtccttcccacatttggggaggacaggatctgagggaagggtcctgagtgactgatcggtgaccctctgttccagggggagaacctggaccttgcaatgtccaaggaggaggtggtggctatgataggggatggcccctgtgtggtgaagacgctgacgcggcaccacctgtactgcgagccccccgtggagcagcccctgccacggcaccatgccctccgagaggcacctgactctttgcctgagttcacggtcagtgggcaggtccctggccgggctgggcattgacctgggccaaacccttgctcacaggtggctcctgacacaggtgcagatggggaacttgcgcttctccctgggtcacgtgcagtatgacggcgagagccctggggcttttcctgtggcagcccaggtgggcttgggggtgggcacctctcttctggctctgggtgtcatcatcattgtcctcatgtacaggtgggtgcagccagatgtggctgggctggggcaggtcgtgggatctggctggactgggaagggacagaccgggccaggagtcaggaaacattctctgtaaatggccagagagtaaatattttcgctttgcaggccaagtggtctctgttcaacaactcagctttgccactgtggcacaaaggcagccagggacgacatggaaacacatgaaagtggctgtgttctaacaaatctttataaaaataggttgtgggatggatttggcctggttgtggttggctgatctctaggctaaactgtgctgggctagacggggcatgggtgtgtgtgacttgcttgggacgggacaggctgaatcgtactgggctaggcttgagcttggctggcatggctgcattggactgtgctggatgaggccggggtgtgcct

SEQ ID NO: 29511 - DNA, 2300 bp, Homo sapien
ccctgaatggctccaagctcctgactgggcggctggaggacatccgagtggtggttggagaccagccttgtcacttgtgagggccacttcctcatcctgcaaaaatccatctgctccaggggaaagatggaggggtctgagatcctggggagagcagaaaggggaagagggccagtctgctccttcagagagtggccagaccctccctagccagctgtggtgggagtgcacctccagggacacctggtggagactgcagtcagcgcttgagggaagccagttggggcctgagtggtccaagttttccctgcctgcgcccctgcattcattcccacctcccctcccaggctgccggagcagcagtcagaacaactgcggtgtgagaccagcccacgccccacgcctgccacgctccctgtggctgtgtggtttggggccacggagcggaggcttcaacgcggacagttcaagtataccttggaccccaacatcacctctgctggccccaccaagagcttcctcaggtgttgggccaggggtgtggctgcatggcaggtggcagggaggtctttgcagctccactatgtgggggtttgtagggctttatgttgaggcactgagaatcccatgctgctagtaggggcaaggggtcgtgtggtttggggctggggctgagctgacctagccgggactgggctgtgctttaggtccaggtaacataagccatcttacgttacgtaagctcacggtctgtttcagtggaggacgtgagatatgcgtccgtggccagaatctggacgtggtacagacgccaagaatccgggtgaccgtggtctcgagaatgctgcagcccagccaggggcttggacggaggcgtcgcgtggtcccggagacggcatgttcccttggaccctcctgcagtagccagcaagtaggacacccttgggtacccccacactctccccttgccccataccacaccctggggacagccagagcaggtgccagaggaggctcttcccatctttgcttggcccctcgtcaacctgcctgtcttccttccagtttgaggagccgtgccatgtcaactcctcccagctcatcacgtgccgcacacctgccctcccaggcctgcctgaggacccctgggtccgggtggaatttatccttgacaacctggtctttgactttgcaacactgaaccccacacctttctcctatgaggccgaccccaccctgcagccactcaaccctgaggaccccaccatgccattccggcacaagcctgggagtgtgttctccgtggaggtacagctcctacttggacctggcagggccccgagacccttcccttggctggacagcactgctgtgtgtggcggagaggccgagacagtagagcaagggccggtggatggacatggctcctcatccttgctgtggtgggggcagagggggctggtggggggtgcctagcctagcatctggcacgagctggactgcttggctggtggcccgggtcctgatgcactccatggcaggctctggaatgactgcatttgtatgttcggcctgtgcagtagctgggtggtgtggtccacataggccatcgggctgacccccgttggcagcctggctcacatggacatgcgctaggcatgtgtcttggacatacacagtgggcagcagatgggcatgcgggcagaccacaggttgatacagcatcatcacccccctggtgagtcatcagacacagattgggggctccagctttgttaggtagctgggcaggatttgggaggcagctttatgttctccagatttttcgttctggagaagaaagataggaaagggcaacaaagggtgatgaggagcagcttggaggacactgtgtgactggcctgcactcgggaagggtgctgagaggctgtcagctttgctgctgcggctgggtctcagggtccttcccacatttggggaggacaggatctgagggaagggtcctgagtgactgatcggtgaccctctgttccagggggagaacctggaccttgcaatgtccaaggaggaggtggtggctatgataggggatggcccctgtgtggtgaagacgctgacgcggcaccacctgtactgcgagccccccgtggagcagcccctgccacggcaccatgccctccgagaggcacctgactctttgcctgagttcacggtcagtgggcaggtccctggccgggctgggcattgacctgggccaaacccttgctcacaggtggctcctgacacaggtgcagatgggg

SEQ ID NO: 29512 - DNA, 2300 bp, Homo sapien
atgtgcctgaaatggaggagaaaaagtcactgctcttctttctgtcctccttccgacacccatggtatgtgtggaggggcaaggggtgctaggtcctgattcacagggagactgctggcagaagcctgaccactttccctggagtgggtcagcggccgacctcctcagtggcctggccaggagctgttctgatcccgcccatttcttcctgttgtctcctcatccagtgttttttttttgtttttgtttttaaccattttttcatctcccaaggctctgtcatgcatcaatgcagttttgatttcacatatggggagtggttttgttactgccccttgagggctggagaactttggcacgcagtaggctctgagcaaatatttgtaagcatgtaggagtgagtattggtctaactatgggaccctgtgcccaaggcccatccctggcatgcggtggcaggagaattgaacagtagccccttgcaagaggtggcctctgcccatcctcaggtggactctgtcttcccatgggaagaaactttctttcctcatcccttggaaactaggtggggggctcttgggcagcctggtcttgccacagtcctgggatcctggccgggttcgagactttccctgctgcccccttccccccgcccccttgggtggctaacagaggcagccttgttcctgctcccatagagctgccctgttttctgcacactaaaaatggaaacccccaagctatttcgggagcagtgcccagccaggctgtgaccacggcccccctgctcccaccgggctgtggccacagtgtcccggcttccaccaggctgctggaccctcccctgagccttgtgcccggccctgttcacttcagggcagcctcaggagtaccctgctcaggcctcatctgctaggatgagccgacctgggagaagcaagcgcttgggatattttgcacagacagcttggcagctgggtgatgggaggggctgggcaacgtggcctgggcacaggcaagtaggggaagtgtctcccagtctgagatgcattgtctgtcccagcacttcaccaaccttggtgctcctggctagagaccactggggaaggtggtattgccatagtttcttggttcagggactcaggagcctcagctggggcccaagaaggggtctgtgtggaaagcaggcacccaaagtctggggaggtcctggggatgggcctgggaacagccaggcatggcaccttcctccaggacacactccacttaccccacatcttgggccctggcactattctgaactgcaggagaggaaatagcaagagatggcctagcttctacagctctctagtacgtagggctccaactaagtactctcaaacgaggggagtgtgcctgagtgtgcgtgtgtatgtctaaatgtgagtggtggtctgaatgtctcgggtgagtgtgacatatgtgcctgcagtgtgtttctgtgtgggggagttgtctctatatggatgtgtcttcatgtggtgtttgaacatgggtggctgtgtctgtgtgtgtcactgtgctgtgtgtatagatggcatctgcatctctctctctgtgtgtgtgtgtgtgtgtgtgtgtgtgtgtgttgtaggcatatacatacagggtgggtggtgtgtatgtatcttgctgtgcgactgcctgtctgctgaagcgctggtggccctttgggctgggacagcccctggctgtgtagagggtgtgtacctgggtgcctttacagggtggagtttgagcagagagagggacctcacagggagaaggccatgctgggggcctggctgggccctgccagccacggggctccttcctagctgacctttcccaggcccctcgggtgcctggctctgctgccctccccctcctcatgtgggctctgaggaggcgtcctctgtggaatgtgtttggtggccaggggccaggctgggcccagctccaccagcaggctgggcggtggggagggggtgcttctgtgctgcctccccggtggggagcccagggcttccacgtgcctgcagcccaggccccggcttcacactcggctttcccgcctgctaggtgactcccacacgggtcatgctgttgtctcctgatccagccggccctgccaggtgagcctgacctcacactagatatctaggagcagcatgactcctacctattctgagggctctcggaggtggggggcagcccttcaggccccacccctccgagctggaacctcttcccatctctcaggcctgttggttctgtggtta

SEQ ID NO: 29513 - DNA, 2300 bp, Homo sapien
cttttcagaggggaacagtgacccttgaccttgactaaatggccatgggtggccttgtgtgccctgagtaaacaggagctttgggctggtattcagtcctggtgttggagtattggaagtcaggcacattccagagaacccactcccctttgagagcgcagggtagctatatgcaggggggccgcaggtggggactcgttcactggtgcctgtgcagagctctcagagcctgtggagtcaggagtgtttcccataaggcatactttcttcttggagcctgtgttcagtcttgggcagtgagcatggcccaaatgccccccaccccaggttctcagcacctggtccctcagtcaatctatccttggcgagtaatggctccccagaatggcatgggatggaaagacccctgtgcttagagtgttcacattccttgtagggcaggaggtagcgtatctgtgtacagatgaaaggggttgtggggtttggaagtcccagtttcctctggggtgagataggtcctgaagtgtgtgcttggatgaatggatttggggagggagggattctgtgcatgtggagggggctgctacaagctacataggcaggaaagccaaagtgggtgagggactggggcagactgtcctggctggggtggtgatgggtgtgggggagttgtgcagaatgatgtcacaggcccggggtgccaggttggcagtctgaggtcagaggctaagggtgagggatccagggagggattgctatgctggtgcagacaaggtgctaagcacctggactcaggtgctggaagtgggagtggaggaaaaggggtgacctgacaggagacccttgatagctggtgggaggtgggaagagggtgtctctagctctagggcagtagccagtgtggatgacctgaacctcctgattgaggctcccctagcctgtggaggccttggaggctttcagatgatgcctgtgacgtttttgcctcccaggaagctgtgccaatggctttgagccaaagtcctccaaaagtcctaataggatgggccaggttctggtcctgagttagccgtgggcatgccagggtgtgaagggccctgcacagggtacaaatggtccccaggagagaacctttctgccagcgtttcctcccgcagaaggcccaggtgtttgccagtgagggagcccagacttgcccaacgcttctcagcttggggtgggtccaggtctgggtcctgggctgggaagaaaggaaggaagtgagcccttgcttgtgcgcctctgcagcccaggttccctgccttcacagccccgctagaggtgggatcacccccacttactggtgagcaaataggctggggggggttggtgtcaggttacatggtttagttgatggcgcaagcccaggtccaaagcccatgctcttctcaaacagccagaggtgggggccggaaggagggattggctgttggggagtagtgggagcaggggcggtgagcaggggcggtgggcagggccaggtgcgcaggggagaaacaaggcgccttggagttcaggtaaagaaagttggggaggatgaccaccggagccgggtaaggaagggaaagggagctccgggcgcggggcgaggccgggcgctggcagaagaacgggtcgggctggtgagggactcgggtgctacccggctctggacgggcgggaagaggccgggacgctgttccaccagcacctgcgggtgcggagcgcgaccccccgcctcggctcctggcaaccaggaaagttcccagttccggttccaaggaggcgagcaggtgaggccgacggggcggggcggctctggctcccggggttcactcctcacccctccgggcgacccgcgttgccatggcgaccgccgcggtgcagcccgcccccgccctcccccgtgcgggaggggtcgggtccccagccctcggccgatgcggagcccgcggggctggaatgcggggtcccgggcggttcggggccgcgcgcccggctctccgggctgcttccggcctggcccgggcggcgggcggggggagggcagcccggcaggcgagggggaaggagcggagacgagcccggccgacgcggctttgtctcctttgttcccggcggtggcagcgccgcgcgggaggggcgggcagcgggcgcagttttccgcccctcggtctccgggtaacagctgcggctccaccagacccggggagaggccgctgcgcgcggagcccgagcccggagcggccgacgcccgcctcggcgcgcacatcccgcggggc

SEQ ID NO: 29514 - DNA, 2300 bp, Homo sapien
ttaagaatcaagatccaagacttgaaggttgggcctggagttggggtagtcaccccctttagttcctctctcatctcctctctgtcctcttttctgaactgttatggatgcactcctgaggcctagattttcattttggatttcctccagttacctgactgtccggtgtcagatggcctgggagttccagtgagtggaacctagcctgctgcctactcatttcgtgaccatggttgcttcccatctcctggatcactttctctaccatgtgggggagaacttcctggttctagtactggaggagtgatcagaggagagcagggaagggagattgggagaatggttgataaatgttgttggggacataagtatagggattggtggccagtctggatccctggtacagagattgctttgggcagcagtggtgtgccacgggggctgggtgcacacccccacacagcccggggatatcttccacaggcataggcagagctcaggacaccgggagtgtgcatggagaggcagtgatagggagggggggggtctcccacaggtgggaggtgcagtggggcatatgtatgatctcttttcagaggggaacagtgacccttgaccttgactaaatggccatgggtggccttgtgtgccctgagtaaacaggagctttgggctggtattcagtcctggtgttggagtattggaagtcaggcacattccagagaacccactcccctttgagagcgcagggtagctatatgcaggggggccgcaggtggggactcgttcactggtgcctgtgcagagctctcagagcctgtggagtcaggagtgtttcccataaggcatactttcttcttggagcctgtgttcagtcttgggcagtgagcatggcccaaatgccccccaccccaggttctcagcacctggtccctcagtcaatctatccttggcgagtaatggctccccagaatggcatgggatggaaagacccctgtgcttagagtgttcacattccttgtagggcaggaggtagcgtatctgtgtacagatgaaaggggttgtggggtttggaagtcccagtttcctctggggtgagataggtcctgaagtgtgtgcttggatgaatggatttggggagggagggattctgtgcatgtggagggggctgctacaagctacataggcaggaaagccaaagtgggtgagggactggggcagactgtcctggctggggtggtgatgggtgtgggggagttgtgcagaatgatgtcacaggcccggggtgccaggttggcagtctgaggtcagaggctaagggtgagggatccagggagggattgctatgctggtgcagacaaggtgctaagcacctggactcaggtgctggaagtgggagtggaggaaaaggggtgacctgacaggagacccttgatagctggtgggaggtgggaagagggtgtctctagctctagggcagtagccagtgtggatgacctgaacctcctgattgaggctcccctagcctgtggaggccttggaggctttcagatgatgcctgtgacgtttttgcctcccaggaagctgtgccaatggctttgagccaaagtcctccaaaagtcctaataggatgggccaggttctggtcctgagttagccgtgggcatgccagggtgtgaagggccctgcacagggtacaaatggtccccaggagagaacctttctgccagcgtttcctcccgcagaaggcccaggtgtttgccagtgagggagcccagacttgcccaacgcttctcagcttggggtgggtccaggtctgggtcctgggctgggaagaaaggaaggaagtgagcccttgcttgtgcgcctctgcagcccaggttccctgccttcacagccccgctagaggtgggatcacccccacttactggtgagcaaataggctggggggggttggtgtcaggttacatggtttagttgatggcgcaagcccaggtccaaagcccatgctcttctcaaacagccagaggtgggggccggaaggagggattggctgttggggagtagtgggagcaggggcggtgagcaggggcggtgggcagggccaggtgcgcaggggagaaacaaggcgccttggagttcaggtaaagaaagttggggaggatgaccaccggagccgggtaaggaagggaaagggagctccgggcgcggggcgaggccgggcgctggcagaagaacgggtcgggctggtgagggactcgggtgctacccggctctggacgggcgggaagaggccggga

SEQ ID NO: 29515 - DNA, 2300 bp, Homo sapien
tcttgggctcaggtgaggcctgattctggataacaggagactccctgctgtccaggtaatgagaagcaggcccaaacatcaaagcaagatggaaaagggaaagatgagagaaacctaacccgttgagcaatggcaggttggagaggaaagagaaagcttatggaagtcgtgaagtgtgagactgagagttggtagcctggaaagtctgggggcggagttgtatggcgtgaacctaagaaaagtcctctgtggcaaaaacagttttgttttgtttttttttgcccctggaattatcttagaggagagctgagagttttctgtcttgggtcacaaatggcctgtgtccttaggtccttgcacagaattgaaactctgcttcccttgtgctgaggcagtccttggagagtctggggagttggttttgaggctgttttacagaaatgatcctggatcttagtcttcctgaattcccctgagttccacaacattgcagggagtatttatgcgtctttgtggggctttgtcagcatgtgtacaagtctggtttaaaaactgtctttgacatcagaaacctgggcaccaggattctcattcaagtcacagcagagagacctggaggatgtagggaagtgggtagcagggaagggtccgctttgtgtggcatggtggcgggcactggaaggtatggcatcctagaggctcgtccccaactgtgttccattgtccaagagcacccagaggagagcctgaccatcctcttgccacaggggccacagtctctgggcccaacagggtggtgctcagtttagatgatttgagtggggattagtctgttcagaactgtccctaggcctcaaaactgacttatgtccagcctttctcagctgtgagctgacctgtctggcgtccccctcacagatctcaggatgatggggcgcagccctgggtttgccatgcagcacatcgtgggtgtgccccacgtactggttcggaggggcctccttggaagggacctcttcatgaccaggactctgtgcagcccaggcccaagccagcccggagagaaaagacctgaggaggtggccctggggctgcaccaccgcctcccagcactgggaagagccctggggcacagcattcagcaacgagcgacctccacagccaagacttggtgggacagatatgaagagtttgttggactcaacgaggttcgagaggcccagggaaaggtgacagaggtgaggaggggagctggggtggctggccccgccctctgacttgggaaatgtgccaaaccagtcacgtggtgctgggtagccacatccagacttgtgtttagcctcatttctcacgtggaaacctgggcttgatgcttctggggtgaaggtctccatgtaactgtgccacctactttccccgaaaacagttactgtgtaccagtaagtccctggccactaacatccactctgtgaggccagcaaatacttcctttgtggaccatttggggattgatggtgagagttacgtggggcttgctgcggtactgttactgtgtgtaattacaacatcttttgtgaagatagagggcactaggaaatgtcacagtgtgaggtggaaagagctggtggtggttgtcaagtcctttgtggtggcagaaatgcattctgtcatctctgttcccactcctgcttaggcatgtagtagtgtagcgtggtgggaagaacctggggttcagctgggactttgagacaaacagtgccatctctttccttggagattgtgagcttggctgagctggtgtttctgggtttataaactggaggccacagcagtgcctttcatggcattgttataaggcataaataaggcaacacacgggaaacagcctaccaacacaggtttgatggacacaaattgtgtgcattgttagctgttttcaagttttttcaggggcatgttatttctgcttgaatggctaaatctcgtgattctgatgggtgtggcccaaggctgcactttgagcaccactgggtgagccaggattagtgtctaaggaattccgtttccaccctttgcagctcacaccccagtgacctcttctgggaatgcctcgctgggaatgcagctgagcctgtgtgggtgtggagagaaggtgcagatggcctccggttttctctttgcaggctgagaaagtgttcatggtggctcgagggcttgtccgagaggctcgggaggacttggaagttcaccaggccaagctgaaggaggtgagggaccgcttggaccgtgtctccagggag

SEQ ID NO: 29516 - DNA, 2300 bp, Homo sapien
gactcctctcttatccagtcctgtggttttaaaaatcatctatgaaaatggccaaaaaaatttattttggtgatggccatacaactttgtgaatataataaaaccactgaattgtacacattgcatgaattacatggtatgcaagttatatatcaataaagttgttttttaaaaaaaaaaacagaactatactcttgactcctccagcgcagacctctctccccagggttctaggctcatttatcaaacttcccaacctatatctctgcctgaaaatctaatggggatctcatcttcccctcccaaacctttttttcccatagccttctccatcatggatgacagcaataccaagttcaaatattcagatcaacaacctcgcatcacccctgattcctcatttctctcccacctcacatccatctatcagcaaatgcccctggctttccaaatccaggatccctcctcctctcacctctgccactgctaccaaatggtcccagtgacccacatcacatctctagcctggattatcccaagagcctcctgacagatgtcaccctgcttctattccagcccctacaatttattgtcagtcgagcagtcagtgttcctttccaaacacaggtggaaccattgtctctctgctcaacctctacaatggttccccacttctctcaaggtaaaagcctgtcttttccatggcctacagggaacctacccactggctctcattcctctctgacctcatctcccactagtctccctttcctcactccactccaagcacatggaccttcttgaagttgctggaacgcaccaagttgtccccagctcagggccttcacgacagctgctatctgtgctgctcgctccctcaccttcttcaagtcctgctcaaatagtagccccttgggaggtcttccccatgcaccctatcagatatggccatcccactcccaccctagcactcctgacccactttctctgctttattttttccatgcatatatcacatgacctgcaacatgtatcccatttatttgctttggttatagtctgtctcactcactagaatttcagcttggtacctacatatagtacgtacccagcaaaaaatgtactcatctgcctaatctctggacactgtagcatcccagcgctcagcactgttatttaaaaaaataacaactttggctgggtgcggtggctcacgcctgtaatcccaacactttgggaggctgaggcggggggatcacgaggtcaggagttcgagaccagcctggccaacatggcgaaaccccgtctctactaaaaatacaaaaattttccggacatggtggcgggcacttgtaatcccagctactggggaggctgaggcatgagaatcgcttgaacccaggaagcagaggttgcagtgagccaagatcgtgccattgcactccagcctgagagacaagagcaagactccatctcggggggaaaagaaaaaaaagctttattgatatataacttgcataccatataattcacccaatgtgtacaattcagtagttttactatattaacagagttgtatggccatcaccaaaataaatttttttgaccattttcatagatgaacaaacagaattcgcaaactgctgcacccctgactatattataaaactccttacagggttttccaaagctataggaccacgtgatataactcccgtccacttctgccatctccccgcctaatctccctccacccaagctgtgctttccttggttccaggaaagcgacgagcttgaagctctttgcacatgcacatgccctgctgtctacctgcagtgctcttcccgcgcacggccacaggcctgggaggccgtccggttaagtacccctcctacggttccgattctaccctggcaggacaaccctagctcctcgtacctggcgtggcccgaccaatcgtctgccactcagttgacctctgacctgttagtacccgcccctggagcgccgcatccggtagcgagagttcaacttcctgactaggagccaatcagcggggccgcctcgctgtctacgacagagggtggggcagacgctccgtttccggtggcagggtctggggaagcggcggcaggcgccatgtccggccgcgaaggtaagtgttccggaaccgtgaggactgcggggacggcggggtggggaccgggcggcaggggcaggccgaacgtgctcgtgtcgcccacaggtggcaagaagaagccactgaaacagcccaagaagcaggccaaggagatggacg

SEQ ID NO: 29517 - DNA, 2300 bp, Homo sapien
gcgcaatcccagctcactacagcctgaactcccgtgctcaaataatcctcttaccttgaactcctgggcttaagcgaggctgcctcagccttttaaatagctgggattacaggaaacgggccgccaccaccaccacgcccagctaattttaaattttttctgtagacagggtctccctttgatgatggaactcctagtcttaaataatcctcctgcttaggcctcccaaagcacttggattatggtcagcccattctgtgcctggccccttacaccattctgaaaaggaatctcaagagctagaaatctcagtgctgggtaggtaaacaataatggatcaaacccactgggagagaggtcttgggaagccctagatgacactcccaccatccttgtctccatcatgcctagcatggctcacagtgctcaaatgggggcataaacaactgtggaggaaataatcactagttggatcaatgtaaaataatgcttatgatgcacataaagtactagaactgctgggcctgaaaaatattttgaaatgtaatgaatttctcctacataaaagatgtaaaaaaggtggaggattcagttagaaaagcatatggagcaacagcacactgaagagcctggactttatcttttagtctaggcatacccagaagtaaaaagactcagaaagcaaaaaagcatatattagagataatataagcagtacgaaaaaaaaaaaaaaagttggccaggtgctgtggctcacgcttgtaatccgagcactctgggaggcagaggcgggtgaatcacttgaagtcaggagttcgagaccagcttggccaacatggtgaaactccgtctctactataaatacaaaaaaaaactggccaggtgcggtggctcacgcctgcaatcccagcactttgggaggctgaggcgggtggatcacgaggtcaggagttcaagaccagcctggctaagatggtgaaaccccatctctactaaaaatacaaaaattagccgcactccgtctcaaaaaaaaaaaattagccaggcgtggtgccaggcgcctgtaatcccagctacttgggaggctgaggcaggagaattgcttgaacccggaaggtggaggctgcagtgagccgggatcacgccactgcactccagcctgggagacagagtgagactctgtctcaaacaaaacaaaacaaaacaaaaaaacttctaagtcaagtaaggttcaaacactagaaggcagtgaaatacgaatttggggcaaaagattgcggacgacgtcagactttgagaaacttaactgtgaatctgcgtctgaggtaaatacatttcactgtttccgtttctgcagctcttcctaaggaatggaagcccagactgcctgggaggcaggagacctcgtttccagctcccggcccttactgccgctgcaaatcctagactggctagagaccattcgctgcagcggacgtcggaaaacgagacctcgcagttcaggaggcaggaaaaagacatgcccgcgccctcatcccaataggtgctcatagcgtttggccagcttgagctccattcggcccccacttacccaagggccccttccccgcggccttcgcttttagctcctcgagtttcttctgctcctctttttgtttctgcttgaaagccttatcttcctggggagaggcagagcgtgttcaactcaggcctgtctcccagcgcccccgcacccgccagtgcctccgcgcccgccctcacctcgtccatctccttggcctgcttcttgggctgtttcagtggcttcttcttgccacctgtgggcgacacgagcacgttcggcctgcccctgccgcccggtccccaccccgccgtccccgcagtcctcacggttccggaacacttaccttcgcggccggacatggcgcctgccgccgcttccccagaccctgccaccggaaacggagcgtctgccccaccctctgtcgtagacagcgaggcggccccgctgattggctcctagtcaggaagttgaactctcgctaccggatgcggcgctccaggggcgggtactaacaggtcagaggtcaactgagtggcagacgattggtcgggccacgccaggtacgaggagctagggttgtcctgccagggtagaatcggaaccgtaggaggggtacttaaccggacggcctcccaggcctgtggccgtgcgcgggaagagcactgcaggtagacagcagggcatgtgcatgtgcaaagagcttcaagctcgtcgctttcctggaaccaaggaaagc

SEQ ID NO: 29518 - DNA, 2300 bp, Homo sapien
tatattttgatgagacttgttcatctgttcatgtaaggcgtctgctatatgcaggcactggggtatgtaacggaacagttcctgttgtcaaggaacttctctactgtggaagaggcagggcagggcaaattacatgatccttcaagttgctagcagtgaagtccccatgcgcaccaaacaggtccagggcagcagctgcgggaagccccagcccacttgctggtggatggagggggtgccagtgccaggcaaggggttgggggtgaggcaaaatgggggctcactctacctcctgctgcccaggactggagtcccaggcatacctaccgcttgcccctcaataaatgcaaagacagagaccatccataatgtgtgctgaatatgttttaaaatgcttagctgggtgtggtggtgcacttctgtagtcccagccatttgggaggctgaggtgggaggatcacttgagcccaggagttcgaggctgcagtgagccaagatcacaccactgcactccagcctgggagacagaacaagaccctgtatttaaaaaaaaaaaattcagaagcacaagtatttggatttccctcccaggcccttaatacaattatgttaataatgctcagctttctctgagaatattgtcgaagagcgctctggaaccattatgagactgctaaatcaaaactaggttttagaatattgaaaactttcatgattaatgtactagatattaacgggggagagggggcagggggaagcctgtgttggtcctctccagaaagttgcacagccagtagcacccttcagtaggcttcaggcattccctgtggggccttgctagctggcacccagccgtatgctgctaaaacaaacctgagcaccagtgattcacactgttcctgaaagcaagttacttggtggaacctatccctctttaacaaatgaacagtcctgtctctttccaggaccagagtcctgcagcaattaagcatgcaacacttgggaagctatctgacggagactaccagttgctccaaaaaattttaaactccttagacattataggccctgatagcactctctttttcatttactcttttcatttaatgctttcacaaatattcctaggacactcacaggtgaagtttggcactgagcaggtaaggctgaaagagtcttgctcctgttactctccattgccaaattctctattgcggctaacttctgcacaccacagctgcccaataaaatctgtcaggcacgcaagcccacctcaaattgctgctcctttgtgaagctttgcctctgttcgccacaggtaactcttacctggcctttgtgtggcctccctttcaatgtagaattctcgtgttagtcttatgtgccagcctcctacccctctatcctgctaacttgactcaacttgtaggacagcgcaggtgccatttacagggggacttccttgacctcctgagccctattctatacaaccagagcttaggaaaaaaaaacagtccagcactcagaggaatggatgttaacagcctgagcagctcccaccccctcccacacaagaacagctccaaacatcattcctccttggactttcctcctccctgggcctacctcaaatgtacacatgtgaaacattcactaaacccgaagatgtctgcacacgacagctctattcatactcctcacccaacaaattccactctcctcaagaaagcctaggggtttgtgggaggtgggtctggcggcagaaggaaagcgaggtcacggagaccacatccctgaatgatgcctggctcgactcaaacgcaacacgcgtgaatgctagggcaggctgctcctgcgcggccctcctccacggagtgccagggagggagcgcaaagccaccagcgcggcggagctggtgcgcctccggcccgcctctccggtaacgggtcgcgccgcactgagtccttgcagcaaacctgccgaatcccgcccgtggacctctaaacaccgggcggggccgggtgtggcggcgcgctcggacgttcgtcattcctccgcgccctccgcctgccagctgattggcccctgggccaggggcggggcactcgcggcggaggcaagcggcggcgcgcggacggttggtccagttctccggcctggcggcaggcaagtctagctcggcgctgtcggatacttggggtgagcggaaagcatggcggggacctccgcgccaggcagcaagaggcggagcgagcccccggcgcctcgccccggcccgccgccgggcaccgggcacccc

SEQ ID NO: 29519 - DNA, 2300 bp, Homo sapien
tctggagtctatcctattcacattgcttctaccagctgcctgatctgtgttaccatgagtcctctcttgaacaatggtctgctaaattggtttcccatttccagtcttgactccctacaagtgaggcttcacatcacattctgagtgatcttttcaaaactcaaatctggctgtgtcttacacagatatacgtgaacaccctttttttttttttttttttttgacggagtctcactctgtcacccaggctgaagtgcagtgatgccatcttggctcaccacagcctctacctcccaggttcaagagattctcttgcctcaacctcccgagtagcctcagcctcccaagtagctgggattacttgtgcccgccaccatgcctggctaatttttgtatttttagtagagacggggtttcgccatgttggccaggctggtctcaaactgctgacctcaggtgatccacccgccttggtctcccaaagtgctgagattacaggtatgagccatccgcacccagccatgaacacccctaatgaaagccctttaataatttcttatttcttctagtgtgaagaccagaatccttaacatggcctgaaaggcccagcctggtttggccctttctcactctctgggtcctggctgcactaacattctttgaattctctctgcttctttacaatacaggaactttatacattgttctttctttgtacattgagtatacttttcattcattcatttccactcatctggttaattcctacttgtccttcagctctcagctccttcaagtcttccctagggaaatgttccaatcatcccagttaagtcagattgctgtcatattataggctttcctatatttgttctcttctgcagttcttaatcacagttgtaattttacatttatctgtgtgattatttgttgaatgtcttttaagctctgtgagtgtaaggaagtatcaattttgctcactattgtacctgtagagcctaacatgcctggcatattgcatgtggtcagtaactattactgaataataagtagatcattgagttctggccaatgagatctcctcaggctttagatgagactcttggaattggatgaaggatagggaaagaataataggatctgttgttttagaaggatcatttatgagtttcagccgggtgtggtggctcatgcctgtaatcccagcactttgggaggccaaggtgggctgatcacttgaggccaggagtttgagaccaggctggccaatatggtgaaaccccgtctctactaaaaatataaaaattagccgggcgtggtagcacacgcctgtaattccagctacctaggagggtgaggcacaagaatcgcttgaacctgggaggtggaggttgcagtgagccgagatcacgccactgctctccagcctgggcaacagagcgagactctgtctcaaaaaaaaaaaaaaaaaaaaaaaaaggatcatttatgagtttgaaccatgttcttaggttgaaaaacatctatattgcttactagatctttccctgctttgctctcaagagtaattcttcccagcactttgggaggcaaaggcaggaggattgcttaagcccaggagttcaagaccaacctgggcaacataaggagacccaatctctacaaagaattttaaaattagccaggcatccaggcacagtggctgacgcctgtaatcccaacactttgggaggctgaggcgggtggatcgcgaggacaggaaatcaagaccagcctggctaacatggtgaaacgccatctctactaaaatccaaaaaaaaaaaaaaaaaaaaagccaggcatggtggcacacacctgtagtcccagctacacaggaggctaaggcaggaggatcacttgaacccaggaggtcaaggtggcagtaagcagtgatcacaccactgcactccaacctgggtaacagagcaagaccctatctcaaaaaagaaaaaaaaaaaaaaagtgggtattttcagcattttctggcaaaagtgggaaaatattgggtcctgaaatgtatatggaactattttttacaggtgatcataaggtccacagattattagatggcatgtcaaaaaatccttcagggaaaaacagagaaactgttccaattaaagataatttcgaattagaggtacttcaggcacaatacaaagaacttaaagaaaaggtaagtgacttaacttgtggtttttgtagctaattcattcacttacgtgtttaaaagcattgtacagtaaaatatacaaaagttgtaa

SEQ ID NO: 29520 - DNA, 2300 bp, Homo sapien
gctaaaaggaaacgtattggcttccatatccaagtctgggaagaaccggggtatgctgggaccttaaatgacttaaatcttgccaggacatttttattctctatgctataaacaggctctatacttatggtagagggtgtgttctccagaagctcctgggctcatattttataaatacagagcagaattaagacttagggccacatgcagtggctcacacctataatccagcactttgggaggctgaggtgagaggattacttgagccaggagttcgagaccagcctgggcaactagtgagacctcatctccacaaaaaagaaaaagaaaaaatgaacaaaattatccaggcatggtggtgtgcacctgtagtcccagctactcaggaggctgaggtgggagaattgcttgagcccaggaggttgaggctgcagtaagccatgatcatgccattgtactccagcctgggcaatagagcgagaccctgtctcaaaaaaagacttaggctccctcatctcaagttttaaaattctgagaaaggctctgattggtttaacttgagtcagttgtctgtccctggccaattgctataaccaaaagcaaccaaaagcaaaaaaatgacagctcccattctaataaaatagtcagaggtagggaaattattgaatttttttttttttttttttgagacagggtccagggtttcactctcttgcccaggctggagtgcagtggtgcaatcacagctcactgcagccttgacctcccaggctcaagcaatcctcccatctcagcctcccaggtagctggaactataggcacacaccaccaggcaaagctaatttttaaattttggtacagacagggttttgctgtattctccaagccgttctcaagctcctgggctcatgcagtcctcccaccttggccttccaaagtgctgagattacaggcgtgagccacaatgcccagcctgtttctcagggaaaggaaaatgctattctggaaggaaaaacagtaggtatccagtacctactacaactttccctcagcacctcctcatgcttcaatctcaaggacatgggatcttattctcattgtttcattcagcaaacttagcaaactttaagcacttacctgtgcccatcattaaccgcaatagttaactttctgtataagtgatgaagagcaaggaatttgcggtcagacaaacctgaatttgaatccaggcttcatcacacataagcagtgacctcaaggtaataacttaagctccctggctcatttcccttatctgttccaagacataaccagaaaggttgttgggagactcacacattcttgcacttactgtgtctggtgctgggcctggcgcagagtgtgcttggggaatgatggcagttactgttggctgtagcaactgcaggccagagcagcaggtctctctatactgcacagtgtcttggtaaactattccaactactctgcccaaactttgaggaagacctggaattgtgcaccagtgcgttcgttaataaaggtcaatatgttactgctgacatagggcaccttaccaagctctatgctgggtattttacactcatcattctacttaatcctcccaactatcatgaagacaggtgttttatgttacaaataagttaggattcaaagacattaaataaatggtgggctggtatttaattcttttttttattttttaaattttttgtagaggcaagatcttgctattttgcccaggctggtctcgaactcctgggctcaaatgatcctcccgcctcaacctcccaaagtgcttaggattacaggcctgaaccaccacacccggccagggctggtatttaaaccctcacaaactacccttacaatagagtccagtatctttttagagtaccatattgtctttcagaaagaaagctaatgtttaatattttaggacatttatgtcacagcagactttcatatgtatttttcattgtttgtcttttactggcttgtgattttgaagcccagagatatttttgtgtatatgatgggaccactacaagcatgtttcttttgccttccagctccaatcattgcagtctgaactccagtttaaagatgcagagatgaatgaattaaggacaaagctccagaccagtgaacgagcaaataaactggctgctccctctgtttcccatgtcaggtaatgatggtgctggagggatagttcagttttgcattatttagtaaaaaatctgcataacagtgtcaggctggtcctaaatgaaggccat

SEQ ID NO: 29521 - DNA, 2300 bp, Homo sapien
accccacatagtgagaccttgcttcctaaggacacactgagggatatcttgaccttctgtgcttagaaactgcagatgtctgaaggggtacacacctggccagaccccatagagtgtttcagaattgccctcctccccacccaccaggccagtccatcgtgctcccccaggctatgtgggttgagcaaacagcagcagttgccttggggcttggtttattggggtaatagctttccttttgcccctgagacctggggcagtatgcccagaacccctccctcctgcacaccccacagtaggcacattctcccactggcagcagatgtgttttctggcaagtagagaaaatggctttccttgccctgtgagaggtctcataagatccagccatagccaaggccatgtttgtcacctctggaggcctggtcagtccttctgtgggcacagaacatttctctcccacctaagttaggacctgcatccctgtttgggagcatgtggaagccaggcatcccagatccaggaggtcatcccacttcctgggcgatgctacaccagataagggcctgtcctctcagctgcagcagtcttgcagtggaagtgcccacttgttcacatgaaacaagtttcatagcaagtaagtaggggtcaggccagcactgaaacccaagtctggctgaaccaactcacctgttcatactgacttgctcaattttctgttacctctagtggagtgtgaaggtaggttatggagctggggttggggagtgtcacgtctctctgggtccctgtcttttaggttccagtgtgtgttccaagtgctgccaaagtgcctcagcccagagacacccctgcctagcgtgctgctggctgttgagctcctctccctgctggcggaccacgaccagctggcacctcagctctgttcccactcaggtaaagcagggtggggcgggcatctagactgctcctgcagatcaagggaagggttggggtgggaacagggtcaagggcctcagagggcttctgcagtatgtagcccacgctctttatgagaaagggcaccctgagtgagaggtgcgctgtccttttcagaaggctgcctcctgctgctgctgtacatgtacatcacatcacggcctgacagagtggccttggagacacaatggctccagctggaacaagaggtaaaaactccagagccccttctggacactgtccccaccccatcctaagaaccaacagaatctcctttctttccgctgaggagaaacggagctttaattcattttagtaacaagagttgataaagcaactaaagaggtaaactcagtttgggggctgtgcaccacacagatgcaatgcagacaggacttggcagagttgcctgatgactgatcctgtcttggctttgggacgtgggggcagaatagggggctggaggcaggtgggttgctggtgacacatgagtgcttgtcctgggtcttccctgggaaggtcccacaccacttcttggaccccatttgtgcagacaaacagttgctgaagcaagtgaactcttatagaagcttaagaaaaccctcgcagggactggtctccttctgcccaggatggaaccactctgttcttgttctaggtggtgtggctcctggctaagcttggtgtgcagagccccttgcccccagtcactggctccaactgccagtgtaatgtggaggtgagtgggtaggggccaacagctggcagctctggtggtaagggggccccgtgcaaggactgtaggccccactgcaaaccccctcacgtgaggtggctaggctgagcggattgttagggtgcaggccatggtggcaccaggcctcagtctgcaccccccctctctcaggtggtcagagcgctcacggtgatgttgcacagacagtggctgacagtgcggagggcagggggacccccaaggaccgaccagcagaggcggacagtgcgctgtctgcgggacacggtgctgctgctgcacggcctatcgcagaaggacaagctcttcatgatgcactgcgtggaggtcctgcatcagtttgaccaggtgatgccgggggtcagcatgctcatccgagggcttcctgatgtgacggactgtgaaggtaagcctgccagaggccatcctgcccagcccccatggcttcttccagaggttccccaacaagtcagattcctgggtgtcccctcagcaggcccccgcccactgcagcctgttccagcactggggccattttcttttatcttcctgcctcagttcttctcca

SEQ ID NO: 29522 - DNA, 2300 bp, Homo sapien
gagtgtcacgtctctctgggtccctgtcttttaggttccagtgtgtgttccaagtgctgccaaagtgcctcagcccagagacacccctgcctagcgtgctgctggctgttgagctcctctccctgctggcggaccacgaccagctggcacctcagctctgttcccactcaggtaaagcagggtggggcgggcatctagactgctcctgcagatcaagggaagggttggggtgggaacagggtcaagggcctcagagggcttctgcagtatgtagcccacgctctttatgagaaagggcaccctgagtgagaggtgcgctgtccttttcagaaggctgcctcctgctgctgctgtacatgtacatcacatcacggcctgacagagtggccttggagacacaatggctccagctggaacaagaggtaaaaactccagagccccttctggacactgtccccaccccatcctaagaaccaacagaatctcctttctttccgctgaggagaaacggagctttaattcattttagtaacaagagttgataaagcaactaaagaggtaaactcagtttgggggctgtgcaccacacagatgcaatgcagacaggacttggcagagttgcctgatgactgatcctgtcttggctttgggacgtgggggcagaatagggggctggaggcaggtgggttgctggtgacacatgagtgcttgtcctgggtcttccctgggaaggtcccacaccacttcttggaccccatttgtgcagacaaacagttgctgaagcaagtgaactcttatagaagcttaagaaaaccctcgcagggactggtctccttctgcccaggatggaaccactctgttcttgttctaggtggtgtggctcctggctaagcttggtgtgcagagccccttgcccccagtcactggctccaactgccagtgtaatgtggaggtgagtgggtaggggccaacagctggcagctctggtggtaagggggccccgtgcaaggactgtaggccccactgcaaaccccctcacgtgaggtggctaggctgagcggattgttagggtgcaggccatggtggcaccaggcctcagtctgcaccccccctctctcaggtggtcagagcgctcacggtgatgttgcacagacagtggctgacagtgcggagggcagggggacccccaaggaccgaccagcagaggcggacagtgcgctgtctgcgggacacggtgctgctgctgcacggcctatcgcagaaggacaagctcttcatgatgcactgcgtggaggtcctgcatcagtttgaccaggtgatgccgggggtcagcatgctcatccgagggcttcctgatgtgacggactgtgaaggtaagcctgccagaggccatcctgcccagcccccatggcttcttccagaggttccccaacaagtcagattcctgggtgtcccctcagcaggcccccgcccactgcagcctgttccagcactggggccattttcttttatcttcctgcctcagttcttctccaagcatattgggatgccttttgcatctatctgttgagtgtgcctggcagagccacggtttttccagaaatagccgtgtctgaattgcctttgtatcactttgtttgcagtagctgagggagcagggcctgggtgtggaagggactggttagttcctgcggacgttgggggaggagaggtgggacctgccctaggccctggcacctttgggccctcaccaggaacctctcctttttgtctcagaggcagccctggatgacctctgtgccgcggaaaccgatgtggaagaccccgaggtggagtgtggctgaggccctgagtgtccagccacatggtggcaccagcaccactcctttccttaccacatcaactgattaaagcagtgaccagcaggaactgcccagagaactggctggccttgtttcctgagtctgatctgtttggcggagtgggaggggtggagcaggacccggaccctgagtggctgggatccttcttcctgtccctggctgttgctgagcccgtccccatggtaactgatctgccttgaggaaggagccctgccctgcctgtggaattgtcctgagtcattgctttgggctggggccatgggaagaaaccattgtgtggcagggaaggaggtggctcttggcccaggcctaaaccaggaaagcctgggaaactgggacccacaggtgggcatgaaagggccgcagcaggggctcccagcagtgtgtaagaccgggagctggtctggcaccactgcc

SEQ ID NO: 29523 - DNA, 2300 bp, Homo sapien
tccttcctctcggaggcgtagttccattggtactgtagccacgtgtggccttgtaccctagccccgctctgcaaccaccccttgaatgttgcttggttttctaaggtcaccgtgcctgggtggggtctctgagtgaatttattcatttacctgtccaatatttattgattaattcacaacattatgcaaaaattttttttttattgagcactcactatatgctaggcactggaaatatagtggtggccgaaagctgtattggatgataatggtacaaagcaggggcaagacgtagttgatcaaatgctcacacacaacagagtgtgtgtttatgaactgaagtagaaaggaatttaattccgtgcgggcatgtgctgaggggcctggcctcttctgcatggtggggagggtgctcctggggaagtgacctgaggcctgaggggtgagcaggaatgagttaggtgtggctgagatgaaaggaggaaagggctgagctggcaggagtatctgcatgtgcaaaggccttgagcaggacacagcatggtgctttcaaagctgaaaggagggggatgggactcagcacagaggttgaaggagagggggcagttccagaccacacatggctttgtgggcctaatagggagttttattttatttaaaattttaattaaaggccaggcacggtggctcaggcctgtaatcccagcactttgggaggccaaggtgggcagatcacctgaggtcgggagttcgagaccagcctggccaacatggtgaaaccccatctctactaaaaatacacaaattagccaggtgtggtggcacgcacctgtagtcccagcttctcgggaggctgaggcacgagaatcacttgaacccggggaggcggaggctgcagtgggctgagattgcaccattgcactccagcctgggtgacagagaaagactctgtctcaaaaaaaaaaaaattaaattaaaaaataaaattttaattaaagattaaaaattagcctgggcaacacagtgagaccctgtctctacaaaaaataaaaaaatagccgagtgtggtggtgcatgcctgtggttccagctacttgggggactgaggtgggaggatcacttgagcctgggagtttgaggctgcagtgagctgtgatcgtgccactgcactccagcctgggcaacagagtgagaccctgcctcaaaaaaataataataataaaatttcctttattgtaaatttcactgtctggtgagacaaatcccagatttttcttttcttcctcttctttttttttttttttttgagacagattctcactcagtctcccaggctggagaaagcctcctgagtagctgggattacaggtgcgtgccaccaagcctggctaatttttgtattttttggtaggtaaagaaggagttttgccatgttgcccaggctggtctcgaactcctgggctcaagcttcccaaaagcctcggcctcccaaagtgctgggattgcaggtgtgagccactgcacatggcctcttttcttcttttattgtcaactataatacatacacaggaaagcacagacacactcagtttaacatgtaattataaagcaaattcctttgtaatcgcaagagctacaggagccatagctggcgtttgagcaggtggtgacatgatggaccttgcatggtggccccagtagggtggccgggagaacatggggagacagattggagagagtgctggtgggagaggaggagctaaagggacaggctggactttgctccttgcatgtgtgtcagccagggccccagggtcgccctctgggcctagatggatgcagaagctcctcctggaggctggtggaacagggccggtgggttaggtggaagtgggggtgggggtgctgctgagctagagtgtggttggggcccactgaggctggggtggctcttagaccccctagtggccaggctgcattctgaggtcaggccctgtaggcttggctcagggaggcagctctgggaggcaaatggggcacctctgcttcccctcctccccggcccccgccccttggctccttggctgctagccggctgctgggcggggccatcctgtgtctttaagagggtggaacggggcttcgcgtctgtgcttcctgtggctgacgtcatctggaggagatttgctttctttttctccaaaaggggaggaaattgaaactgagtggcccacgatgggaagaggggaaagcccaggggtacaggaggcctctgggtgaaggcagaggctaacatgggg

SEQ ID NO: 29524 - DNA, 2300 bp, Homo sapien
cacagccctgggtggagcccaaaacacccaccaagctcaaccatgagctgtgggcagataagagggtatgggagagccaaagaccaaaaaagtagggaggaagaggccaggtgagaggcccctaaaggatctggggttgggggcagcagagtagagaagccaaaggcaagcataggaggtgggaaaggacaattcttttttttttcatttttttttttcgagatggagtcttgctctgtcacccaggttggagtgcaatggcgcgatcttggctcaccacaacctctgcctcccgagttcaagcgattctcctgcctcagcctcctgagtggctggtattacaggcatgcaccaccacacctggctaattttgtatttttagtagagacggggctctactgaacatggagatgttggtccatgtctatccaacatggagatgttggtcaggctggtctcaaactcccaacctcaggtgatctgcctgcctctgcctcccaaagtgctgggattacaggtgtgagccactgcaccaggccttgtttttctatttttgagacagggtcttgctctgttgcccagactggagtgcagtggcacaatcataactgcaaccttcatctcctgggctcaaatgatcctcccacctcagcctcccaagtagctgagaccacaggtgcttgctaccatacccagctaattttaaaattttctgtagatatggggtctccttatgttgcccaggcttagaacaactcttaggagcttggctggggggcagggactggaaaaccaaggaacaagaaaccaagcttgtggatggtgcagagtggaatgagcaacctttagggaggcagagggctgggcacccagggtgtggaacacaggatggctctagagctggacatgaggagcatacactggccattctgcagaagggggacctaggctgcacccagctttggagagtggcgctcaggaggcagaggtgggataaccaggctgggctgtcagggaggatgtgactccagtccctcactaagaccctcccagagggcatcctgcctgggaactgtcatatccctgccccccacatgtgtattgagcacggtgagtcttaagcccttcttggccaggaggtgatgggggcttattggagacccaggccttcctctccctgttctaacaccctagcctgggaaactactgggaacatcccagattgtccccttgggtttctctttgtccacagcgatgcccccacctttaggtgagaaatatatggtggcacacagggtgcacaacccagcctgggtgccccactagtgtgacatttcacgttttctgtcttgagtgaaatgttctgattgtgctaggtgcagagtgggggtgggtcaggaactctgggcataaaaggaagaatgactcaacatccctgattctgcctggacccctgccccgaagtgagggggcggagccctgtgtgggaagttggcctggctgtgtgccctgggagctgccagtttctagctcagtcctggcccactgcgccagcgctgagcctgccagggctggggctggggatcaccttgggatgatggtgtcagtcccagggggcaggagatcgagtgtcctctgagctggcgactgggcctgtagaagggaaccggcatttgtggagtgtctactgagtgccaaggtctgcgctgggcactgtcctcgcaccgcctcacctagtcctcacgtagccctcgggcaagtgaggatccgccgggactgcggctgggagggatggctgtggctgtcccccagcccacacagtaggcgctcagtgtcagggtgcatattcccggggacgccctccaggcctgagagctgggggccgccgccgccccccatgcatccggtgagcagaaggaaactccgtgcgtcgcccggcgcctgtccgagtctgggaaccggtaccaagttttcgcgcagaccccgggcgcgaagctggccccgaggctgggaagtcgtccgcttccttccttcctcctccttccaccttcctccctcctccctcctccctcctcctccctcctcctcctcctgctcccccggacagaggttccgggaaccagccgggccggggcggggcggggcgagggagaggggcggccgcgcggatcactgaggctgtggcggcactgcgcccggcgctcgcgtccgtccgcccgtccgcccgcccagccatgactgcgccggtccccgcgccgcggatcctgttgccgttgctgttgctgctgctgctaacgccg

SEQ ID NO: 29525 - DNA, 2300 bp, Homo sapien
ttgtatttccaggctttgcaagcctgagctgcagagacaaaactcctcagacaccgagttaaagaaggaaggggtttatttggccgggggcatcggcaagactcctgtctcaagagcagagtcccccgagtgagcaattcctgtcccttttaagagggtgctcgtgagagggtcgtgatcgattgagcaagcagggggtacgtgactgggggctgcatgcaccagtaattaggtcagaacaaaacaggatagggattttcacagtgcttttctatacaatgtctgtaatctatagataacataactgattaggtcaggggtcgatctttaactaccagacccagggtgtggcgccgggctgtctgcttgtggatttcatttctgccttttagtttttactttttctttctttggaggcagaaatggggcataagacaatatgaggggtggtctcctcccttagacccacagaaaatgcctgcacacatgggcacatgcctgtgagatgcatggttgcgatttccaagccactggggtgatcctagcctccactcactcctgcccatgcacagccctgggtggagcccaaaacacccaccaagctcaaccatgagctgtgggcagataagagggtatgggagagccaaagaccaaaaaagtagggaggaagaggccaggtgagaggcccctaaaggatctggggttgggggcagcagagtagagaagccaaaggcaagcataggaggtgggaaaggacaattcttttttttttcatttttttttttcgagatggagtcttgctctgtcacccaggttggagtgcaatggcgcgatcttggctcaccacaacctctgcctcccgagttcaagcgattctcctgcctcagcctcctgagtggctggtattacaggcatgcaccaccacacctggctaattttgtatttttagtagagacggggctctactgaacatggagatgttggtccatgtctatccaacatggagatgttggtcaggctggtctcaaactcccaacctcaggtgatctgcctgcctctgcctcccaaagtgctgggattacaggtgtgagccactgcaccaggccttgtttttctatttttgagacagggtcttgctctgttgcccagactggagtgcagtggcacaatcataactgcaaccttcatctcctgggctcaaatgatcctcccacctcagcctcccaagtagctgagaccacaggtgcttgctaccatacccagctaattttaaaattttctgtagatatggggtctccttatgttgcccaggcttagaacaactcttaggagcttggctggggggcagggactggaaaaccaaggaacaagaaaccaagcttgtggatggtgcagagtggaatgagcaacctttagggaggcagagggctgggcacccagggtgtggaacacaggatggctctagagctggacatgaggagcatacactggccattctgcagaagggggacctaggctgcacccagctttggagagtggcgctcaggaggcagaggtgggataaccaggctgggctgtcagggaggatgtgactccagtccctcactaagaccctcccagagggcatcctgcctgggaactgtcatatccctgccccccacatgtgtattgagcacggtgagtcttaagcccttcttggccaggaggtgatgggggcttattggagacccaggccttcctctccctgttctaacaccctagcctgggaaactactgggaacatcccagattgtccccttgggtttctctttgtccacagcgatgcccccacctttaggtgagaaatatatggtggcacacagggtgcacaacccagcctgggtgccccactagtgtgacatttcacgttttctgtcttgagtgaaatgttctgattgtgctaggtgcagagtgggggtgggtcaggaactctgggcataaaaggaagaatgactcaacatccctgattctgcctggacccctgccccgaagtgagggggcggagccctgtgtgggaagttggcctggctgtgtgccctgggagctgccagtttctagctcagtcctggcccactgcgccagcgctgagcctgccagggctggggctggggatcaccttgggatgatggtgtcagtcccagggggcaggagatcgagtgtcctctgagctggcgactgggcctgtagaagggaaccggcatttgtggagtgtctactgagtgccaaggtctgcgctgggcactgtcctcgcaccgcctcac

SEQ ID NO: 29526 - DNA, 2300 bp, Homo sapien
agatagcttttgcaatgagtgctgcgggttagacagggtgtgggcatgtggtaatgaggtctcagaggccacggtggccccaagatggccttggcagtggccagaagacaagagggctggctgtgtcacgaacagaatgagtggctttggagaagtagggagcaggtcacgaggggcacccagctcatcaggagccgcccatggatgtgctcagatctgctgggactggggtggaggaataagcgggtagatactgcaaaaggaggatgaggaaggaggaagttgttgactctgcctggggcagggtgttcccagggcaagcagctagagctggtttgggggagggtccagatgggcttccagcatgtggacctttggaatcttcagttcctatgaagtgggcaagacatctgtgtcagtcatcttaagggtccttgccaagctttaaagagctgggtggacttggactgatccaaggcagggctgtggcagggagggcatgggagggggtgctacacctatagcccacgaggccagtcttgttgccagtcccatgccctcaacacctggctcctggctgggtacacactgggcagagagaacctgaggatgcagggcacctgccaggggtgttgtggatgacatcgctagagggcagtgtggctcaggttgaagccgtgttggtgggggctggggcagagagtgtacaaagcttggagaggcggggctggggatcccgaggaggcgggaaactgcaggagtccggtgggggccaaacaagaaagtgagccaggggtttaggaacttctggatctctcccttgttccttgtccccagtgcattttcaaagacaagagggagatacaaatatagtaaaaggcaaccataacgtattttaaaatgaatttcttagagattgacatacttaatttatactgtaatactgtaagatagacaatgtgcacatcccattttcctgaagagaaaatgttattaacatattattttcaaaaaatatgtaaaactttagttaaaaaaaccaaaatactaaaaatcaaaaaaaaattgtaaaaaatgaaattctggaaagacgattaagatactcccagggcttagtgagtacccaaagtacttggttactaagtgccacgcacggccgggcgcggtggctcacgcctgtaatcccagcactttggaaggctgaggagggcgtatcacctgaggtcaggagttcgagaccagcccggccaacgtggtgaaatcccgcctctactaaaaatacaaaaattagcagggcgtggtggtgggcgcctgtaatcccagctacttgggaacccgaggcaggagcatcccttgaacccgggaggcggaggttgcagtgagccaagatagcgccattgcactccagcctgggcaacaggagcgaaactccgtctcaaaaaaaaaaagtcccacgcatttgctcccagcagccaaagcaaagaaagaggaacaatattgaaatgtgttttgagtctctatccatgaggtaaaagagcttttccagcgtggttgagcatgctcctatggacggcggaagagtcccggggctcggagcagtcaagggggaccccgaggaggggcaggagggcgcagcggagttgacggctgggactgcaggcctactggcccctgtcggctctgaccaacctggccgtgcgggtcacgtaggcctcgtcccactgcatgaaaacccctccctcctgggggccctgggctccctagcaaggaggtagcagaattcacgcgtgccgctgctcagggatgcagcgccagggcggagcccgtaggtggggcctatgcaaatcagcgcgggcaggttgggagagctgagtttgcgcatccggggcgggcctgcacaatccgggccttgaactggggcgggaccagtacaatccggagttgagcatgcgcattctcgatcctggcctgaagaactgggcccacttgttccaaaacgggcgggtaggtgagttgggcatgcgtggtcggaggccgggcccctttcagctggggcggagcctactcactctggggcgggacctgcgggaagatagacatgggctgtcgcggcttgaggaggggcggggcccaaggggcgggacctcgggtggcccgaggtggcccggctgctgggttggaagcggcgcagtccgactcatcccggccccgggatggcgtccccacgggaattgacacagaaccccctgaagaagatctggatgccatacagcaatgggcggcccgctctgcacgcttgc

SEQ ID NO: 29527 - DNA, 2300 bp, Homo sapien
aacttccctctcctctgccttcttctctttttccatctctctatctacctcccaccctctctcttcctctctctcctgttaccctctcctgctatctctttgtgtatctctacccctctgcctgtgtgtctctgtctgtctctccatcttcccatccttctctctgtcattgtctctctatccctctctgccccctctagcctgccagggccagttcatcgcatctggatcacgtgagtagttttctactcccagaactttcttcaccccaggccctgccctgcctatcaactggggtcctctcaggggggttggctgggatggctgcccatggtgacttcagggccctgaggcccctgctcttggctccaggacccctccctagttatgctgcagacactgccggctcccagctccatgctgtgcctgtgctccgcgtctctcatgcagaggaggaaggtgaggacagctgaacccgtggggcagctatgggtggggccgagacacgcacatgggtgtccatgaatgcagggcacacgccaagcacgtagggtctgcatgcagggcacacgcatgggcactgtgtgcacacagtggaaatcagtgctgcccaccttgccccggggccagcagccactgctcccagcacaccctgccctacctgcagagcgggtaccccctgaggatgatgagtactctgaatactccgagtattctgtggaggagtaccaggaccctgaagctccttgggatagtgatggtgagaatggggggctgccagcggggtctggggaggggcaggcagggctgagccctgctgacctccccctgacctttcaaccctctctgattcccacaaaccctgctgacttgaccccattggcccagacccctgttccctgccactggatgagggctcctgcactgcctacaccctgcgctggtaccatcgggctgtgacaggcagcacagaggcctgtcacccttttgtctatggtggctgtggagggaatgccaaccgttttgggacccgtgaggcctgcgagcgccgctgcccaccccgggtggtccagagccaggggacaggtatgggctgagcccccaccgtggggaactgggcactgagcctgcctggatcgggttctgggggaggagtccttgggccagggttccaggtcagggtcctggaggagacgctccctcgcagtaggggacctggggcagacgcccagaccaaagagctgaatatagagccccagccgtggagcccccagtagggtccccttccatgttccctcctttaaagacctaagtatggacccctctgaggtcagagcccccacttcctgttgtagcctccgctccctccccttggcggtgcctctgcctgagcgtctccggggaaggtcagatggctgacgaccgtttccaacctgtcctcaccaggtactgcccaggactgaggcccagataatgagctgagattcagcatcccctggaggagtcggggtctcagcagaaccccactgtccctccccttggtgctagaggcttgtgtgcacgtgagcgtgcgtgtgcacgtccgttatttcagtgacttggtcccgtgggtctagccttcccccctgtggacaaacccccattgtggctcctgccaccctggcagatgactcactgtgggggggtggctgtgggcagtgagcggatgtgactggcgtctgacccgccccttgacccaagcctgtgatgacatggtgctgattctggggggcattaaagctgctgttttaaaaggctcctgttgtgactgtttgggaagatggggggtttcaagggggaaggttttccttggggggttggtattattctgcatgggtacagagtccctctgcccagtcctggtcactgtcttgtgattctcagtccccaacttgtccccggaaaagagtagatagggtgggggctaaggacacccccgggagggatgagtcataggtggggggctgcctcatgccaggaagcatgtaccagctcccaccccagggggctgagggagataaatgggccctgaagcggggtagagggtcagaccacaggacagtagtgcctggccccagccccaggcagccacagcaggctgccttaccccagaagcagctggtggcggtaggactgggttgggtcgggatgggaagggtcttggaggttgagtggatgtggggtttggctttatggagggcttggacccaggggactctgggatctctggctgcttttctgcctctgagatccgattcctg

SEQ ID NO: 29528 - DNA, 2300 bp, Homo sapien
cctgataaagaggccctggttggaaacagatggggtgaggtagtgactgaggccagggaaggaaatgttcagggaaagcttgggagggagaaggatgtgctctgggggctccaccgccctgatggggttgcaggtaggcactggcctcgggctgtgccctaggctgtgttcctcccaggaggccagagctggggcttcagagggccacactcctgctcgtgagtctcatagaagctccagacgtggagtcattccaaccttactcctaccttctcaacagcctctcccagcaccctttgagagaccctctcacagcagcctgtcctttcttttggaggcacctcaattctgatgaggtttgcctgagcacccaccctcccagctgggcctcctgtctcccctaagactggcccacgtgtgcacatatgtctgtaccgtactgtccatgccactggcctgctcttgcccgccctggctgcacgggaggaggtgacagtcttagggggaaggggctgcctgtgtgataacatacctggttctctgcagccccccacctggagcacaccttgcagggatggggggtcctgggacatggctgaggagaccctgaccttggaataaggtcatagcactatgccccaggatagtttggggggtcagtaataagggatagagccccagccttccttgggcaataggaaagcaggcagcatggatggtcttcactgcctccagctctggccacaccagagtcctcgggctgtggaggagtccagccagtgctgtccccatatctccctgtggatcccaggggaggctgtggggccgggcatattagaaggggcccagcagccttggtgagtatagatgtgctttctgggctgcccagagttattcaggattagcaggaaaaaaagggggagcaggacccagatgggggcctgcccttcttagcagtgcctctctgccttagtgtcacccatctaatggagagatatgcatatacagagccccacctccttcggacagtggccctggcgtggtgtgtgttggaggactgtccacagcctcagaagcgaagctgggggagggtgtgaagtcagcctgggtaaggggacaggagtaaggtagggggcagttatgaagctggaagctacaggtaccatgagggcagtgaggaaaggaggaaggggcccaaggggacctcggcctggtaggggagatgggtggcagggacctacaagaaaagtagatggaaggagaggatgcctgtgggtgaggacatgtaggtagggggacctggcctggggcatggagggctcgattcctgagagatgagctgtcactgtgggtggtcccgccctccacagatgggcggccccctccctgcaggcacagctggattgcatctgcctgtgacatggtaggggatgtgggacactgggatgtatgcataagcatgacacaggttctctcctccttccggcttatcccctacaaagagggggtgagttacttggatccaggccaaggggaccttggtttccctaagaccggcccagagtcactcatttgccagggcttcttgcctgtcaaggagatccgggtggggcccaggaggcccaccagacagatggctgaatcacaggagtggccggcgggacccatggcctgagggcttgtctgggcacccccactggattgggggtgagtcatccccaactgcagccccaccccccacggcgctgctgccttgtggctctgcaggaacctgtccactcctcagcctggtcactgtgattgacctaaagcagccaagacctgtgaccttagatggagttaggggtactccctcagcatctgcccatgcagaaccttctgggaaattcccagaagccacggggggtcggggggtttatagttaagtgcgtcatatcgtttgtctgggggaggggtggggggggcggcgacctctcagggatatgggtgagggcgggtgcctgggttcccgcctgccgctccgccccccgagatcagggacttttctctgctctgcccgagagactgcagcggcggcggcgggagcgggcggacgcgcaggcaagaccaggactcgggctggaggggcgctgggctcggacctgccaaggccacgggggagcaagggacagaggcgggggtcctagctgacggcttttactgcctaggatgacgctgcggcttctggtggccgcgctctgcgccgggatcctggcagaggcgccccgagtgcgagcccagcacagggagagaggtgggca

SEQ ID NO: 29529 - DNA, 2300 bp, Homo sapien
cacgcccagctaatttttgtatttttagtagagacggggttttactgtgttggccaggatggtcttgatcttctgacctcgtgagccacccacctcggcttcccaaagtgctgagattataggcgtgagccaccgcacccggcctgtaatgtatttcaatgttaagtctccaccccaaagtgaacatgggtcatatacaacacacatgtttattcagtatacttgcattaggacccccttcatgagtatctatagctcttcctgtaacctgttgaatatggtattttttgtttttgttttttcttttttgagacagagtctcgctctgtcacccaggctggagtgcagtggcgcgatctcggctcactgcaacctccgcctcccaggttcaagcgattcttctgcctcagcttcccgagtagctgggattataggcacatgccatcatgcctggcagattttttgtatttttagtagagacggggtttcaccatgttagccaggatggtctcaatctcctgaccttgtgatccgcccacctcggcctcccaaagtttgggattacaggtgtgagccaccgtgcccggccgaatatgtatgtttagccaagccattcgacataaagctcctgcctctttttaagggtctgtctctggttttgaccagaagcccacctcccagcctgcaggttgtaaccctttataagaaataaagtcagcctggcacggtggctcatgactgtaatcccagcactttgggaggctgaggtaggaggatcacttgagctcaggagtttaagatcagcctgggcaacataatgagacccccgtctccacaaaaaataaaaaaaaattagctgggtgtggtgtgagagcctgtggtcatggcatctggcatgatttttataaagatagttttattttaagtataagagtagtttttgggtaaggtgtggtggctcacccctgtaatcctagcactttgggaggctgaggtgggtggattgcttgaggccaggagtttgatatcagcctggccaacatggtaaaaaatgcaatgatcctagcccttgcctcttcctgtacttaagatactgtctgacaggattaatgattatgcttctgtgacctataaacagatgtactcttgcacccaaaccttgatgagatttatgctctaatgtaacttctgagcacatttgatgtaatttctgagcacatggagagccgccaccaccagtgtataaactgtcggaaacactgctttggagcagtctagcagaaactccctgaaaggctctcccgggttgcaattcttggtaagacttctgaatagaactaactttaaatatttaaaagcttgtttttttttttctttagttgacataacaaagcataccttagaagtctttttttttttttttttttttttttgagacggagtttcgctcttgttgcccaggctggaaatggcgcgatctcggctcaccgcaacctccgcctcccgggttcaagtgattctcctgcctcagcctctggagtagctaggattacaggcatgcgccaccacgcccgtctacttttgtatttttagtagagacggggtttctccatgtcggtcaggctggtctcaaattcccgacctcaggtgatccgcccacctcggccttccaaagtgctgggattacaggcatgagccactgcacccagccagaattctttttcctcttacagaaaaggaaaggtttcaccatgttggccaggctggtcttggactcctcgcctcaagtgatccacctgcctcggcctcccaaagtgttgggattacaggagtgagccaccgctcccggcctgtacttagttcttttaaagagaaaactggcagggcgcaaaactggccaacatggagaaaccttgtctcttctaaagaaacaaaaattaccgggcataatcccagctactcgggaggctgaggcaggagaatcgcttgaagccgggaggcggaggttgcagtgagccgagatcgcgccattgcactccagcctgggcgacagagcgagaccctgtctcagaaaataaaaaataaataaagagaaaaaaatactgactttcagcaccaacttgtggtcccaggtaagtttccacgctggtactttagccctgggctcgaacctgcggacacgctgtggctgcaactccccgcccgccagacctcagtacgcagcgcggctggtgagaaacataatgcactctgacttccacgcgtggaatggggagatggactgcacggcgggcggacct

SEQ ID NO: 29530 - DNA, 2300 bp, Homo sapien
gggctgcggttgggtgtgggggacctgcgagtttggtcagcctagagaggtgatgcccctggtggaaagcaaaaggttttaggggccgtgtggattttttttttttttctttttaaatcggctcttgctctgttccccgggctggagtgcagtgctgtgatcaccactcactacagcattgacctcctgggctcaagcgatcttcctgcctcagcctcctaagtagctgggactacaggtacatgccaccacacccagctagttcccccacctccccccacccaagacggagtctcgctctgtcgcccaggctggagtgcaatggtacgatcttggctcactgcaacctccacctcctgggtccaagtgattctcccacctcagcctcctgaatagctgggattacaggcacccaccatcatgtccagctaatttttgtatttttgtagagacgaagtttcaccatattggccaggctggttttgaactcctgacctcaagtgatcctcctgccttggcctcccaaagtgttgggattacaggggtgagccaccgcacccagccccagctagtttttgtttgtttgtattttgagatggagtctcgctctgtcgcccaggccagagtgcagtgacatgatctcaactcactgcaaactctgcctcccgggtttaagtgattctcctgcctcagcttcccaagtagctgggactacaggggtgtgccagcacgcccagctaatttttttttttttttgtatttttagtagagacggggtttcaccatgttagccaggatggtctcaatttcctgatgtcgtgatccacccacctcagcttcctgaagtgctgggattacaagtgtgagccaccacagccggcctttttcttttttttgagatggagttttgctgttgttgcccaggctggaatgcaatggcgcgatctcggctcaccacaacctccaccttccaggttcaagtgattcccctgcctcggcctgctgagtagctgggattacaggcatgaaccaccacgcctggctattttagtagaggcaggtctccatgttggtcaggctggtctcgagcccccgacctcgggtgatccatctgccttggcctcccaaagtgctgggattacaggcctgagccatggtgcccagcctagttaaaaaaaaaaaaaaagtttgtaaggtcgggtgcggtggctcacgcctgtaatcccagcactttgggaggccgaggcaggtggatcacgaggtcagaagattgagaccatcctggctaacacggtgaaaccccgtctctactaaaaatacaaaaaattagccgggcgaggtggcgggcgcctgtagtcccagctactcaggaggctgaggcaggagaatggcgtgaacccgggaggcagagcttgcggtgagcggagatcgtgccactgcactccagcctgggcgacagagcaagactctgtctcaaaaaaaaaaaaagaatttctgttagttactggtttctttaactgtttgggacttagtttctttttttatcttttttgagaaaaaatctcactctgttgcccaggctggagtgcagtggtgcaatcacagctcattgcagtcttgacctcccaggcttaggtgatcctcccacttcagcctcctgggtagctgggacaacaggcatgtgccactatacccagctaattatttgtattttttatggagatggggttttgccgtgatgcccaggctggtctcaaacttctgggctcaagccatccacctgcctcaacctcccaaagtgctgggattccaggtgtgtgccactacacccagcctagggcccagcttcaaaaggaggtgctccctcagtttggggccagctaggcccgctgggacagcaggacccagaacccaggtctgccgttgtcctcaagccctggactccagccccctgaccacagccagtttctggccaggctgctcatgaaaggccatgggcctggctggaacctgctgccttagagccaggcctcttcccgggggaggggcgtttgcccgttgccaggtgcccgggttccggccctggcactagcgacggccatgctgcatgtgctggcctcgctgcctttgctgctcctgctggtgacgtctgcctccacccacgcctggtcgagacccctctggtaccaggtggggctggacttgcagccctgggggtgtcagccaaagagtgtggagggctgtaggggtggcctgagctgtcctggctactggctgggccctggagcaagccgcatcta

SEQ ID NO: 29531 - DNA, 2300 bp, Homo sapien
tatgtggagtccctgccacttactgccttatgacctaggactgatgctgtggggtgctggtggagcagctgatgtcgtgtttacagagcaaggcttccctgtctcccacggggaggggctcgggcctctagtcagacattcctgcagagggtcggtggaggggtcattcacctgcccctgcagcaagcaaaagttgtctgtggtgccatttgattccctgacactgccccctgcttgaattgattccgaagggtagggtgggaaggtgagcaaagggagcagaaacaagggaattcaagacccagaatgtaggtgccactgcctcctatgtttacaggatcctccgtggccctaggcacctgggctgcaggaagtgactccgttccactcctcctttattcccttaaaaagggaaaaatgactgttacgaccctgttcacaaaactcttacttttgctattttgtctgctgtccagaactgaagactttaaaattttgttactgtttacaagtccagattcaaaaaatgtttttactttgtttacaactcaaaactttgagttttacactttgtttacagtagataattttttttcctttgtttccaagtgaaaggtagggaaagtgggagagggacttggaggacccacctgtgaggaccctgacctggccatcttgaggggttttctaacccccaggtctcccaggccgaaggtcagccttgagtcccgtttaacagcagatccagaagaccttgagagtaggcgtcctctaaccacgggggagagtggctgtgcagggctggggggtggtctgtgcagacacctcctcacccaccaccccatgcatactcttgggaagcagcttcctgggagattagaaattctacttccctgactggagctaaatcccaccagccaggacccaaactctccttaccgagaaggaccccagctcttgaagggctgagtggcctgctgggggtgggagggtgtctttactatgtcctaggtttcgtagatgcccctctctggggttcccctcctccagcccagcggccctctttcctgtctgtgtaaattgttccgtgaagccgcgctctgttttgggaataaacttctatagaaaacagttgttgccttttcctgttgggggctggggaggtaggatggaagctgtgaatgattcaagccagactgacctttgggaggaatctgagcccctcccaagaatatccagctatttttagcccatttcatggcagatctctttcaccttgaaatctggcccctcactttgtaattggggcctgatgttggagcacaggtgctgaaaataaggtgctaaggaaaacctccccgctggtcaaggcaacggcaacaggacttcctaattcttcagggtctgcagccctgacccggcattttttgccctcacctgcggtgaaaccaacctgaggaactgctcttgcagttcctgccttgcccacccaacagcactgacgcccacccaacagcactgacccccaccattctcctcggcggcccgcgcagtaaccttctgggagctacgtccgggctgtgcttagtgcagcggaggggatcctccaaccatttctggcctgggtggccagagttaaaggggaggacttggggaccgttggctccgggtctcaaagagatgcgtagtcgcagaaagcctgcgggtggcgctctcagctgaaggcaagagaggccccacagacctggatcccctacgagttaaggctggggtcaccggccagtggagtttccttttcccactccgtgagcaccttccgccgagccaggacctgggatcagctccaacctactcagggcctgggggcgcgactgcggccagcccggcgcgggtgcttagttccagttctgcagtcccatccagctccgggcagagggccgggcgagcagcgagaggcctcataggccaggtcgccggggaggaagcggttaaatcctccttctccagtctctccccgcccggcgcgcgccacttaggccccgccccagcgcgctgattggcccaagcctccccgtcctgccccgggattagcccccgggagagcgcagctggcctcacccggtcccggcgccgccttccggagcgtagcggcctctagctcgagcagcaggagcagcccgcaccggacaacttgcgagccatggggctggcggatgcgtcggggtgagttcagcgcacattcccggtggccccgcgcgagcgcctcgctggagcaggcattctccgcttgcgacgcctcg

SEQ ID NO: 29532 - DNA, 2300 bp, Homo sapien
caagacctaggatgcccacccccaatccctatccctccctgcccttcctttgcagatgcggatctccccttggtcattcaaggcactgctcaggcatcttatgcaagaaggcgtcccaggttgcgaaggtgactcagacgcctcctttgggactccaacacccttccccggcagagcccctgcctgtctgcctccgtggtgtcaggttttgtgccctctactcactagattgtggacacagaaagcgctggtgctgtcaaaaccacttctgggttgccgggcgcggtggctcacacctataatcccagcactttgggaggccaagatgggcggattgcttgagcccaggagttcaagactaatctggcctacatggtgagaccctgtctctataaaaaatgcaaaaattagccaagtgtgatgacatgtacccgtagtcccagctactcgggaggctgaggtgagagaatcgcctggggagttcgaggctacggtgagctgtgatcaccactgcactccgaaagagtgagaccttgtctctaaatagataaataaaactactttgggggactcgctcctccagcccctgcaccgattggctcccattcaaaggagttcagccctaagtgcctctgcagatcttccacccccactcacaaacccgtaggaaccccggccgtgtatcaggcccagagctctgatcctggggaggtcctcagattcgtagacaggagagggaacaactggacacctgttgcctgaccttggtagccacaaggggcgctcgggaggtggaacccgcagaagccccgcctcccggaagcggagcagtcaaggggcgaaaggatgcgccgactgattggttgatggtgatgtcatagggaccgttcggggcgggccagaggccttggccaggagttcctcgcctgttagaaccaggatccaccccatcgcgggagccgcaccctgtggagcgttctggggtcccggccctgacctcttcctgggcttcgggatgcccgcgtcctctgcacccggcgctgcagctcgttatcgattccgcctttggaggccggtccgtatagtgtacctcccggactctctcacggttagccggcaacccgcggagccccctcccccatgcgatgagtccgccgtgaggggcggggcctcccattgtgccaatagaaacaatgactgaccgattggagtgctccgcgttcacccctcgcctccgctcctctcgtgacgtctgttgcgccaggtccacccattggcctggcgagaccggcgcgtgccaggagttacgcagggagagctggaatgcaccgagggtggggggaggactgagtttctgtgtcagtcccttcaaggggttaaggcatgcggtcgtgacggacgaggggcggggacccgaagaagcggggcccgcagccatggggcaacgccgggctccacgtggcatcccagagcactcgggactcgcagcctgggagggggtgcagcctccagtgaaggggccccgagcccgggagactgctggggaccagcaaggcagggaagaatttggcctctgctcccgcctcgggagggtcatctctggtccctgctccgcaggggcgatccaaacaagcaggtggtcgcgacatgtttcataaaactagctgatgggatagttaaagctattgttcggggtgctggcaccccagacccctctccagccatcgtcccctctaccccaggatttcacacagtaccccctcccagagctatgagaacgctcatgggcaccaaaatttcagaccaaaatccgggacacggttcagaactagtggtcaggaagggggaacaagagatctggaaggacagaaaaaggctgggagacggagctgggacagcgccctagaaggagggaggtgggtgaaggcggcgaccgaaagtggggagggcggacccaacgacggcgaaccttcgcgctctgttcagcaccaggagcaacgctcacgtcctcaataaagatggcggcaacatcttcggtcctcagagctgccatgcgcgatgggttgtaccaccgtgtttcgggcgccggggcagaggtggagcgaaccatcggggcggccgggagccatgttggagcggcgggaggcggcagcagcgtcggggatgctgtggtgggggcggaaaaagccagggccgcacgccggaggggctccggccgcggagtagatggtgcccagagggcggcgggggtgcggagagacaggcggaggggcgggggcccggggcggcggcaggggccc

SEQ ID NO: 29533 - DNA, 2300 bp, Homo sapien
cgcatcctgaatgaggaggagacctcaccccagtgccagatggaccgcatgattgtccgagagatgtgcaaggaattcctggtgctgggggaggctcccagctagcaccttgctgtcctcccttccctgcagctccagtcagtgtgcaggggactcaggggcttggccctaagaatgttttgcactgacagtgggaggggataaggtggcagaaggaacctgagcaggacccccacctgaagtagaacttaagagaggggccaagtgtaggattggggaccatggtctgggagctgttctggggcagggggaatatgcaagctaaagcccctctataccctggtaggcttcctcttcagcatgcccccctcttcaccccacacccatgtgtacactcagagtcctgctgccgctccaggctggaccagacccccatccccacccctcctggtctgtatcctgggcctcagcaagccatgcccctggggtgaggggaggcatctcccaccagctctattctttgccttagctttgcagtgagtgctgctcatgtcctcccctccacccgcacatgggggtcgctgcccttcactcctacccccagaggccttggccaagctgctgctttgaaagcgggatcttggagacaggccatccatcctggagcctcatggaacaggatgatggcactgagaaagccaatgaccgaatctcttttctctgtaaaaatgtagactgaaaagccatgtgtattttcctatgtgctgtagctctcctttggaaataaatcacaggcatctggaaacaggcttccctgtatgatcttgggagacagtgggagaggatgggcagaagtactggggcctcaggaccccatcactgcagcttgcactgacttctccagcctgaggaggtgatggaccctgacaggcctggccttcaaggccctttgagccctgttctagcctctcttccctgagctccacttttcctgagccccagccatagccaagtgcccctcagcagcccattcgcaggtgtctgcatctccaggcttcacttacacacttacatctttctttttctccttttttttttttttgagacagtctcactctgttacccaggctcactgtagccttgacctcccaggctcaagtgatcctcctgcctcagcctcctgagtagctgaaactacagtagccaccatgcccagctaatttaatttttttttttttttttggtagagacagggtcctactatgttgctcaagcaggtctcaaacacctcagttccggtgatcctcctgccttggcctcccaaagtacggggattataggcgtgacccatcgcaccggcccgcttacatctttcacttacatcttttgctttgctttgaataccgctactctctcccctgttgaaaccctattgtccttcatagttgttctcaaatgaagcaggcccctacctacccccagccctggcctctgaatgcttgggcctgtccagccctattttcttcccccatttgtccttgtttccagcaagatcacctcatcttgcaacctcagcagagatctggtaatcatggtagggcagaaggagggtcttaacaagcatggggttacgtttccattagtgttttagaggaactaagggccaaaatttggcaaaaacttcactcttgcagactctcaagttagcaaagaagttctcaccataagtttgggagcagagtcagaaacccacaggcagacaccagtcagaagtgttgtttctgttttctagattgagtctcactatcttttcaaggctgatgtccaactcctgtgctcaagcagtcctcccacttcagcttcccgagtagctgggactacaggcacacaccactatataggcttcacacacaagtggttttcatcagttccctttattttttacccaaactcttcattcatcagatgtttccacacatcagcaatcactgacactgacttctggtcatgactttttctttcttattggggtgctgaaaacagagggcagttatcctcccaaaaagaaggtaaagcagcacagggaggcaagggctagggatggggccccccagcaagaggctctcagaagttgaagcagcaacattccataggaaacccatgggaggaaagtatggggtcctggtgggggatgccctgctcaccgcttactgtcagaaggccaggtgcacaaactcactgggacctgaggaggggttgacagtgtttggcccccagtaaagctctgtgggacacaacct

SEQ ID NO: 29534 - DNA, 2300 bp, Homo sapien
tatatagtgctcctgtcattctttccaagagcaggcagtccccctcccaagcctcaccacatgctgtgaccacctccctggctcagtattctcctggctgccacccccactccatggatcctaaagtcagcacaacctcttggcatggtgtacagtctccaacccagcatcctgaaggttacccagaaaggatccccaagttacataccttctggcgtctgtgctggctaagtgtctcagcacctctatccaaaaaccacatgacgcttgacacaggtcttctcatgggccgtatgcagcttaagccaattagatagcaggtgatccaaaccttgggtccagcttttaatccctcctatgccactggcagcagctaattggctggctattgtgatagatgtcctggaagcaatactagggtctctagcctcgggtctggtccattggcagccatggactgtgttgtaaaggggcccaggtgatggagggtaccataaaaaggcgtgtttgggcaggtagggtggtcctcttggccacaccacctgtcaccactcctgcccagccctagtccccattgcaatttcaccagtcttattcttcaggcagtcccagacagcacagaccccgagattctgccctgccccaggagggcttctgggaggaggaagggccaagagaggtcttgaactgaagagccagacctggtgcagagaaggcagggtctggatgtcagtttctagcagttctacccctcacctgaacctcacactaggcctatgtactttaggcctaaaaataggcaactgggtcagacagacacccataatcccaacactgggaggactgcttgagtccgggaatttgagactagccagagcaacatagcaagaccttgtctctactaaaaaaaaaaaaaaaaaaaaaaaaaaaaaaagctgagtgtggtggtgcatgcctgtagtcccagagacagtaggcttgagcctggaagatcaaggctgcaatgagcttgatcatcccactgcactccagcctggacgacagagcaagaccctgtctcaaaaaataaatacagataaaaatagaaaacttgcacacactggcctgtacacgcctcctgcttcctgggctcgggcttcctgtggagcgtagctggaccattctcagccacagtctctccaggaccctgagggcctcttccctgggtcttccaggcactcttattacacggatttcatatatctggagatctgggctgactggaaagctgggtggatcaaataggctcttaaggccaccgtggtaccccactccctctttcagccctcctctatgctctcagaaaggggcatcgcaaatcttaagtcctataaagacaataaaacacagcaagatgatagcgattgatgggggtgggagcttgacggacaaatactataggagagggaagggaaaattgtcccaggtagagggaacagaatatgcaaaggcccaatatagagaaaaccagccatagctgaagagagaggaggagtaggggtggggagcaaagatgggagggctttagacagggaatagccccgcctggtttctgcttttgtggcccccttctccccacacttgctccccactggccaccaccggcactcggtgaagacaggtggtgaggcctagacacaccgagagccgggccccgcgggggcttccaagtgtcggatcagcaagatcatcctttcgaggtcgccgtccttgcaattagtagatgggacccactgccccagggcggtaggggcgcacccgctacgagcggagcgcgctttcaccgggaggtaggacgggacgcagcgctcggacttaagcggggaaagggagcagagggctggacgggtgaaactgaggccggggtgaggagtgagggtgcggtgtccggggatgaggggcctggagccgggagggaccagaggagacagcgagctgtcgaccccagccccgccgcacctcttggggccgcgcgggggcgctgctctccgatgcgtggaacgatacagcccggggcggggcttcggcgggcgggcgcgcgcgcgcctgcgtagtgtgtcacggggcgggacaaccgcggcgcggctcggcgctcccggcctggcgttgtggcgccgcagcccttgccaccttccctgcacctgccctgcccggcctcatgtaccgcgcgctgtacgcgttccgctcggcggagcccaacgcgctggcgttcgccgcgggcgagaccttcctggtgctagagcgaagcagcgcgcactggt

SEQ ID NO: 29535 - DNA, 2300 bp, Homo sapien
gtgtgtatcacttgaggccaagagtttgagaccagcctggcctggataacatggtgaaaccccgtctctattgaagaatagaaaaattagccgggtgtggtggcacacgcctgtaatcccagctacttgggaggctgaggcatgagaatcgcttcaaccctggaagcggaggttgcaatgtcatagcactgcagcctgggtgacagagcaagattatgtctcaaaaaaaaaaaattctgagaaggtggtaactgctatggaaacatatagagccaggatgaggggataaaggtggtactgagtgctgggggcagagtggggcaggttacagtctgaaatgaggggctctgagagctggggtgcagctctttggaaatctgtgcaatccaggcatgggaacaaccataactcatacactgtgcaggagagtgcatggggtgtgatgtgtgaggaacactgggagattgagcagcaaggccaaaagctggccggggagatacagtcgggggggtgatagggaattatgaaggtcctgatgtctctggttttcccttggggaggaagtactccagggttctgagcagggaatgggaggatctgactcatgtattcacaggctgatgtgtgcagaacagactgaaggcatcaggggcagcaagaggagaccaggaggcagctgtgacattgcactcaagagaaatggtggcagtttggactcagtgaaaggtatggaggtggcaagaagtgatttcattctgggtagatgatgctgatggagacagcagaccttcctggtgcactgaatatagatgggaaagagagtagtcaaggggtactttgaggtgtttgacttgagcaataagaagggctgagatgctatcactcaatttggggaaagtggggtgaagtaggtttggcggatgagccagtgttagggtagcacaagttgcgtttgagatgccagcaactggaagtcagagtgcagatgtctagttgacagtgggactagtgaatctgccactcaggaagggtctggactggacaaacacttttaggagtgattgacatgtaggtggcatttgaagtcatgagcctggataagattttggaagagtgagtgtagacaaagagaaaacacacagatgagaaactggtgagactggaggaaaccaggaggacatggagccctggaaaccacatgctaaggtgagaggagctgctcacagaagtctctcctatccactgttataaggtcagggatatttatttattttccttttttgttcactgctgtatttccaataccgagtgtaagtgcttaataaatacttgttgaattaaaaagtgtatgagtgaatttacacctttgcaaatgcccagtacacagggctgcaacattgttctcctttacagaaagagcagagatcaggtaggaggctctgcccattctcagtggcactaaccctctcctttgcctttcacagctatgctgacattcactcaggtgagagcccttctgtccaacacaggcccaagacaaatgagcctcagacaagccctgtggtgtggtgcttggtgggagctgggttgggcactgggtcatccaccagtccccagaaaactctatggccacttctctgtccacccttccatatctaataatctgtctgtctgtatctataaccatttctttgtccaccgtctacaggcactcttttgtccctctttccgtctattcacatccagtcttctgtccatctgctagagtgaccaacttcccagtttgtagtggactgtctctgtgttagcattgaaattcctgcatcctgcgaaatcgctcactactgaacaaaccaagactgttggtcaatccatctgtttcccaggtatcctgctgtccatcggcccgcagctagtctatccacccaaccgcccgtcagacctccggcccaccctcccagacggaggacaatgctccgccctctctggccccgcccccagtcaccgccttttccggaagctgctgcagcgaatcctggcaccctagcaacagcgcctttcaggctgtccagtccgcgtgcgcagctcctaggacgagccaatagtgaggggcaccgggagcgaggtgcagggggcggggctcggcctggccgcagccattttggtgcgagagaaacaataggacggaaacgccgaggaacccggctgaggcggcaggtaaagctcgcgtcctatggccctagtgcccgaggagctttgagggagattttttcaggctactgggaaacgggatctctgat

SEQ ID NO: 29536 - DNA, 2300 bp, Homo sapien
aaaaaaatacaaaaaattagccaggtgtggtggcgggcacctgtagtcccagctacatgggaggctgaggcaggagaatggtgtgaacctgggaggcagagcttgcagtgagcagagactgggccactgcactccagcctgggagacagaacaagactctgtctcaaaaaaaaaaaaaataccattagtccattttacctttcctgaagattgaggacggtaaggggtgtgaaggttttgctgaatatcaagagtctgagaaactgcttgggtgatatgactaataaaggccagtctgttatcggactgtatagagatggaaaggccaaactgaggaattatgtctgacagaagggaagaaatgaccgcggtggccttttcagaccctgtgggaaaggcctctacccatccagtgaaagtgtctacccagaccaagaggtattttagttttttgactcagggcatgtgagtaagtcaatttgccagtcctgggcaggggcaaatccctgagcttgatgtgtagggaagggagggggcctgaacaatccctgaggagtagtagaacaggagatagaacactgagaagtgacttttttgaggatagatttccacaatggaaacaaaataagaggttttaagagacgggctagggccgggcgtggtggctcacacctgtaatcccagcactttgggaggccgaggtgggcagatcacaaggtcaggagattgagaccgtcctggctaacatggtgaaaccccatctctactaaaaacacaaaaaaattagctgagcgtggtggtgggtgcctgtactcccagctactggggaggcagaggcgggagaatggcgtgaacccgggaggcggagcttgcagtgagccaagatcgtgtcactgcactccagcctagccaacagagcgagactctgtctcaaaaacaaaaacaaaaacaaaagagatgggctagcggcttgtaacctacattaaagaggttatgaaatgatgacagaatagaatgggcctgtgaggctggaaggagatattcttcttggtctaagaaccacttgccttgtgtgggaagagactgacaggtggaagttttagtgggagagtaggtgggagtgactgataagaggaagaaaaactggccacgaaggacagaagttagaatgctagctgcttgtttagctgtcttatcagcataactgttgccttgagcgatgggatctgatgccttttgatggcccttgcagtgaatgactctttggaagtaaagcagccttgagaagagtttttattaaagaggcgttaatgatggaggacccttgcgtagtgaggaaacctctttcagcccatataacagcaatggtggtgcaggatatggaaggcatatttagagtcagtataaatattgacgtgtagtccttttgcaagagtgagggcccgagttaaggcaatgagttcagattgctgagaggtagtggagctgggcagagtggtagcctcaatgatagatgtggaagatactatagcatagcctgcctttgctggtgagtggcaattaggcctggtggaactgccatcaataaaccgagtatgatcagggtgaggaacaggaaagaaggaaatatgggtaaatggagtgaatgtcaggtggatcagagagatacagtcatgggggtcggagtggtatccggaataatgtgggaggccagattgaagtccagaccaggaacaatggtaattgtgggagactcaacaaagagtgagtatagctgaaggagccagggagcagaaagtatatgcgtcaggtgtgaggaagaaaatagattttggaagttatgagaactgtagagagtgagttgaccatagtttgtgaatttgagggcctgtaaaactattagggtggtggcagccaccgcacagaggcatgatggccagcttaaaatagtaaggtcaatttgtttggacaaaaagcccacagggtgcagtcccagtccttgtgtaagaattttgactgcacagccctgcacttcagctgtgtgtaatgaaaagggttgggatgggtcaggcagagctagtgtgggagcagtctctagagctgtctttaaggaatggaaacaggagtggggaaaggatttaggatctatggggtcagctaggtttttctttgtgagtttatataatggttttgttaggatggcaaaaccacgtatccaaaggtgaaagtatccaaccatgcccagaaaggaaaaaagttgttgttttatagaaggggttggggtttgggagattagccag

SEQ ID NO: 29537 - DNA, 2300 bp, Homo sapien
aggatgattatgcttctagtgtctgttgtccttagtcatgctactcttttctctctgggctgctgttgtgtcttcataaaatgagtaacctagacacgcaagcatgtgatgtcccttgctgctctaccttgcatcatacaattctgtttatagaagcattctgggggagcagtgaaaggagaacagctagttttttgttttgttttgttgtattttgttttgttttttgagacagagtctcactctgttacctaggctggagtgcagtggtgtgatctcagctcactgcaacctccgccttccgtgttcaagcgattctcctgcctcagcctcccaagtagctgggactacaggcatgcgccaccacgcctagctaagttttgtatttttagtagagacggggtttccctatgttggccaggctggtcttgaactcctgacctcatgatccgccctccttgtcctcccaacgtgccgggattataggcatgagccactgcgcctggccaagaacaactagatttaagatttgaaggactccccccaggtagggactcctcagaaactgtcatcttttttttttttttttttgagacagagtttcactcttgtcgcccaggccagagtgcagtggcacaatctcggctcattgcaacctctctgcctccttagttcaagtgattgtcctgcttcagcctcccaagaagctgggattacaggcacccaccaccatgcccagctaatttttgtatttttagtagagacagggtttcaccatgttggccaggctgctctggaactcctgagctcaaatgattcgcccgcctcagcctcccaaagtgctgggattgcaggcgtgagccactgcgcccagccagaaattgtgatctttatgctagttattctaaacatcatgagaaagtttggccagcaatgcatttctggcctcaattgccttctgtgaggtcaggtgctaggaatcaaatttttctgaaggtgtctctttttttttgagacagagtctcgctcttgttgcccaggctagagtgcaatggcgtaatcttggctcactgcacttcgcctcccgggttcaagcaattcttctgcctcagcctcctagtgtagctggaattacaggcatgtgccaccacgcccagctaattttgtatttttagtagagacctgaggtgatccgcccgcttcggcctcccaaaatgctgggattacaggcgtgagccactgcgcccagttgaaggtgtctcttatgtgtgaatttttttttttttgagacagtcttactctgttgcccaggctggagtgtgcagtggcgtgatcttggctcactgcaacctcctccgcctcccgggttcaagcaattctcccgcctccacctcccgagtagctgggattacaggcatgcgccaccacgcccagctaatttttgtatttttagtagagatggggtttcaccatgttggccaggatggtctcgaatccctgacgtcaagtgatccacccatttcggcctcccaaagtgctgggattacaggtgtgagccaccgcgcccagccacttacaacatttctaaccctccctctcacttcttcccaaccagaatccttgatcttgtgggcatttctttctgttctataaaaccatttatctggcatgtctttcagtacacaaagttaggcgtgcccagcccatttgtacaccacagggcaggaggctagccaggctacagtatgagaccagaggattggcactacccactaggaaaaccagcaggactcttcaccagtcagtctatgctgataggcagacaaatgcacatttgacaggcagctattggggaaggctgctgaaacagaagataccagccaaatcccctgtagccttcttggccatgggcctaccccttcctccctctgcagaactgcactgagccaggggacaaaggtcactgtgtactctgctataagccaggatccagcaataccctttctggctaggtcctccaactcccggaaggaggggaggtgtgtgcagttgttttttgtctgctaaacagataaaaaggagctaaaatctagacccaccagataagcaaaccagcactttagagtataacatccagtgatggtcaaactgttcactttcattctgaaactgctggcgtgggcacgagtggacagctgcagtacacactcccatgtctgctgtgagctgagtcttggcctgtggccaggtagggagaaggcctttgggacgggtaagcctgggacgcgggacatgctgga

SEQ ID NO: 29538 - DNA, 2300 bp, Homo sapien
gataccttgagcttgtgaggttggggttgcagtgagccctgattgtgccactacaccccagcctgggtgacagagcgagatcctgactttaaaaaaaaaaaaaggtgtgatgatcttggatcaccaaatctgtgaggggagggacagtctccaacttgtttcctgctcggtccttattgcgtactcttggagtttattgcaaactcttggagaaggtttactattactaaatgataaatcctgacacagcaagtagagccaatgaagctgctctcctgatctcagtctctgctgggatcctttcctttaaagctacaacccacccactaaacaagaatatagttactgggtttttcctttttctttttttttttttttgagacggagttcgctctgtcgcccaggctggagtgcagtggcatgatcttggctcactgcaacctccgcctcccaggttcaagcgattctccctgcctcagcctcccaagtagctgggactacagacgcccgccaccacgcccggctaatttttgtatttttagtagagacggggtttcgccatgttggccaggctggtctcgaactcctgacctcaggtgatccacccgcctcggcctcccaaagtgctgggactacaggcgtgacccaccacgcccggccaggtttttcgttttcaaaaatgaggtagggtgtctattttgcccaggctggtctcgaactcttggattcaagcgatatttcctcctcagcctccagagtagctggtatagactataggggcccactgccccggccggcaagataattatttactctcaccaaatttgattcaatcgttttggccaagtttttaaaaataggaatattcccagggaccatgtttgaagaaatacaaactcaagtaagcagaggtgaaatgacctgagagatttgctttaatacacttcggcaaagaaagaaaaaaggtatggatgaaactttgtgacaaacgcaactgttaaatgtaggtgatggcatatagggattcatctcacctttcctcttttgtctatgcttaaaagttttcacagtaacttttcaaaaaaaattattatttccaaacaaacttactgtcctatcaattaaacacaagtcactggatgagaacgctgttgtcttcgaagccaaaactggtgaagggtcttaagcaaaggcgagggatcctctagcagggccgacagcgcgcacgtttccttcaaggctggatctgacaaatcactcggtgcgctctagggctcgcaggatcgcggagctcaatttggaagtggcgcacgcgggctcacgccggtgtctcagggaaacgctagaaacgcggctacagagctcccaatcccagcctgcggtcggcttggctgcggcgcgacacctggctccctgccacccctctagacctctggagacctcctgcaccactccccagggccccgcccacagcctaccttccaagtcctcgtcctcctccgactcgctgtcccctttggcgtcggcgacacggtccgggccgggttctggcggggggtggcccaggctctggcgtggggtggcggcgggcaggactgaggctggggcgcgggcctcgcgcaggcgggtgaagtactccactgcgaattcgacgaggtcaggcggctgctgtcgcagcacctccaccgtgtagccctgcagcagctccgtgagccccggcgggatctggatgtggctcatgccggcggcggccgaagggatagacgggttgggccgccggcggccactgtctccgcgctcactcacgccggcctttcgctccgcgcccgcgaggtctcttcgcgcacggccccggctcacgtcgcgccgctctttggccggctctgcgtttccgggccgcgcaaccctacgctaccacggccgacctggcaccgccgccgctgtcactgggcagccgccgccgccgcggggaccgacgggcaggcgagctggacgggcggggcaggcgtcctggttgtgacgcacgccaccgcgggcgtgcgcgtccccgcttagcaccggccctcagtgcgcttgcgccactagatgacccgccccctcgggctgtcggggggtcgagacagtggagtgttcctgatgccagctcacggagggaatccagggaattaggtaatgaacggtctacccatgaaggggaccgattagtgcctctcgcctggtcctgaagacctttaaattattctttcagctgatgccaagagcctctttttggccagcacttactaagcaccagagacaca

SEQ ID NO: 29539 - DNA, 2300 bp, Homo sapien
acaaacaaaatggccaggtgcagtgcctcacgcctgtaatcccagaactttgggaggctaaggcgggcagatccctaggtcaggagttcgagaccatcctggccaacatggcaaaaccccgtctctactgaaaatacaaaaattaactgggcatggtggcaggtgcctataatcccagctacacaggaggctgatgcaggagaattgcttgaacctgggaggtggaggttgcagtgagctgagatcgtgccattgcactccaccttgggcgacaaaaggaagactccatctaaaagaaaaaaaaaaagccaggtgcggtggctcacgcctgtaatcccagcactttgggaggctgaggcgggtggatcacgaggtcaagagattgagaccatcctggccaacatggagaaaccccatctctactaaaaatagaaaaaatttgctgggtgtggtggtgcacgcctgtagtaccagctacttgggaggctgagacaggagaatcgcttgaacctgggaggcagagcttgcagtgagcagaggtcatgccattgcactccagcctgggcgacagagtgagactcctctcaaaaaaaaataggggcctggcagaacggtcgccctcattccttccagatgccttttgaatgctctgctggatgggtggttggctgagccgtggggcatctgagaacaagtcagtagaccttctccaagagtatgcaataaggactgagcaggaaaaaagttggagactgcctgtcccctcacaaagttgatggtctaacattcttctcagggtcaagaaacttgtccagggagacactgctgtttataatcacaggcctgcttagcctagaacctgggctggcctcttcatcagtggggatgagggctccttgctcccagctgctcagctcccagcagcattgagctcctgggtgtgtgccaagcctgtatgggaggtgatagggaggattttaattaatactgagtaattaccaggcggtgtttaagcatcccaaatgccctcaggttcccaaacctacagctactctcttcctggctaggcctgtaaggagagggggactctgctctatgcccagtgggcctttggttagcacgtaggctgtagactggacatcccaggaaggtctccacctttttcaatacccttccagtttggtaggaggaggagggcaatttgggaaatagtctggcctctacagttcacctataccatcttcccaggggcaaaggataacaatgcctgtggtctgctcaacttcatcaagcagtgttgacctagggcccagtgtagaatgtggggagaggaatgggcagacctagatctggggaccctggtgaaagtgctccaggaggaacaggcacagaggtctttgctgcttttggccttatttccctttctcactgtacacatttggctgagtgaactctttcaaatttatttttctgtctgtggctctcaaattatgatctcattcaaacgcctacttcctacaaggccttacccgtttgacatctcagagacctgacagactcctgagttattccaccattccacctggcagccaaggtggtcttgactccaccaggcctttgctcttgttgtatgttcagatggctttcctccagatcttcccctgggcgggtcctgctcaggcctcggggctagcttgaatgtcacgccggaaagtgagccctctcttgcccttcatcacagcagaatcacactgatgtgctcgtatgcttctgcttctcgctgtgtctctggtgcttagtaagtgctggccaaaaagaggctcttggcatcagctgaaagaataatttaaaggtcttcaggaccaggcgagaggcactaatcggtccccttcatgggtagaccgttcattacctaattccctggattccctccgtgagctggcatcaggaacactccactgtctcgaccccccgacagcccgagggggcgggtcatctagtggcgcaagcgcactgagggccggtgctaagcggggacgcgcacgcccgcggtggcgtgcgtcacaaccaggacgcctgccccgcccgtccagctcgcctgcccgtcggtccccgcggcggcggcggctgcccagtgacagcggcggcggtgccaggtcggccgtggtagcgtagggttgcgcggcccggaaacgcagagccggccaaagagcggcgcgacgtgagccggggccgtgcgcgaagagacctcgcgggcgcggagcgaaaggccggcgtgagtgagcgcggagacagtggcc

SEQ ID NO: 29540 - DNA, 2300 bp, Homo sapien
ggggtttcactgtgttacccaggatggtctcgatctcctgacctcatgatctgtatgcctcggtctcccaaagtgctgggattacaggcgtgaaccactgtgcctagctgctttatatcctattaattgacaacttaaaatttttttttctttagactatatccagaatctggccacctcttttttttttttttttttttttttgagacggagtcttgctcagtcacccaggctggagtgcagtggcacgatctcagctcactgcaacctccgcctcccaggttcacgccattctcctgcctcagcctcccgagtagctggaactacagatgcccgccacgatgcccgccatgatgcccggctaatttttttgtttgtatttttagtagagacggggtttcaccatgttagccaggatggtctcgatttcctgaccttgagatccacccgcctcggcctcccaaagtgctgggattacaggcgtgagccaccacgcccggccgaatctgaccacttcttactacctcctctgttatgccctggcgcaagtcaacatctctggccatggcttttagcctccttaaggctccttgtttcttcttgccccctggagtctattttcacccagcaatcaaagggggatcctgataacgatgtcagactatgtcgctccccactcagtaccctgcaatgacttctacgtccttcagaggagagacagtggcaagatctcggttcactgcaagctccgcctcctgggctcaagcgattctcctgccttagactctcgagtagctgggatcacaggcataggcgtctgccattacggctggcaagtttttgtatttttagtagagacggggtttgaccatgttggccaggctggtcttgaactcctgacctcaggtgatccacctgccttggccttccaaagtgctgggattataggcatgagccactgcgtcgggcctttaactttttttttttttttttttttttttttttgtagagacagtgtttcgctctttttgcccaggctggagtgcaatggcacgatctgggctcaccgcaatctctgcctcccaagttcaagtgattctcctgcttcagcctcccaagtagctgggattacaggcatgcgccaccatgccccgctaattttgtatttttagtagagacggggtttctccatgttggtcaggctggtctcaaactcctgacctcagttgatatgcctgccttggcctcccaaagtgctgggattacaggtgtgagccactgggcccggcctaactttttttttttagagacaagagtctcgctatataagtcaggctggtctcaaactcctgggtttaagcaatcctctcgccttggcctcccaaagagctgggattacagacatgagccataacaccaggcccaaacctgtcttctagtgcctccaaaacctctgtcgcctcatcagctactaccctccctcttcctgtggtttctcaaacatgtcaggcacagaccatctcaaggcttttgcattttctttttcttctgggtggaaggttcctcacccttgaccctgttatgtgtgaacagaactccctctctcatcttctcaggtcttgaatcctgtcaccttttcagttaaaccctcccttattcaacgaactaaaattgcaaatcacttgtcccacacaccctctaactctcttcctggatttttctccgtagtacttattactacttgatacactatgcattttttagttatttatctttgttatggtctgtaaattccaggaggacagggacctgtgtgttgtactaccaggggtgcctccagcacctagaaggacgcctggcatatggcagggcgcaattgatctctctggagtgagtggatgaatgggagctcagaggaaacatggaagtctgggaaggcttcctggaggaataggcccgctggcccacactcccaaaccccgcccatgcggctttgcgctctgccacgcccatcgaagcggggccgaggccggaagcagccccgggcggaagccctaccgtgccaactgggccctcctcccgacctgccccgggctcgtgccccgcccacccaaaagtgggtgaaaggtcggcggcgccggcactgcagctggggctgagaagccaggacggcccgagaactgacagacggagtgacagacggactgaccatggccgaccagccaaaacccatcagcccgctcaagaacctgctggccggcggctttggcggcgtgtgcctggtgttcgtcggtcaccct

SEQ ID NO: 29541 - DNA, 2300 bp, Homo sapien
attaggcgtggtggcgggcgcctgtagtcccagctactcgggaagctgaggcaggagaatggcgtgaacccgggaggcggagcttgcagtgagcctagatcgcgccactgcactccagcctgggcaacagagagagactccgtcaaaaaaaaaaaaaaaaaaaaaaaattagctgggcgcggtggtgcgcgcctgtagtcccagctactcgggagactgaggcaggagaatcacttgaacccaggaagcggaggttgaagtgagcggagatagcggctctctcactgcactccagcctgggcgacagagcgagactccgtctcaaaaaaaaaaaaaaaaaagtaattgctactccataggcagagcagtccacccgacaaggtttttgttgttgttgttgtttgagacagagtctcgctctgtcccccaggctggagtgcagtggcgcgatctctgctcgctgcaacctccgcctgccgagttcaagcaattctcctgcctcagcctcccgagtagctgggactacaggcgcccaccatcacgcccggcaaattttgtaaatttttagtagagacagggtttcaccatgctggtcaggccagtctcgaattcctgacctcgtgatctgccggctccggcctcccaacgtgctgggattacaggcgtgagccacggtgcccggccacgcggcatgatttttaatggctttctacattgtatggtttgttattgttgttttgagacagggtctccttctatcaccgatgctggactgcagtggtgcgatcttggcactctgcagcctcgacctcctcggctcaagcgatcctatatcacctcagccccctgagtagctgggatgcacaggtgtgtgccacctcgcccagctaatttttaatttttttgtagaaaggaggggggtctcactacatcaaattcttgggctcaagcgatcctcccacctcggcttcccaaagtgcagggattacaggcatgagccacagcgaccagccagcacaggtgtctttatttgttttattttttattttattttattttattttgagacagagtctcgctctgtcgcccaggctggagtgcagtggcgccatctcgactcactgcaagctccgcctcccgggttcacgccattctcctgcctcagcctcccgagtagctgggactacaggcgcccgccaccacgtccggctaatttttttgtacttttagtacagacggggtttcaccgtgttagccaggatggtctcgatctcctgacctcgtgatccactcgcctcggcctcccaaagtgctgggattacaggcttgagccaccgcgcccggcctgcacaggtgtcttgaatatgtatatacgcgactccagtatggttggaaatgatttgatttgttgtctatggaattgcacaacctggagccttcctaacatcagcggcttcatactggcatttccattgtggtgcagcaacaatctgagtgagcctccgtctctagccacatcatttgacaaccggtcccagaaggtaactggaagtcatgatgacaactcctatactgtgaaaagaaactgcaagcaaggcagttaagatgcaatcttgcacggtgaccgtaagtcggagaactgcgcggcgaacgaggcctcggcaggggaagcgaaagcctggtgtggttgcggctctggggccaccctgcgaccgcctcggggtgtaggcagaatttcccggcccagctcccctctgaccagatagcggccgagaaacaatggttatctgctccactgacgccaggatgtcttctccgtgcccgatcccggagtacaaacagtgaaatgagaagccggtgagaaacgcgctggttaaaaacatctcgacgggagacgctggtaggcgaatagtggctccagacgcggtcggcgcctgccgtaccctggtcagactctgggtcagagcgctaagtttcaaggaggcggcgctaaacaggccctctagccgggagcctgtcgcgacccgagcgaccgtgggtcgaccccgatccggaagtgacgcaacggcgccaagcacttccggagctgtggggacgactcttctggaggaagcagcgcgggcttgaccggcgtcggcccgccgcctccgctgccgcttcgccccaatccggtccctctggcccggcctgacccggtctggcttgttcgggctcagcggccgcgaggccgcagctcccggtaagtgcgcggcgcacgtcacggccttgtttaccttggctggccgctgggggggcctctc

SEQ ID NO: 29542 - DNA, 2300 bp, Homo sapien
tggcgtgatcatggctcgctgcaatctcctggactcaaataatcctcctcactttgggaggccgaggcgggcggatcacgaggtcaggagatcgagaccatcctggctaacacggtgaaaccccatctctactaaaaatacaaaaaattagccaggcatggtggcgggcgcctgtaatccagtgagccgagatcgcgccactgcactccagcaagactctcaaaaaaaaaaaaaaagaaagaaaagaaaagaaatattgtccccttggaacaagatcagcactttttctttctttcatttatttatttttatttttgagtcccgctctgtctctcaggctggagtgcagtggcgcgatctcggctcactgcaacctccgcctcctgggttcaagcgattctcctgcctcagcctcctgagtagctgggattataggcgcatgctaccacgcccagctaatttttgtatttttagtagagacaggatttcatcatgttgattaggctggtctcgaactcttgaccttgtgatctgccaccttagcctcccaaagtgttgggatcacaggcgtgagccaccgtgcccggcccactttttcaagtagaatttgggtatttaactttgagataattaaaaattaaattttcatttaaatctgcacctagaacatttagtatgaaatggagttctctctcttttttttttggaggagcctggagttttccccacctaaatatttggttggtgaaaagcctgtgggcaatttctttttttttttttttttttttgacacggagtctcactgtgttgcccaggctggagtgcagtggtgcagtctcggttcactgcagcctccatctcccagatcaagcaattctcctgccgtagcctcccgagtagctgggattacaggtatgcgccaccattcctggctaatttttgtgttttttgtagcagtgaggtttcaccatgttgcccaggcttgttttgaactcctgagctgaagccgtccacccaccttggcctcccaaaccaaagtgctgggattactggcatgagccaccacacgtggtcctggaatttttctttttttttttcttttttgaagacagggtctcactctgtcgcctagactggagtgtagtggcgtgatcttggctcactgcagcctcaacctcctgtgctcaagaaatcctcccacctcagcctcccaagtagctgggactacaggcatgcaccaccacgacatttatgagtaatgtgacataaatgagccacgacagcatgagtaaagtgagatctgaaatattagcattattctgtgttagattaccacagtggaggtgattttgtagtaaaagttaaattttaagtcagttacaatttgcttggtcaacatctacataacatttaggattgaaattgtggtagttgagaatctgaaggacagaaatactggagtaaagaagcaggctttcagctgggtgaggtggaggttacagtgagctgagatggcaacactgcactccaacctgggtgacagagggaggccctgtctcaaacaaacaaaaaaaagaagtggtctttcaaactgagagagagaattgagattaaattattgctacctgtttacttagattactttcttttttttttttttgagacgaattttcttgtcacccaggctcaagtgcagtggcgcgatctcacctcactgcaacctctgcctccctggttggagtgattctcctgcctcagccttccgagtagctgggattacaggtgctcgaactcctgacctcaggtgatccacctgccttggcctcccaaagtgctgggattacaggcgtgagccacaacacccagctgaatactttctttttttagaaggtcatgtaactcttgtcaatataattatgtcatggattttttttgttggcactttaaaagaagataattaatttaatagttactctgtcccttgttacttgtcctttaaaatacctttgctttaaaaaaaaaataaacttgcaaaagcagtataccagctttaaaaatataaatataattcttttcattttagatggaaatcatattatgtagaatacttgggtgacatctgcctgagagatctccaagaattacaggtatctttaatttaaagattaactttttctcctaaagaaaaaacaccatcgttaagtttagttgtgattatgtggctctaccatacagaagagtttgttaaaagtcaaactgctggccaggcacagtggcttgcatctgtaatcccagcactt

SEQ ID NO: 29543 - DNA, 2300 bp, Homo sapien
tgattctcctgcctcagcctcccaagtagctgggattgcaagtgtgcaccaccctgccaagctaatttattttttattttttatttttttattttttcagattgagtctcgctctgttgcccaggctggagtgcagtggtgcaatctctgctcactgcaacctccgtctcccgagttcaagcagttctcctgcctcagcctcctgagtagctgggattacaggtgcatgccatcatgcctagctaatttttgtattgttagtagagatggggtttcacgtgttagccaggatggtctggatctcctgacctcgtgatctgcctgcctcggcctcccaaagtgctgggattacaggtgtgagccactgcgcccagcctaatttttgtatttttagtagagatgggattttgccatgttggctaggctggcctcaatctcctggcctcaggtgatctggccaccttggtctcccaaagtgccgggattttttttctttttttctttttttttttttgagacggagtctcgctctgtcgcccagcctggagtgcagtggcgcgatctcggctcactgcaagctccgcctcccgggttcacaccattctcctgcctcagcctccccagtagttgggactgcaggcgcctgccactatgcccggctaattttttgtatttttagtagagacggggtttcaccatgttagccaggatggtctcgatctcccgacctcgtgatccacctgcctcggcctcccaaagtgctgggattacaggcatgagccaccgcgcccagctgatttctttttttttttttttaaatgtgttgtagagacatggtctcactaggttgttcaggtggatcttgacctcctggcctcaagggatcctctcatctcagccttccaaagttctgggattatagttgtgagccacaccctcagtctttgttttagattatggttggttgttttttttcagacagattacctacttcaagtagactttatatttgcttttgtatttaatcaagatttgtttatataaattgtttatgtactgttaaatccaaatgctcttacactttaaggttctattagttttagattttttttttttttttgagatggagtctcactctgttgccaggctgcagtacagtggcgggatctcggctcactgcaacctccgactccctcgttcaagtgattctcctgcctcagccacctgagtagctggggattacacgcacgcaccaccacgtatagctaatttttgtatttttagtagagatggggtttcaccacgttggccaggatgctcttgatctcctgacctcgtgatccacccgccttggcttcccaaagtgctgggattacaggcgtgagccaccgcacctggcctagttttagatttaaatcgctagttgatattgttcctttcagctcatcagttgaaatggtagttgtgtagaaaagttaatgggtgtttgccacaatcttctgtgagttgaagttagggtttgtgactgtttcactttctcaactagtattctcttttcgtttatatgtaattaagtaacatttcgctgtttgcgggcttttcttttttgagatggagtttccctcgtgtgtgtgtgtgtgtgtgtgtgtatgtgtgtacgtgtgtgtgtgacggagtttcgcttttattgcccaggctggagtgcagtggcgcaatctcagctcactataacctccgcctcctgggttcaagcgtttctcctgtcttagcctcccaagtagctgggattacaggtgcctgtcaccacgcctgcttaatttttttgtatttttagtagagacagggtttcaccatattagccaggctggtctcgaactcctgacctcaggtgacccacccatctcagcctctcaaaattctgggattacaggcgtgagccaccgcacccggccaatggagtttcactcttgtcatccaggctagagtgcagtggcgcaatcttggctcactgtaaactctgcctcccgggttaaagtgattctcctgcctcagcgtcccgagtagctgggattacaggtgcatatcaccacacctggctaattttgtatttttagtagagatggggtttcgccatgttggccagtctggtcttgaactcctgacctcaagtgatccacccaccttagcctcccacagtgctgggattacaggcatgagtcaccacacccggccagtagaactctttaaacctgaaaaatcagtcaactttgcagactagaggaggatgttgaacacctatg

SEQ ID NO: 29544 - DNA, 2300 bp, Homo sapien
aagggatcctctcatctcagccttccaaagttctgggattatagttgtgagccacaccctcagtctttgttttagattatggttggttgttttttttcagacagattacctacttcaagtagactttatatttgcttttgtatttaatcaagatttgtttatataaattgtttatgtactgttaaatccaaatgctcttacactttaaggttctattagttttagattttttttttttttttgagatggagtctcactctgttgccaggctgcagtacagtggcgggatctcggctcactgcaacctccgactccctcgttcaagtgattctcctgcctcagccacctgagtagctggggattacacgcacgcaccaccacgtatagctaatttttgtatttttagtagagatggggtttcaccacgttggccaggatgctcttgatctcctgacctcgtgatccacccgccttggcttcccaaagtgctgggattacaggcgtgagccaccgcacctggcctagttttagatttaaatcgctagttgatattgttcctttcagctcatcagttgaaatggtagttgtgtagaaaagttaatgggtgtttgccacaatcttctgtgagttgaagttagggtttgtgactgtttcactttctcaactagtattctcttttcgtttatatgtaattaagtaacatttcgctgtttgcgggcttttcttttttgagatggagtttccctcgtgtgtgtgtgtgtgtgtgtgtgtatgtgtgtacgtgtgtgtgtgacggagtttcgcttttattgcccaggctggagtgcagtggcgcaatctcagctcactataacctccgcctcctgggttcaagcgtttctcctgtcttagcctcccaagtagctgggattacaggtgcctgtcaccacgcctgcttaatttttttgtatttttagtagagacagggtttcaccatattagccaggctggtctcgaactcctgacctcaggtgacccacccatctcagcctctcaaaattctgggattacaggcgtgagccaccgcacccggccaatggagtttcactcttgtcatccaggctagagtgcagtggcgcaatcttggctcactgtaaactctgcctcccgggttaaagtgattctcctgcctcagcgtcccgagtagctgggattacaggtgcatatcaccacacctggctaattttgtatttttagtagagatggggtttcgccatgttggccagtctggtcttgaactcctgacctcaagtgatccacccaccttagcctcccacagtgctgggattacaggcatgagtcaccacacccggccagtagaactctttaaacctgaaaaatcagtcaactttgcagactagaggaggatgttgaacacctatgtgtgttttttttttctttaccaactatgcacctatttttcagacacctaaaagtaatgtctgtgaaacagtggttttctttttctacatattacagcaggaagtgttcctatttatgtactgtctgtatcaatactaacggggcatgataagcaaaattttaaactttggtagttaaacctttatgttgcctcccctctgggctgccagctgtggggatgtgcttctcccttaaggactttggcaagaataacaagttcattggaatttgactttctgacatagagcagacagccttgccctgtcatgccaggcctttcatgtgaagttaccatttattagctgcttctgtctctccagggaaggatttcccttttataagcctgggccagggggatgatagtaagattccccatgtgataccagagttggaataggctgtagtgagattagggccaggactgtcccattttgattcttgaatggtttctgttacaacttgtcatggggaaaaagtaacacttattttttttttcctcccttagaagacaaaaatactaatgcatttgagaaagcggtagttttggggggagggggaaaaagcaactgctttcctgatctgcaacttggctggatgctaagatgtcagtggacatgaatagccaggggtctgacagcaatgaagaggactatgacccaaattgtgaggaagaggaagaagaagaagaagacgaccctggggacatagaggactattacgtgggagtagccagcgatgtggagcagcagggggctgatgcctttgatcccgaggagtaccagttcacttgcttgacctacaaggaatctgagggtgccctcaatgagcacatgaccagc

SEQ ID NO: 29545 - DNA, 2300 bp, Homo sapien
aaaacttattcagcacatgtgtggcatagtgaagtatattgctcacttttttttttttttttttttttagttgagacggactctcgctgtgtcacccaggctggagtgcagtggcacgatctcggttcactgcaagctccgcctaccgggttcataccattctcctgcctcagcctcccaagtagctgggactacaggtgcccgccaccacacccggctaaatttttttgtatttttagtagagacgggctttcaccttgtttgccaggatggtctcgatctcctgacctcatgatccacccgcctcagcctcccaacgtgctgggattacaggtgtgagccaccgcgcctgtccctattgctcactttttaagcctgttccccagataggattggagaaatatgccaattatcacaaatgtttttactacatttcttcttgctttatgaattgctgtattaactgcagtaaagctatgaaaatatttcctagaacactctattctgccatactcttttgtgaatttttttaaaaatctggtgtttgctctttagcaaaatgtgactggaaaatctctctaagattctgctgtggataatttttcccctctgtagatgaatagtaatgagttgtcagggcttctgactcttaagtgccgaagtctttatagtcctgtgttcaaaacaacctggcttttttgcctttttcacttgtaacgtgatcaattggtgttcataacaacaaaatacattattttagccattttcttaattggtactaaatacttatataatgccaagttaaaagataacaagtatctggtgaaaactttaattattaaatcaattttcttttattctgatatagctgaattttaagatcattctatttttatttacttacagtcattaattgaccaataatggtttgttgttgttgttgttattattgttgctactactcatgggaaagtatcttcaagctgggcctggttacactgagtgtttgtgtgctgagcagccctctgatttctatttttgtgatctgatgtgagctgtctttgcatgcctctatctaagtagaacttaggttaaattcctgcgtttcaaatagctggccgttaataggtttgttaacatgtttcacagtgttttagtccagaagtctgaggtgtgtttactgatgtgtaaattcatttttaaaaggcgatgagaaatgtccagagtgacattgagaatggcctaaatacaaatggtgcaaagatgtccttgtcttgccagcttagaaaagttattgtcatcgctgtgtacctgataccatacaaaacatgctcatcatcttccagaaaagaagctcttcatcagattcaaggccagctttcattctagtctttttgttgtgctttctgtctacctcaggaaacatggaagtcatgtgtaatcaaggggtgatacggtatttgtgtgtgtttgtttttttttgacatttatattttaatcttgagtttataaatttttttgtcaagatgttactacagtatttaagaaaataatatcattcatgttttcattaacctaaaataagttttcttgcttgcttatcatccttcagctcttgtccatattcatacatagcattattgttcagtatttcattcaaccaatattgggtatttattgagaacctactacgcctcctgttatgttcctgtgccaggcacataacaggaaaaataactgtaaacaaaacagacaaaaatctctgccctggtagacattgcattataataatcagtagatatatgtattttatgcattctgcttttttcatgtatatttcaaacatttccccatttttactttgtcctcataaatactttaaatggctgtgtagcatgccatcttgtttttgaactgtaatttgcttaagctttctgcattgggcatttaagtgagtacctatgtattacagttgttgggggactggttacattgttgtgaatgtctttatggatatgacttttatgtctgttgggccttgtccagagtctgggctagtggtcagatgattgggttccagtcccattttttccatttaatataatatgacctcagataagtctgtcagcatctctatgcttgagtttcctcatctgtaaaataatgataacacctccttcacaacattaaatgtgatgataatgcagataaagtgcctggaacatgaatgttcaaatcgattttgcttggtcatggtagaagcggggcaaaagtggaaggatgggagtgttatttgtctt

SEQ ID NO: 29546 - DNA, 2300 bp, Homo sapien
tgattaactcatatcattttaccacccctaccatagaagctgtattttaacaatgcatagcaatttcctgtttatctaggagctaaacgaacatatgtcgaatattttttgaatgagggccatgctaaaatagatcttggaaggcagaattggggctcagatcaccacataatttctgcagcctcttaagacaaaggtttccagaagcaaaatggataaacatgagaatccagttctttttctcaacttgtttttttatattcccagttaactaaaaagaacctaatgttcttgtaagtggacttttccattggtttgtggttttagccaaggtccccagattgtctttctctgccagtttgtgtagcatgatgtggattctggagttcatgctatacagttatttgcacacattctagaagagtttcttcccctagttggtgtctccacatcccccccgccaatattaattacatgtgacatctggtgtattaaggatgagttgtaacttggtaaaggctgtagtattttgtggtttgggtacgtcgatatagtgaaaccactgtccttgacaagtaaaactacagtgttggctgttagaagatttataaactcatcctctaataacctttgtgactaggtttctagtagttgtgaggggcaactctgctgtgcttaacaggggtagtctacaaaagaaacctgatagcttctaaaagaatttggactaagtgacttctaaggaccttggcaattctgaaaccctgagtttttcagtctgccattataaaccactgtaagttctcatttcagccttgtttctgcctctgaatcctggtgattttgcaagcccagcccagctgccacctccttcaggaagccttcctggtatatacttttagcttagtacccttgggactcagagtccacacattgcagttgagctctgatacttgttgcagggtgaggatcactttccatgcacccggctgcatgaggtacccttatggccttctggacctgactcctctttggctcatgtggctctgtttctctccaggttcccacatcccatccccctcaccactgtgcagtgtgtatgcagtttgtgcgaaaggaaaacctactctctctggcctgtcagcaccagttttgccgcagctgctgggagcagcactgctcagttctcgtcaaggacggcgtgggcgtgggtgagtctgccacaaaacttataaaaagctggcatgaagtgtttatctttgactctgccttttcatgtactcaagtaaactgagtattttcttctgagcctgattggggtttttatcatcagaactagtgattttcaaatacatccatacaaacagtgacaaagttttccccagtcctcagcaaaacgagaaaactaaatatactgttgtaaatgttggcgtgagtgcagagctaccttctctcaccttttgggagaacgatcctttaagctgcctaccttgattccacaagtggcagccataactcagaaatgcccacaagagtttgctgctatttaggtaacatagcacaaatcaaatttgatgattagttacagaagtatttgttatactgtgatttgatgatactgaaacacattagcatcgcattaattgatatctgcaaagtcccacaattggtgataatcacctctaaataatgttaaacatcacaaaactcaattgttagtcaagaacctatataaggattttttaaatggttttgttatttaatggtgccgttagtgatacaatttgggataatattttagtttcattgctgtgaaaatatgctaatttctctcttctctttgaataaattctgttgcttgaagagtttcttttatgcaacttggatttgttgacagaactaggtgggcaagttgtgtcttctgcagtatgcttgtccatcacttttttgggtttgttttttttttgtttgtttgtttgtttgttttttgagacagtttcgctcttgttgcccaggctggagtacaattgcatgatctcagctcaccacaaccactgcctcccgggttcaagcgattctcctgcctcagcctcctgagtagttgggattacaggcatgtgccaccacacctggctaattttttttttttttttttttttttgagacggagtctcgctctgtcgcccaggctggagtgcagtggcgggatctcggctcactgcaagctccgcctcccgggttcacgccattctcctgccccagcctcccaagtagctgggactacaggcgcccgccactac

SEQ ID NO: 29547 - DNA, 2300 bp, Homo sapien
gcttgcagtcagccgagatggcaccactgcactccagcctgggcgacagagcgagactccacctcaaaaaaaaaaaagaatacagatcaatagaaggcctggatttggtagtatgtattgtcatggcatcaaagggccaggcttttaaaagactgagaaattctggtttctgatgtggttgtgaaattcccacagctgacagcaggtggagcagccctgcaacctgcttgctttctgttgtctggcaatgagctatcagtacctgtgcttagtggtaggcctagttcaggtaataggtgtaagaatggagttcaggaaaataggttaagcaaagtacagattttatggtgatcaaattctagtttttaaaaggctagaggggccggtcgcggtggctcatgcctgtaatcccagcactttgggaggccaaggcgggcggatcacgaggtcaggagtttgagaccagcttggccaacatggtgaaaccccatctttattaaaaatataaaaattagctgggcgtggtggcacgtgcctgtaatcccagctacttgggaggctgaggcaggagaattgcttgaacccgggaggcagaggttgcagtgagccgagatgaagccactgcactccagcctgggtgacagagcaagactctgtctcggggaaaaaaaaaaaaggctagagggaaatagtctcaacttcattccagaaaaggtatgagaaagccatgagatccttggtaaaattatggttctgttggttggtttattatatttaagaatttaggagatttggtctgggtgtggtgccttatgtctgtaattccagcactttgggaggccaaggtgggtggaacacctgaggtcacgagtttgagaccagcctggccaacatggtgaaaccctgtctctactaaaaatataaaaattagccgggcattgtggcgggcacctgtagtcccagctacttgggaggctgagacaggagaattgcttgaacccgggaggcggagctttcggtgagctgagatcacaccactgtactccagcctggcgacagagcgagactctgtatcaaaaaaaaaaaaaaaattataattaaaaaattaaaactaaataataataaataaaaatacaaaaaaaaaaattggcccgccatggtggcgcatgccagctacttggtaggctgaggcaggagaattgcttgaacccggaaggcagaggttgcagtgagccaagatcgcgccactgcactccagcctgggcgacagagtgagactccgtcacacacacacaaaaaatcttagaagaaagaggtgggcctgcccttggagcccctggcctgccttgacttgaggggactagaaaatgcagactatgctttgctatggggaagggagaggagatgggagtagaggtagtgggggtcttaaccagggtagggagaaaccaccagtgtgacctgccttaaaagtgttgctcttgcctgcaagtccacctcggggaggggggtcagcttctgccctgagggcgtgtagtaatctcttcctgaggataaccagctctagaagagcagggatgccttggcacttgaccactggtaggtatgtcctccccccacccccgtttttggtgataatctgtttaatttttctctgaggtaatggtgtctcagttatggaagagtcccttcccgcctcttcacacgtgccagctttgatgcaaggagtgttccatatacctgagcactggttcattcctgcgggctgccatggggggctcactttcctgatgccagggctcctccaggatgccccctctgacggcctatgaaaccttgcacatcaggcagcttcttcctaaggcctgcctgactccggcgagacttcccgggagatccggaccgaccgcggaaccgagctccaagaatgcctgcgaggaggctgtgggtcctaccctatcgccgcttacgcagtcccagcctccgcggcgcccccaaatgccgcactgttgagtcatctcagcgctgcctcctccgcgctgcgctccccacccccgctcctggagcaagaagatgcagacgatacttttcccggaggcaagagggcgtcttcacgcaggcaccgagaagctcccactagtgtatgccttaatggtgccgctcttgtccgcgtctacgcttgggaccttggcttctgacttggagagtgtacagctctgcccgacggcaacccagcttgggaagagaagccccagcgtgggctggggctcaaggcgcaggaaggccgagcccggcgcgga

SEQ ID NO: 29548 - DNA, 2300 bp, Homo sapien
gttgcagtgagccgagatgaagccactgcactccagcctgggtgacagagcaagactctgtctcggggaaaaaaaaaaaaggctagagggaaatagtctcaacttcattccagaaaaggtatgagaaagccatgagatccttggtaaaattatggttctgttggttggtttattatatttaagaatttaggagatttggtctgggtgtggtgccttatgtctgtaattccagcactttgggaggccaaggtgggtggaacacctgaggtcacgagtttgagaccagcctggccaacatggtgaaaccctgtctctactaaaaatataaaaattagccgggcattgtggcgggcacctgtagtcccagctacttgggaggctgagacaggagaattgcttgaacccgggaggcggagctttcggtgagctgagatcacaccactgtactccagcctggcgacagagcgagactctgtatcaaaaaaaaaaaaaaaattataattaaaaaattaaaactaaataataataaataaaaatacaaaaaaaaaaattggcccgccatggtggcgcatgccagctacttggtaggctgaggcaggagaattgcttgaacccggaaggcagaggttgcagtgagccaagatcgcgccactgcactccagcctgggcgacagagtgagactccgtcacacacacacaaaaaatcttagaagaaagaggtgggcctgcccttggagcccctggcctgccttgacttgaggggactagaaaatgcagactatgctttgctatggggaagggagaggagatgggagtagaggtagtgggggtcttaaccagggtagggagaaaccaccagtgtgacctgccttaaaagtgttgctcttgcctgcaagtccacctcggggaggggggtcagcttctgccctgagggcgtgtagtaatctcttcctgaggataaccagctctagaagagcagggatgccttggcacttgaccactggtaggtatgtcctccccccacccccgtttttggtgataatctgtttaatttttctctgaggtaatggtgtctcagttatggaagagtcccttcccgcctcttcacacgtgccagctttgatgcaaggagtgttccatatacctgagcactggttcattcctgcgggctgccatggggggctcactttcctgatgccagggctcctccaggatgccccctctgacggcctatgaaaccttgcacatcaggcagcttcttcctaaggcctgcctgactccggcgagacttcccgggagatccggaccgaccgcggaaccgagctccaagaatgcctgcgaggaggctgtgggtcctaccctatcgccgcttacgcagtcccagcctccgcggcgcccccaaatgccgcactgttgagtcatctcagcgctgcctcctccgcgctgcgctccccacccccgctcctggagcaagaagatgcagacgatacttttcccggaggcaagagggcgtcttcacgcaggcaccgagaagctcccactagtgtatgccttaatggtgccgctcttgtccgcgtctacgcttgggaccttggcttctgacttggagagtgtacagctctgcccgacggcaacccagcttgggaagagaagccccagcgtgggctggggctcaaggcgcaggaaggccgagcccggcgcggacgcaggcggctccgggcgggctcagcacccccaggcaccgtctcctagtgaccgcggcgctcgcgggcctggcggccgttgtccgggcgactgcgcagcgcgggcacccccgcggcccctcccctgggcgcgcgcgcgacctgggtgccatggcggcagcggcggtgacaggccagcggcctgagaccgcggcggccgaggaggcctcgaggccgcagtgggcgccgccagaccactgccaggctcaggcggcggccgggctgggcgacggcgaggacgcaccggtgcgtccgctgtgcaagccccgcggcatctgctcgcgcgcctacttcctggtgctgatggtgttcgtgcacctgtacctgggtaacgtgctggcgctgctgctcttcgtgcactacagcaacggcgacgaaagcagcgatcccgggccccaacaccgtgcccagggccccgggcccgagcccaccttaggtcccctcacccggctggagggcatcaaggtgaggacctccctgccccgccgcgctccaggccctgcacggctgagcccgagaggaccggcgctcagcccgggtccccacgctgcccccggc

SEQ ID NO: 29549 - DNA, 2300 bp, Homo sapien
gtagccaatgtcgtggcatagggccatggcttggggaatgggcatgcacctcatgcagccccagggagcccctgaccctgctgtcatcccacagcatcaccagtgtcaccagcagccacagcccctgctccatcactgccttctgtgccttggccttaatgaactgaggttgagggttttatagggctgttcctgcacccagggagccaacagaggagatcctgcaggggtttgcacagctccgaggtgcccggacccacctggtgaggccccaacatgctgactgggctgtttgtttttgattagcacacagcaggggactgtagaggctggaggcacctccactgggcttgcagattactggcacctaataaactgaagaaacctgggcctgtgttttcttttctttttctggcttcctttttctttctttttaaattttgtgtgttaagcaatcaagaggtgactctgttgatttgcaatttgatctaatccattgttccacagggctgtctccccttggatcacaccctttctgggtttgctggggtcacgggatcatgcaggccaagagtgggggcctttgtcctatcctcagtgttatcacatcagggtcacctgctcctagtagctgaatctggtcatgagcatggtttctggaacacagcaggctgggtggccagtggcaaggcactgatttctctgtgcttgggtttcctcttagataggaaggttgaattaatggggcctggcctcctagggtaagtataaggattaaggagttgatgtgtatgaagtgcttaggacagtgccttgggcagagtctgtgctacctaagtattttctgctgtaattactattaaaaaccactccaggccaggtgtggtggcatatgcttataatcccagcacttttgagcccgaggtggaaggatagcttgaacccaggaaattgagaccagcctgggcaatatagggagactccatctctacaaaaaataaaaaaataaaaaaagctccaaccctggtgctgagtgaccattttccttcctcttggcaatgactggaactttgtgctggaagtgtaactgagagaagcggcaggccactccgcaggtagcagtgctgcccttcctccagtcagctcctctgcgtgcttcttgtcctccagtgaagaccgctctcccaggaacaagggaaggaagcagggcccatgctcctgctctggaagtgtctggggctaccagaatgtgggctccctagatgtgaggctcaggttctagctccaccaagccacctaccagctgtgcctggtgtgcaggcagccagccactgaagccaagccccaggcctgactgatctttactcaggggtgtagaggcatagagtaggcactaagtgaacatttgtaccagggaaggaatcaaggaagcaaaggacacctgggacatcttttcagagaccagtatctgcccaaaacctgagtaaccctcactgatcttccagcactgggcaactcagccctggtcagatggccagcacccatctttgcaggaaattggaggggaaggcccttggactggcctgaaacattggatgtcttgtgctgtttttatttgaataatgctgaaaagttaaaatgaaagcaagaagcagccaccatctccccactttaaatatttatacccagtaaaaagtagcaatcaagcctctgcccttcaggatcactctctagccttcagtcccaacccaaagatgggtcagcccatatccaggttagctctggctcacctcccagggctctcctggaaaatgtgtgctctcatcatcaagagaggtcccacatttccaacgccagccagcctttgcaggacaactcaatcttgacaagtcagaatcaaggggtctgtaaaatcctccatcctccagacctggtggccactgagggacatgcagtaccccaggaaccctgaagggaggaaggtactgggtgcaccagcgccctggctcagtccttggcctcacccacctcctcttctggcagaaatccccggcttcctgactgatgaagagtgtcggctcatcatccatctggcgcagatgaaggggttacagcgcagccagatcctgcctactgaagagtatgaagaggcaatgagcactatgcaggtcagccagctggacctcttccggctgctggaccagaaccgtgatgggcaccttcagctccgtgaggttggaatcctgggacctgagtaggctcagggtgggagtgcccagaatcacctttctggtggccag

SEQ ID NO: 29550 - DNA, 2300 bp, Homo sapien
ccccctgagttctgaagcaaggggcaaggctgggcccctagcttgtcctgcccattcctccaggtgttgatcttgattccacttagagaagctgaagctgtgcctccctcccctgtcaagccagttctttcctcttcaggtggctgttctggcccagccccttcccatccccaaggagcccttcagcgcgccctgttgcttctgctagcctacctttccctgccaggcccttgctcagggccatggcatttaactaagtgcacctgtgatcttggccaaaaaaccattgcaactcacagtaagagactgggtttcggggaaggaggggctagggacattttggcactggcctgccctattgtctcccatcctagtctgtcctggtccctggcaacaggaacctgggcagcttatcctgcccacaggtaagcccctgggagcatccacaactggggacctgctcagtgccccccctgccttacagctacatgacagtgctgttttatttgaacaacgtcactggtgggggcgagactgttttccctgtagcagataacagaacctacgatgaaatggtaagggtcaactgggctattactcttgtgggctggcaggggcttagacaagtgaagtacacacctctccaggtctaaggatgtgggcccaaattattccttgggcatatctggttggtttccctttggtcacccttggctggcctggccatagagtggggacaggttgaacaccccaccaccctgctgcccacagagtctgattcaggatgacgtggacctccgtgacacacggaggcactgtgacaagggaaacctgcgtgtcaagccccaacagggcacagcagtcttctggtacaactacctgcctgatgggcaaggtgagggcctatggccaggcctggggggggtgccctgagtacagcttccctttacccagcccccgtctgccacaatggagggctgtttctggctgctttccaaatagttttctgctcctggtgcctcccaaaggccatccttagtgactttagcagactgccccaggacctgtactgcttattgggttatatccatccctatcattccctgatgccccagccttcctactccctggggcttgggacacatgtcccttgctaacccaggatgggaagggatatggacaggcccaacagcaagaaagctggtttcagagggccagtagtgttgactatacattagtgggctgagatgaggagcctccaaggaagctttaggtctgggtgtttgctacacaaggaatgcatagctggacccaccttggtcatgctcttggtgcctatgaggccaagctctggccagcccagcctaggatctcacgtcaccctcctcttctaggttgggtgggtgacgtagacgactactcgctgcacgggggctgcctggtcacgcgcggcaccaagtggattgccaacaactggattaatgtggaccccagccgagcgcggcaagcgctgttccaacaggagatggcccgccttgcccgagaagggggcaccgactcacagcccgagtgggctctggaccgggcctaccgcgatgcgcgcgtggaactctgagggaagagttagccccggttcccagccgcgggtcgccagttgcccaagatcaggggtccggctgtccttctgtcctgctgcagactaaaggtctggccaatgtcttgccccaccccgccagccgcgatacggcgcagttcctatattcatgttatttattgtgtactgactccatctgccccgtcaaataaaaaaccacaaggttcgagccgccgggcccgacaaactccgggtcggcgaaacagagtccgcgataggtgcagcgggctggcagctgggagcgccccgcaagcgtcacgtgagggggcgaggggcgggatgcccctccgcgggccccgccaatgatgagctggattgcgtgggacgaagggtcgtcattggacaaccgccgcgggcgccctggtctctgctacctgtagctgagggcgctgttgatgggcagcgcggcgcgctgggaaggctcgttctcgcgagagttcagctcccttcttagccgtggctgcctcagcacctcgaggatcgacatggacgctctcgaggactacgtttggccgcgggcaacctcggagcttatactcctcccagtgacgggtctggagtgcgtgggggaccggctgttggcgggtgaggcttggcttgaggcacgcctggtggaaagggggaaagaaacagcgcctcccagggg

SEQ ID NO: 29551 - DNA, 2300 bp, Homo sapien
ctgcaacctccacccgctgggttcaagcgattctcctgcctcagcctcctgagtagctgggattacaggcacgtgccaccacacctggctaattttttagtagagatggggttttcaccttgttggccaggctagtcctgaacccctgacctcaggtgattcatccgcctgggcttcccaaagtgctaggattacaggcgtgagccaccgtgcctggccgagaccaaggattttcttttttttttttttcttttgagacagagtctggctttggctttccaaagtgcccagattacaggcgtgagccaccgcacccggccgagaccaaggattttctaagattcaagctgcaggattgtgtgtcctgatgcattcataggctacatgccgagaagtttccctgatccccatctcttccctgtgggtcatcagagttaggtacctagctctgacatggctctttgcctctatctaggtgagggtcccgatgtcctggtgtacagcttggactttggtgggcatctgcggatgataaagcgagtgcagaacctgcttggccactatcttatccatggcttccgggtacggccagagcctaatggagaccttgacttggaggccatggtggctgtgtttggaagcaagggactccgagttgtgaaaattagctggggacagggccacttctgggagctttggcgctctggcctgtggaacatgtctgactggatttgggatgcacgctggcttgagggaaatatagccttggccctgggccacaactcagtggtgctatatgaccctgtagtagggtgcatcctgcaagaggtgccctgcacagacaggtgcaccctctcttcagcctgcctgattggagacgcctggaaggagctgaccatagtggcaggtgctgtttccaaccagctcttggtctggtacccagcaactgccttagcagacaacaaacctgtagcacctgaccgacgaatcagtgggcatgtgggcatcatcttcagcatgtcatacctggaaagcaagggattgctggctacagcttcagaagaccgaagcgttcgtatctggaaggtgggcgacctgcgagtgcctgggggtcgggtgcagaatattgggcactgctttgggcacagcgcccgtgtgtggcaggtcaagcttctagagaattaccttatcagtgcaggagaggattgtgtctgcttggtgtggagccatgaaggtgagatcctccaggcctttcggggacaccagggacgtgggatccgggccatagctgcccatgagaggcaggcctgggtgatcactgggggtgatgactcaggcattcggctgtggcacttggtagggcgtgggtaccggggattgggggtctcggctctctgcttcaagtcccgtagtaggccaggtacactcaaggctgtgactctggctggctcttggcgactgctggcagtgactgatacaggggccctgtatctctatgacgtcgaggtcaagtgctgggagcagctgctagaggataaacatttccagtcctactgcctgctggaggcagctcctggtcccgagggcttcggattgtgtgctatggccaatggggaaggtcgtgtcaaggttgtccccatcaacactccaactgctgctgtggaccagaccctgtttcctgggaaggtgcacagcttgagctgggccctgcgtggttatgaggagctcctgttgctggcatcgggccctggcggggtagtagcttgcctagagatctcagccgcaccctctggcaaggccatctttgtcaaggaacgttgtcggtacctgctgcccccaagcaagcagagatggcacacatgcagtgccttcctacccccaggtgacttcctggtgtgtggtgaccgccggggctctgtgctgctattcccctccagaccaggtctgctcaaggaccctggggtgggaggcaaggctcgggctggtgctggggcacctgtagtgggtagtggtagtagtgggggtgggaatgctttcactgggttgggcccagtgtctaccctgccctctctgcacgggaagcagggtgtgacctcagtcacatgccatggtggctatgtgtataccacagggcgtgatggagcctactaccagctgtttgtacgagacggccagctccagccagtcctaaggcagaagtcctgtcgaggcatgaactggctagctgggctccgtatagtgcccgatgggagcatggttatcctgggtttccatgccaatgagtttgtggtgtggaaccc

SEQ ID NO: 29552 - DNA, 2300 bp, Homo sapien
acggccccgcccggctcacgcccacctggccgtcatcgaagcgcgcctgcagcgcgcggtgcggtgccagaaagtctcgggaacgcaggtggcgggtgcgcgtctccttgatccacaccggaccgcctggccccagggccgcgttgagggcccccagcgtctccccgaccccaaggcgcctggtcgccatggtgaccggaaggagtaagcggaaccggaaaaaaatttagggaggtggaacttccggaaaggaccgactagctggggcggggatgcggcggtggtccccgtaagtggacaggtgcgccagtggtagccctgtcggctgctttcgacctaccgcccccagcgccccttccgcgtggtccacctgcacagccgggccccggatctgaaatctcggggccctccctgggcctagggttctttcgctgtgacccaggccttaaccaggaaaaggatcctcgcgacccggtgggcgcttagaccgggtaccgtctcttctcatcgaagtctcacatgtttgttttaataacatttcatttctcccattttacacatgatgaatattcgtcactggaataaggcagtataacattaaggccactttcacgacctacttaaaatatctcgttttaaaaagaatagtgttccgcggtttcaggttatttgcaagcattttctcgtttgagatatgggtgtttttttgtttgtttgagacggagtcttgctcttgtctcccaggctggagtgcagtggcacgatctcggctcactgcagcctccacctcccggattcacaggattctcctcctcagcctcccgagtagctgggattacgggcgcccgccaccacgcccggctaatttttgtatttttagtagagacggggtttcgccatgttggccaggctggtctcgaactcctgacctcgtgacctgcccgcctcggcctccgaaagtgctgggattacaggcatcagccactgcacccagcccgggtggtctttatgcccaataaataagcactctgatacagttggcggttttcttctcttgatacctgagaaatcacaaccatcatgatggcttccagaattaccagactttttttttttttttttgagacggagtttcgctcctgttgcccaggctggagtacagtggtgtgatcttggctcaccgcaacctccccctcccgggttcaagtgattatcctgcctcagtctcccaagtagctgggattacaggcacgcgccaccacgcccggctacttttgtatttttaatagagacggggtttctccatgtttgtcaagcctcgaactcccgacctcaggtgatccgcctgcctcggcctcccaaagtgctgggattacaggcgtgagccaccgcgcccggctcagaatgaccagcttttaatgtgactcctttaacctggtgtgctttaacaacgatccttaaagcttcctgttttaggcaacagccatttacgggccaaccaaataatgcgaccataatagaaaataggcctcagttggagtatcttgctcctctaccaataggaaaggtctttttctttctcccacaaaggttcccaaatgtcttcatttcactgtaacttactcaccccccaccccacccccattccttttaatagagaagctaactcagtagagagagttgggaaatccggagagcagggaaacccaggggcaggaaaagcttggcaaggcccctttctgggccagggctgaggccctgctgggaggcgccgaaagagcactgggcggacacgacattcccgatggcttctcgggtgcccactcaacgggagtgatcgtgtcattccaaagcgctttccattctgaaggtgcatgacctggagacaactgcttagcagggttgggaaccctcagtcaaactgaggacttcagatactctcatccacgaagacggttggggtggtttttccccaggaagtaagagggctatctttagcgagatgcgggctgaggcagccctgggggagtcactaccattgcagccctacccagaggtcctgggtccaccctccctcgccaatcctccccagggttccagagatggccaccagcctcggctctcccacgtctacacccatcacctccagcctgagggcgcaactgagaggaactgagacccaagcagctcagtaaagtatgtctgggggtcaggggcaccccatctgggccagggcgctgctcaggcaggagagcaggggacgaaatccaagcgcagctggaatgctctggagacaacag

SEQ ID NO: 29553 - DNA, 2300 bp, Homo sapien
ccaaaagcagctgttgtctccagagcattccagctgcgcttggatttcgtcccctgctctcctgcctgagcagcgccctggcccagatggggtgcccctgacccccagacatactttactgagctgcttgggtctcagttcctctcagttgcgccctcaggctggaggtgatgggtgtagacgtgggagagccgaggctggtggccatctctggaaccctggggaggattggcgagggagggtggacccaggacctctgggtagggctgcaatggtagtgactcccccagggctgcctcagcccgcatctcgctaaagatagccctcttacttcctggggaaaaaccaccccaaccgtcttcgtggatgagagtatctgaagtcctcagtttgactgagggttcccaaccctgctaagcagttgtctccaggtcatgcaccttcagaatggaaagcgctttggaatgacacgatcactcccgttgagtgggcacccgagaagccatcgggaatgtcgtgtccgcccagtgctctttcggcgcctcccagcagggcctcagccctggcccagaaaggggccttgccaagcttttcctgcccctgggtttccctgctctccggatttcccaactctctctactgagttagcttctctattaaaaggaatgggggtggggtggggggtgagtaagttacagtgaaatgaagacatttgggaacctttgtgggagaaagaaaaagacctttcctattggtagaggagcaagatactccaactgaggcctattttctattatggtcgcattatttggttggcccgtaaatggctgttgcctaaaacaggaagctttaaggatcgttgttaaagcacaccaggttaaaggagtcacattaaaagctggtcattctgagccgggcgcggtggctcacgcctgtaatcccagcactttgggaggccgaggcaggcggatcacctgaggtcgggagttcgaggcttgacaaacatggagaaaccccgtctctattaaaaatacaaaagtagccgggcgtggtggcgcgtgcctgtaatcccagctacttgggagactgaggcaggataatcacttgaacccgggagggggaggttgcggtgagccaagatcacaccactgtactccagcctgggcaacaggagcgaaactccgtctcaaaaaaaaaaaaaaaaagtctggtaattctggaagccatcatgatggttgtgatttctcaggtatcaagagaagaaaaccgccaactgtatcagagtgcttatttattgggcataaagaccacccgggctgggtgcagtggctgatgcctgtaatcccagcactttcggaggccgaggcgggcaggtcacgaggtcaggagttcgagaccagcctggccaacatggcgaaaccccgtctctactaaaaatacaaaaattagccgggcgtggtggcgggcgcccgtaatcccagctactcgggaggctgaggaggagaatcctgtgaatccgggaggtggaggctgcagtgagccgagatcgtgccactgcactccagcctgggagacaagagcaagactccgtctcaaacaaacaaaaaaacacccatatctcaaacgagaaaatgcttgcaaataacctgaaaccgcggaacactattctttttaaaacgagatattttaagtaggtcgtgaaagtggccttaatgttatactgccttattccagtgacgaatattcatcatgtgtaaaatgggagaaatgaaatgttattaaaacaaacatgtgagacttcgatgagaagagacggtacccggtctaagcgcccaccgggtcgcgaggatccttttcctggttaaggcctgggtcacagcgaaagaaccctaggcccagggagggccccgagatttcagatccggggcccggctgtgcaggtggaccacgcggaaggggcgctgggggcggtaggtcgaaagcagccgacagggctaccactggcgcacctgtccacttacggggaccaccgccgcatccccgccccagctagtcggtcctttccggaagttccacctccctaaatttttttccggttccgcttactccttccggtcaccatggcgaccaggcgccttggggtcggggagacgctgggggccctcaacgcggccctggggccaggcggtccggtgtggatcaaggagacgcgcacccgccacctgcgttcccgagactttctggcaccgcaccgcgcgctgcaggcgcgcttcgatgacggccaggtgggcgtgagccgg

SEQ ID NO: 29554 - DNA, 2300 bp, Homo sapien
ttgtttgagacggagtcttgctcttgtctcccaggctggagtgcagtggcacgatctcggctcactgcagcctccacctcccggattcacaggattctcctcctcagcctcccgagtagctgggattacgggcgcccgccaccacgcccggctaatttttgtatttttagtagagacggggtttcgccatgttggccaggctggtctcgaactcctgacctcgtgacctgcccgcctcggcctccgaaagtgctgggattacaggcatcagccactgcacccagcccgggtggtctttatgcccaataaataagcactctgatacagttggcggttttcttctcttgatacctgagaaatcacaaccatcatgatggcttccagaattaccagactttttttttttttttttgagacggagtttcgctcctgttgcccaggctggagtacagtggtgtgatcttggctcaccgcaacctccccctcccgggttcaagtgattatcctgcctcagtctcccaagtagctgggattacaggcacgcgccaccacgcccggctacttttgtatttttaatagagacggggtttctccatgtttgtcaagcctcgaactcccgacctcaggtgatccgcctgcctcggcctcccaaagtgctgggattacaggcgtgagccaccgcgcccggctcagaatgaccagcttttaatgtgactcctttaacctggtgtgctttaacaacgatccttaaagcttcctgttttaggcaacagccatttacgggccaaccaaataatgcgaccataatagaaaataggcctcagttggagtatcttgctcctctaccaataggaaaggtctttttctttctcccacaaaggttcccaaatgtcttcatttcactgtaacttactcaccccccaccccacccccattccttttaatagagaagctaactcagtagagagagttgggaaatccggagagcagggaaacccaggggcaggaaaagcttggcaaggcccctttctgggccagggctgaggccctgctgggaggcgccgaaagagcactgggcggacacgacattcccgatggcttctcgggtgcccactcaacgggagtgatcgtgtcattccaaagcgctttccattctgaaggtgcatgacctggagacaactgcttagcagggttgggaaccctcagtcaaactgaggacttcagatactctcatccacgaagacggttggggtggtttttccccaggaagtaagagggctatctttagcgagatgcgggctgaggcagccctgggggagtcactaccattgcagccctacccagaggtcctgggtccaccctccctcgccaatcctccccagggttccagagatggccaccagcctcggctctcccacgtctacacccatcacctccagcctgagggcgcaactgagaggaactgagacccaagcagctcagtaaagtatgtctgggggtcaggggcaccccatctgggccagggcgctgctcaggcaggagagcaggggacgaaatccaagcgcagctggaatgctctggagacaacagctgcttttgggattccgttgcccgctgtccagccgttggcggggggcgggggagctcctgcccccaggtcactcgccctggggccacatcagaacccgcccatccccagtcccaggaggaagacccgggagtaggttgtgaaacggagtctagagggaacaagacgctcacctgggccacagaacaatagaaggggaggtgggggcctcccctgggaccgggtcccgatccggattagatccgtggggcaggattagccctgttggtcccacgaagcctgggccactggtgcggtgacggtggtggggcgggcttcggaatccgtcaggagggaagcgcgcccgtggggccggagaggaagtaaacccgcgcgtccacctcggggacacccccgcgctcggtggcctttgtccggtgacgctgccagcgcccggagcaccaggggccgaaggggtccacagagcagccgcgggacccccggaaacccattgcgaccggccccaggagacccaccaccaggctcccactgtgccgagcttcccgctcgcccggccccgcgggtagcgaaagcgacaatgttcccctgaggccacgacagagccggcgtgccgagatgcccaaaccccgcgcgggggccagcgactctcgcgccagtaggcccttgacttggatcaagacgggggacgggggactcccaggacgcgagcaga

SEQ ID NO: 29555 - DNA, 2300 bp, Homo sapien
gtgatcttggctcaccgcaacctccccctcccgggttcaagtgattatcctgcctcagtctcccaagtagctgggattacaggcacgcgccaccacgcccggctacttttgtatttttaatagagacggggtttctccatgtttgtcaagcctcgaactcccgacctcaggtgatccgcctgcctcggcctcccaaagtgctgggattacaggcgtgagccaccgcgcccggctcagaatgaccagcttttaatgtgactcctttaacctggtgtgctttaacaacgatccttaaagcttcctgttttaggcaacagccatttacgggccaaccaaataatgcgaccataatagaaaataggcctcagttggagtatcttgctcctctaccaataggaaaggtctttttctttctcccacaaaggttcccaaatgtcttcatttcactgtaacttactcaccccccaccccacccccattccttttaatagagaagctaactcagtagagagagttgggaaatccggagagcagggaaacccaggggcaggaaaagcttggcaaggcccctttctgggccagggctgaggccctgctgggaggcgccgaaagagcactgggcggacacgacattcccgatggcttctcgggtgcccactcaacgggagtgatcgtgtcattccaaagcgctttccattctgaaggtgcatgacctggagacaactgcttagcagggttgggaaccctcagtcaaactgaggacttcagatactctcatccacgaagacggttggggtggtttttccccaggaagtaagagggctatctttagcgagatgcgggctgaggcagccctgggggagtcactaccattgcagccctacccagaggtcctgggtccaccctccctcgccaatcctccccagggttccagagatggccaccagcctcggctctcccacgtctacacccatcacctccagcctgagggcgcaactgagaggaactgagacccaagcagctcagtaaagtatgtctgggggtcaggggcaccccatctgggccagggcgctgctcaggcaggagagcaggggacgaaatccaagcgcagctggaatgctctggagacaacagctgcttttgggattccgttgcccgctgtccagccgttggcggggggcgggggagctcctgcccccaggtcactcgccctggggccacatcagaacccgcccatccccagtcccaggaggaagacccgggagtaggttgtgaaacggagtctagagggaacaagacgctcacctgggccacagaacaatagaaggggaggtgggggcctcccctgggaccgggtcccgatccggattagatccgtggggcaggattagccctgttggtcccacgaagcctgggccactggtgcggtgacggtggtggggcgggcttcggaatccgtcaggagggaagcgcgcccgtggggccggagaggaagtaaacccgcgcgtccacctcggggacacccccgcgctcggtggcctttgtccggtgacgctgccagcgcccggagcaccaggggccgaaggggtccacagagcagccgcgggacccccggaaacccattgcgaccggccccaggagacccaccaccaggctcccactgtgccgagcttcccgctcgcccggccccgcgggtagcgaaagcgacaatgttcccctgaggccacgacagagccggcgtgccgagatgcccaaaccccgcgcgggggccagcgactctcgcgccagtaggcccttgacttggatcaagacgggggacgggggactcccaggacgcgagcagagtgaacgaggacaaggtgatgctccacgcgcttctacttcaagtctggtccggttcggcctggtctgggccagccgaacagccacccaaacactatcacagcttgcccttccgcttgctctggctgcctgcagacttggagccattttaaggagaaaccacctggccacgccccctagagaacccgagaagccaatccacgctcggccacgcccctctccgcgcgctgcggagaggccaacggtcgcgcgggtgacggttagggcggggcgtgcttccgcgtctagccggagaaacttgagccggctgccccgcccacggtgcccgaagccccaaaggctggaattaggggctagaagtctggcacccaccgcctggccaggtgttcgggacgcgaccaggtgggcggtcgccccgccccgggagcgcggcttaatagctgagagcccgggggcca

SEQ ID NO: 29556 - DNA, 2300 bp, Homo sapien
ctcctggtggagggatgagagcagctccagttactcggccttcatgacacaggaagttgaaggtggcacaggcattgggctgcaaagaaaaggccagcatcagcctgtctagcgccaggcctgtgctccccgcagcatgccccagtcccgggactcaccgtgtcctgcacttccacagcaatgccccgctgcctcatggcttgaagcacctgggactgcagcctctcggtccggtctccagtccccaccaccacgatctctagggaagggtgggtgtggctagtctacagttctgttgagaggctgcagtgggggtcgccttctggggcccagaacacctctgttctccctccccttccccagtacctatccggggctccagcaaccagaagagggaaaagctgtcttcggtgatgtcctggtgggatcccacctgtgcagggaggaggcacatttaatacgacaaatccacgcagcctctccccatctccatccactgcaggaggagacagaggaaagccaagtttgcagggaccaagcagggtgagggcctgtgactctgggcctcagtttccacactgcgggccaggactcacgttccactgcaccaccgagtgcgggagcagagcgcaggggccgagcacgcggtttccgtttatcatgaagccgcggctgttgtagctgtcgatgtacattgcctgagcggcctcgcgttgcagcagagagatgcgcgtccgctgatacagctcgtcatccgccggcgagagccgatgccctcgccgcggggccctgcggagggaaagggtcaggggcgcggggccgggccgggcagcccgagaggccggaaggtgctgggctggcagtcgccggccctagggggctggatggtcgagggcgcggggtccaagctcaccagggaagctcaacgggcggacagcgcagcgagggtcgcgctcggtacaagctacgtagcgcgagagcggtggccatggctgaccaacgcgcggcgaagtcgtcaccggcgccgttagtccccgggttgggagggccctgcggagcctgacccagcgtggctgcagcgccccctgcgtcccggagggcaccgcacagctcgaccggcccagcaggcgagtgtcctcagtcttaggaggccgagttccccgacctccggcgcagctccagtgtcagcacctgccgccctccccgccccgggcccttgcccatagtcccgggggagtggaacacctggcagcgtggccaccctcagggcgttgcctgggccgcagccgcggcctggcccccgggctctcagctattaagccgcgctcccggggcggggcgaccgcccacctggtcgcgtcccgaacacctggccaggcggtgggtgccagacttctagcccctaattccagcctttggggcttcgggcaccgtgggcggggcagccggctcaagtttctccggctagacgcggaagcacgccccgccctaaccgtcacccgcgcgaccgttggcctctccgcagcgcgcggagaggggcgtggccgagcgtggattggcttctcgggttctctagggggcgtggccaggtggtttctccttaaaatggctccaagtctgcaggcagccagagcaagcggaagggcaagctgtgatagtgtttgggtggctgttcggctggcccagaccaggccgaaccggaccagacttgaagtagaagcgcgtggagcatcaccttgtcctcgttcactctgctcgcgtcctgggagtcccccgtcccccgtcttgatccaagtcaagggcctactggcgcgagagtcgctggcccccgcgcggggtttgggcatctcggcacgccggctctgtcgtggcctcaggggaacattgtcgctttcgctacccgcggggccgggcgagcgggaagctcggcacagtgggagcctggtggtgggtctcctggggccggtcgcaatgggtttccgggggtcccgcggctgctctgtggaccccttcggcccctggtgctccgggcgctggcagcgtcaccggacaaaggccaccgagcgcgggggtgtccccgaggtggacgcgcgggtttacttcctctccggccccacgggcgcgcttccctcctgacggattccgaagcccgccccaccaccgtcaccgcaccagtggcccaggcttcgtgggaccaacagggctaatcctgccccacggatctaatccggatcgggacccggtcccaggggaggcccccacctccccttctattgttctgtggcccaggtgagcgtctt

SEQ ID NO: 29557 - DNA, 2300 bp, Homo sapien
tgtgtcccctcctatctgtaagctccatgggtaggaaatacttttcctgcccatttttttaaatatcagcacctagtgctgacctggcactagtaacccttgaataaatcttgaatggatggatgaataactgttagaggatacagcatgccaagtacttaatagaggtacagcacagttcgggggaggggggtgaacccaagtttagggccccactgtaatggccatcattattgggtagaaaacacaacatgaggctgggcaccgtggctcacgcctgtaatccaagcactttgggaggccaaggtgggtggatcacctgaggtcaggagttcgagaccagcctggccaacatggaaaaaccccatctctactaaaaaatacaaaaattagctgggcttggtggctcgtgcctatggttccagctactccagaggctgaggcaggagaatcgcttcaaccaagggggcggaggttgcagtgagctgagatcacctcactgcactccagcctggagacaagacgccatctcaaaaaaaaaaaaaaaaaaagcgcaaagacttggagatagacgctttgagcagtgaagctggcttcaagtaggataaggatagactcacatgagtccatgagagccctaggctggtgcagtcagtgatggatcacagctggtttgtgggaaggaggggcagaggggaagtaacccaacatttgggggatttgcagtagtcccaaaggaggaccaggatgtagtgtgtggtggctgcatggaattcagtagctgtgccacaataacttggggccttactgtttgcagacagcatctgtctgggaagttcagggtgggagggttgaagttatattggtggtacccaacttttatccgcatattcttcagcccccagagtgtgaaaggccggaatgacaccttttacctgacacctgagccagtggtggcccccaacagcccaatctggtactcagtccagcctatcagcagagagcagatgggacaaatgctgacgcggatcctggtgataagagaaattcaggaggccatcgcagtggccaatgcaagcactatgcactgagatgccttggccatggcacaagagaaaccagccaggaaaaaccagacagactttcacactaaagaagaggcctccatttttttttttcttttttttattggtgtagttacgaagcctttcaggctgcttctgtttaaaatataaaagaaaactttgccccctttgcatcttcataaacctgctgcggcagactcctcagccgatggtggctctgggtttccttgagtgtcatatgtcctagaaagttgctggctgactcttttttgtctggggcctggggaaagggcttggactgtgaaaagaaatgtggcccctttccatcttcaagagagatggaattaatgatggatggaccctggagggaatctccccagccgacttccactgggctgacagactttgctgaccacaggggaacgatgttcttttctttcttcatgatcagacataaacttagcatcttaatggaagaaaaatgaggggaacttcaattatgatttattaaagacaatttctattacaccctcctttatgacaagtgacattttagatgtaaaagtaaaaactttaccatgccttttttttttttgttggcctaacattgaggccttaaaacctgaggctcctgtgcctgatggaattcttgtaacatacacttgtgtatcatataaagataccactctgtttctcttatgtattcttactctagttgtttattaagaatgacaagcacgtcttttcaacatgttagtgaacaacgtctctttattttggggaggagcccggcgggacagtagaagtaaacccttgcctgttaattgaactggccgaggtcctgcggggagtgtggggtgggacgtgaagtggcagctcctcagtgacaaggccactatgtgctatacgcatgcgctgtttcttcagcgccagctccgcccccgccgcagcgaggcgggtaggttccgcccgcgcgcactacgccctgacgtcagcgtcgcgcgcagcgcagtgacgaaatcggctggtttatattggcgcggcccagacggcagaggtctctgcggcgcggtcctcggagacacgcggcggtgtcctgtgttggccatggccgactacctgattagtgggggcacgtcctacgtgccagacgacggactcacagcacagcagctcttcaactgcggagacggcctcacctacaagtgcgggcct

SEQ ID NO: 29558 - DNA, 2300 bp, Homo sapien
tgtttttttttttttttttgtagaaatggggttttgccatgttgtctaggctggtctcaaactcctaggttccagtgatccacctgccttggcctcccaaggttacacccatgagccaccatgcccaggctattttagtttttcttacagggtcttgctttgtctcccaggctggagtacaatgtcatgatgatagttcactgctgcctcaccctgttgggctcgggctgggacccaggctcaagccattgcactcagctgtttttttttgtttttttttttaaggtttttgtattgacagggtctccctatgttgcccaggctggtcttgaactcctgggttcaagcagtcctcctaccttggcttcccaatgtgctgagattatagacatgagtaaccacacccagccaagtttattacaaattgtagagaagagaataaaattagggaagtgacatcagagggagcaagtgacagagcgaacccagagaagtggaacatgccaaagtatggcaataattgttcccaggagaaaaattatttttttaagaaaaggaaggccaggcatggtggctcccgcctgtaatcccagaactttggtaggccgaggtaggagaattgcttcagcccaagatttgaagaccagcctgggcaacatagcaagacctcatctccactaaaaatcaaaaaaaataatcgagtgtgatggtgcacacctgtgatcccagctactagggaggctgaggtgagaggattccttgaatccttctttgctgagaagggctgttttctgctcatcctggatcttgggggcttcagatatgtctaagagcagaaaagcttttcccattgccactgggtcacaaaatagccgaaaagtagacaaaaaatagagtcagaactgccttaaagagatggaaatgcactattagagagccagctttgttttggcaagagcatagaacacagaagaggagtgtatcgggcagaatgttcttttttctgcttccaggaagtgtcacacactgtgcttgcttggagaatcccgaaaccctgcaggagaatactgttgcctgctcctatctcattatgcacccagtgcacaaacatgtgcatactgactgacttcagcacatgaaggggcttggtagtcattcaaatgtcatctttctttggtgcagacctggctgaccagggctcttattcaaattattgacctttgcctgtacctagctctgggctcacttatgaaccagggtcttacagtaacaccagccctgtgggggggatcttgtaatagttcaaatactggcatattggctaggcgtggtggttcacgcctgtatttctaactgctcaggaaactggcaggaggagtctttgagtccaagagctcaaggctgcagttagccatgattgtgtcactgtactctagcttgggtgacagagcgaaaccccatctcttttttttcccttttttttttttttgagacaggatctcactctgtcacccaggcttaagtacagtggtgcgatcacggctcactgcagccttgacctcccaggcccaaggaatcctcccacctcagcctccctggtagctgggatcacagatgtgcaccatcacacgactaatttttttgattttcagtggagatgaggtctggctatgttgcccaggctggtcttcaactcttgggctcaaacaattctcccacctccgcctcccaaagttctcggattacaggcgtgagccaccatgcctggtcttccttttttaaaaaaagataaatattgtagaagagaccctgtatcttagctaataataataataataataataataataaaatcccccaaagagtatcagtctctttatctagagaagaaatgacaatagccgttttttttgttttttttgtttttttgtttttttgtttttgagatgggagtctcgctctgttgccgaggctggagtgcagtggtgcaatctcggctcactgcaagctccaccttctgggttcacaccattctcctgtctcagcctcccgattagctgggactacaggagcccgccaccacacccggctattttttgtgtttttagtagagacggggtttcaccatattggccaggatggtctcaatctcctgacctcgtgatccacccgcctcggccttccaaagtgctgggattacaggcatcagccactgcgcctggccggccttgctttttagagacagttgagatgagagaagacttggtaagggcaaacgggcgtgcatgccagttctttgg

SEQ ID NO: 29559 - DNA, 2300 bp, Homo sapien
ctcctctgctgtggcagagttgaattatgggctctgtctaatgacacgggaagctcgaaatggagaaggtgaaccctatgacccagatgtgctctactatattttcctgtgtattcaaaaggtaggaaacagatcttcacaagaacatgtttgagctgtgttcctattggatgtttgctagtttagttaataaattgataagcaagaagttaaaataaggaagttctctttcaggtatacagtgagttttaaaatacacatttgttgttttttttttttttttaagttttaaaaacctacacgttcactttagaaaataacagccggggccgggcgctggtggctcacgcctgtaatcccagcgctttgggaggccgaggcaggtggatcacttgaggtcaggagttgaagacgaccagcccagccaacatggtgaaaccccatccactaaaaatagaaaaatttgccaggtgtggtggtgcactgcctataatccctgctatttgggaggctgaggcatgagaatcgcttgaacccgggaggtagaggttgcaatgagctgagatcacagcattttactccagtctgggtgacagagcgagactctgtctcaaaaattaaaaaaaaaagaaaagaaaagaaaaaaaataagagccaggcaagatgtctcacacctgtaatcccagcactttgggaggctcaaggcaggaggatcgcttgagccccaggagtttgagaccagcctaggcaacatagtgaaaccccatctctacaaaaaattagctgggtatggtaatgcatgcctgtagtcccagctacttgggaggctgaggtgggaggattgcttgagccccagaggttggggctgtagtgagtcatgattatgtcactacactccagcctgggtgacagagtgagaccctgtctgaaaaacgaaaagaaaaaaaattagctgggtgtggtggcacacacctgtagtcccagctatttgggaggctgaggcaggaggatcccttgagctcaggagtgcgaggctgcattcagctatgattgtgccatcacacttcaatctggtctacaaagcaagaccttgcctcttaaaaaataaatacataaaataaataataaaataggaaaacaaacattattcatcctactacctaaacttctattacattattggtaattaccttgactttttttttttttttttttttttgtaattcacaaagcatttatgtaacacttttctttttgttaaacctgattttcatgaaggtaatttattcaaaacagagtcttgtgccagcatagaggttttcttctcattgttccctgcactaactacttatttgaaggagtctagctagaataatataccaatgtagttaggttttcaggacatctgtggtgaagcataacagaaatttgcagactggcagttcaagggagcagaggtggatttcttagtgtttgaaggctcttgaggagaaacccacagtataatagaatagggcttactggttgggacttattctgttgcctagtcttgagaaatgtctgcctcctagttttttcctctcttggtggtcctaacctaagtactatgtgaattgctttacatgctttcattctttgctctcccagtcctggaaggcagataccatcatctccatttacaggcaaggaaactgagtctcagaaattaaaagacttgcacatgttgtttaacttatacaatatctaatggaaggctgaccccagagcctattcatgatttttgctaacacaaaataatgcctttcttgggtgaaatagcattcacaacatctgccttatttacccaactctcaagaatgtcatgagaatcagtcacatgagcttaggcatactatggaagtgtcacatgctggtgccttggtttgttgaggtgtgaatgggtagggaaggatagtagtactggtagaaaaatatatttatttcccctgaaatccttgttcaggagactaccaataacttctattaattgtttttcttttagtatctttttgaaaatggaagggtagatgacattttctccgatctttattatgttcggttcacggagtggctacatgaagttctgaaggatgttcagccccgggtcactccacttggtaagagtctcccttgtccttggatatctttcctacctggatttaagaaagatcaatagcttctgtggttggctatgaaaagcatgtgagtgaggggggatataaatcccagactgcagcagcattggccactgtgctacttgc

SEQ ID NO: 29560 - DNA, 2300 bp, Homo sapien
cctgtaatcccagcactttgggaggccaaggcgggcggatcacgaggtcaggagatggagaccatcctggctaacatggtgaaattccatctctactaaaaatacaaaaaaaaaattagccgggtgtggtggcaggcacctgtagtcccagctacccgggaggctgaggcaggagaatggcgtgaacccgggaggcggagcttgcagtgagctgagatggcaccactgcactccagcctgggcgacaaagcgagactccgtctcaaaaaaaaaaaaaaaaaagagtgaaactccatttcaaaaacaatttttaaaatgctggccgtggtggctcacgcctgtaatctcaacagttttggaggccaaggtgggcggatcacttgaggtcgggagttcgagaccagcctgaccaacatggagaaatcctgtctctactaaaaatgcaaaatcagctgggcatggtgatgcattcctgtaatcctagctactcaggaggctgaggcaagagaattgcttgaacccaggaggttgaggttgcagtgagccaagatcatgccactgcactccagcctgggcaacaagagcaaaactccgcctcaaagaaaatggaaataaaaatgccggccgtttcggctcacacctgtaatcccagcactttgggaggccgaggtgggtggaccagttgaggtcaggagttcaagattagcttggccaacatggtgaaacctcgtctctactaaaaatacaaaaattagctgggtatggtggcacatgtctataatcccagatactcgggaggctggcttcaagaattgcttgagcctgagaggtggagattgcagtgagctgagatggcaccactgcattccagcctgggcgacacaatgagaatttggggaaaaaaaaaaagaaccaaagttttgatatttccttgttagactccagcatgtctgtaatcccagctactctaggaagctgaggcaggagaatcgcttgatcccagcaggcggaggttgcagtgagctgagattgcgccactgcattccagcctgggcgacagagcgagtccatcttaaaaaaaaaaaatttttttttttggtatttcctttttaggccccagttaattgtcttgcttgctctctggggtggatatatgtccctgttattgtaatgtgctgctggacaatcctggatctagtcttacgtattgtgtccttctcagaagccttgagtatgccagtgttttctcacattttgcaggtcccctgtctgggatctcttttctttctttccttgggtactggattttcagtgctgcctggttcactcactgatgaatcttgttgcttacaggtccaggtgcaggtacagcagtctccgcaacaggtctcggctcagctctccccacaactcaccgttcaccagcctactgagcaacccatccaggtccaggtgcagatccaaggccaggcaccacagtcagcagccccctccattcagaccccgtctctgcagagtcccagtccctcgcagctgcaagcagctcagatccaggtgcagcacgtgcaagcagcccagcagatccaggctgcagaaatcccggaggagcacatcccacatcagcaaatccaggctcagctggtggctggccagtctcttgctggtggtcagcagatccaaatccagaccgtgggtgccctttccccaccaccatcccagcagggctcaccccgggaaggggagcggcgggttggcacggccagtgtcctccaaccagtgaagaagcgcaaagtggacatgcccatcactgtgtcctacgccatctcagggcagccggtggccaccgtgctggccattccacagggccagcagcagagttatgtgtctttgaggccagacttactgacagtagacagtgcccacctgtacagtgccactgggaccattactagccctacaggagaaacctggaccatccctgtttattctgcccagccccggggggaccctcagcagcagagcattacccacattgccattccccaggaagcctacaacgcagttcacgtcagtggctcacccacagccctggcagctgttaagctggaggatgacaaggagaagatggtgggcaccacatctgtagtgaaaaactcccatgaagaggtagtgcagacccttgcaaactctctctttccagcacagttcatgaatggcaacatccacattccagtggctgtgcaggctgtggcaggcacgtaccagaatacggctcaaactgtccatatatgggaccccca

SEQ ID NO: 29561 - DNA, 2300 bp, Homo sapien
ggtggaaggattgcttgagtccgtggagctatggatattacagaaaccaattgggtggctcacgtctataatcccagcactttgggaggccgaggcgggagggtcacctgaagtcaggagtttgagaccagccaggccaacatggcaaaacccagtctctactaaaaatacataaattagctgggcatggtggtgggcacctgtagtcccagctactcgggaggctgaggcaggaaaatcacttgaacctgggaggctgcagtgagccgagatcgtgccactgcactccagcctgggcgacagagggagactccaactcaaaaaaaaaaaaaaaaaaaaaggacaggtgtggtggctcacgcctgtaatctcagcactttgggaggctgaggcaggcggatcacgaggtcaggagatcgagaccatcctggctaagatggggaaacctcgtctctactaaaaatacaaaaaaattagctgggcgtggtggtgggcgcctgtagtcccagctactcgggaggctgaggcaggagaatggtgtgaacccaggaggtggagcttgcagtgagccaagatcaagccactgcactccagcctgggcaacagaatgagactccatctcaaaaaaaaaaaaaaaaaaaaaaaaaaggaaccataattcttcgttttccacattgaatttcaaatgcagcaggtatatatgaagcaactaccatgggtgagctattcggagagaaccaggacatagtcttgtctaccaagaacttagagcctaggtagaagaaaggagacgtttacccacatattttatatctgtaacataaggtagagcatctggtcagtctagtgtatctatcctgattgctcaagggaacaaatcacctttccagacattcagaattgtctgataatcctttttggcaaaaacgttcgcttgttttctgttactctttcatcctgctgctacttttgttctggaggtcgggctgttgaagggaggatggtacaaaggtagcagcgacaggggtcagcagtccacagattgcacacttttccctcagatgatgagagttaactgtacgtctgcaggttaattcttaaggtaattaaatacctgatgaaaacttgtagaatttatttctgaattttagtagtgacctggatatttaaagcactatttaccttttttccagaattattttaatagtattagttacatttctgtagtgctatctatgtgctagatgattttctaaatgccttatttaatccttatgtcaactgtgaggtaagtactattgtgtccccatttactcacaagaaaactaaggttaattgacttttctagagttacataataaaggagacataaagttgggatttgaacccaggcagcctggctccagagtccatgcttttaaccagtagtaagctgtgttgcaaaagaatgtgagcaccacatggcaaaataggatttttggtttttctgatgggagatgaagaacatatcctctgcctcttgtgtcttgccacaactaggtggcatacctatctctgctgtaggaaatacttggaaataaaacatatccataggaatccctgcccctagcttcctccttgcttggtgtcctctctgtgatggtcacagagcagttttgcatgtgacatttactgtccagtgcttggctctgcagagaagatgggattgacctagtgctgggtaggaagtgtgttttcagcctgtttcatccagtattgtgaagcatgtgtttgtttttttgttttcagtgtgatagttttatttaagaaatgttaatagaaataattttcaaacatccattaattgaaaaaataaggtggtataataaaactttattttttgattctatatgtatacagctgccctgaatatattccactcttgtgcaagggtaattgcttctgggcatttcctgctaaaaacagtaacataattttgacttctgtttatttctaggaaccctaaggactctgcaatatgaataattccctagagaacaccatctcctttgaagagtacatccgagtaaaggcacggtctgtcccgcaacacaggatgaaggaatttctggactcactggcctctaaggggccagaagcccttcaggagttccagcagacagccaccactaccatggtgtaccaacagggtgggaactgcatatacacagacagcactgaagtggctgggtctttgcttgaacttgcctgtccagtcaccaccagtgttcagccacaaacccagcaagaacagcagatcc

SEQ ID NO: 29562 - DNA, 2300 bp, Homo sapien
gatgttagggggaggtgtctgtggtgaaacctgcccaggcctccctggccttgttctgggttggtggtcatccttttccctctgccctccagcttgtctttaaccgaactgtcacactgaaggaagacccaggaaaggtgtgagctggaagcactgaacctacctcatcctcctggagggtgtggctaccctcgccaccccaaattccatgtcaataaagaacagctaaattctcctagagtctgtgtgttatctctgcacttctagcatctgaaggccctgaagacatgctggtggtggtggtatgattgggggatggagatgtgccttttgcacattttgtctgtgagaatggactttcccagaacagagtggtactgacagctttgaaagcaccggtgcactttttggtgcttaaaggcaggggcctgggtaggattcataccctccgcacctggtctgagagaatggagggccctggggtgtttgtccatggttaggacccctgtgccagagggatctaaaaggtttgtttctgctggtgtggagaggcctagctcccagtctgatcattcagcatataattttttttttttttttttgatacggagttccactctagcccaggctggagtgcagtggctcaatcttggctcactgcaacctctgcctcccgggttcaagcgattctcgtgcctcagcctcccaagtagctgggattacaggcgggcgccaccactcctgaataatttttgtaatttcagtagagacggggttttgccaaattggccagactggtctggaactcctgaccccaggtgatctgcccgcctcggcctcccaaagtgctgggattgcaggcgtgagccactgcgcccaatcagcctataattcttttttatttttgagacggagtctcactcttgtcccccaagctgcagtgcaatggtgtgatctcagctcactgcaacctctgcctcccaggttcaagcagttttcctgcctcagcctcttaagtagctgggatcacaggcatgcaccaccacactcggctaattttgtatttttagtagagacggggttcaccatgttggccaggctggtctcaaactcctgacctcaggtgattcacccgcctcggtctcccaaagtgttgggattacagacttcagccaccgtgcccggcccattcggcatataatttttgagtgcctactacgtgccaggcaaagtgagatggggcatacgtgctgtggtggccttccaagttcacgggaggggaaatgggtgaccaagcactgtatgggagcggtctccctggggcctgtgcaagactggaagaggttcctgacccagcctgggcctcagaaaacattactctaacgaagtgacttctgaagggaatcacgaaagactacggggagtttgccaggataagaggaacaagggcaaaagctccgaggcaaaaagagtctacagcaggctggaagccctctgggggcagtgtaggctgctgctgaggcccgagtgtgcctgcagctttaacgccttccacattttccctgtatacaaacactaggctacccgggggcccgctttaaggtggacccaactgcggaaggctgaactcagatggcagcagacagcgggagtaccagatgctgactcctccaggaggtgagcaacctagaggcttcccaggcagggcacggctggggacgccaggcccaggacagaagtttgtggggtccaccttaagcgagaggccgagcctggccaggccccgccccgcgtgggcgtgctcgaccaaaggaggctctggcgggcgacggaaggtgggtccaaagagctagcttggagccctagccttccgagactccactactaggccaagccacggccctagctccgccccacatggagaggcgtccatgggcggagcgagccgctccataccctaggatccactatccgctctagcggccagaagcgcggccaccttcccctgctgaagcgttcactttaattttggccggtaggcagtcccagatctcgcgggatccgacgccccgattatcgcgagaggagcaatcggctcctattggctgtgagggttgaatgtaagatggcgcccagggagctgtgaggagaaaaccctgtcggtcttggagcgacgacggcagaaccagggtccctggcggtgcggcggggccggcgggtgcagcggaggcggcggcggcggcggcagtgacgtcgccgggtgagggctccagtgcgggtggggatgcggcgaagctgta

SEQ ID NO: 29563 - DNA, 2300 bp, Homo sapien
agagacagggtttcaccatgttggcgaggctgatctcgaactcctggcctcaagtgatccgcccgcctcggcctcccaaagtgctgggattaaaggcctgagccactgcgcccggccaagattttaaaccaaatcatcatagaacttatgtgaggtccctcctggcccagacccgtcccttccctttcctggccagctgtgtccaagtgggcacctgaaaaccggcggacttatggggcccctggatcggtcattccacacattctctacgatggagtctggatgagggatttcctgggcttcatttgttcaactgtttccatgacaactccaaagctgtggcgtcaaaagcgtgacagggactcgcatttgcccccgaggacaattactatattgagatggagttaccagggctgaagtagaaaagtcagagcaaaaccacgcctgtgtcttcctcctgcctcagggacgaacaccttccttccaggtccgtggcaaatatctccaaaagccctgccgcctgccaacaccccttcaagttcccagttccacggaggcggaagcaaagcccccggaaaggccggtttgtccgccctgtgttgtttaaaggggatagacgaccttggagcgccccgccccctcccgccaaggaaggaccccattggctctccccggaggcttcactctcattggtcagcgagtgaatgccgacctgcagactggggcctaagtttcttttagtttccggtgtctctgcaatggcggctctagactccctgtcgctcttcactagcctcggcctgagcgagcagaaggcccgcgagacgctcaagaactcggctctgagcgcgcagctgcgcgaggccgctactcaggtgcgagcccctctgcccccggcctggtttgcagaccatgctgcaacgcagcgcggggcggggtccagatcccgacctgccccgtttgtcccgccctttcctctcactgagcgcggggcttctctcttgacccctctgacctcaggctcagcagaccctgggttccaccattgacaaagctaccgggatcctgttatatggcttggcctcccgactcagggatacccggcgtctctccttccttgtaagctacatagccagtaagaagatccacactgagccccagctaagcggtgagacccctacctgtcctgccagttcgcaccaatgcctcccttcagccaagacccctgtcttccctttttgccaagtcctccagtttctttctagacacctagttctgcacaggcactgaggcatggaaggggtggcctatggtgagactgacacgggaactgtcagggtctgaggggggatccactctcgacacgtgcttctttcttccctgtgttctctagggtggtggtgccagggcttaacttttcaggaggccagactatccttggagtttcatgagattaggaccctgtctgtccacttcttggagcagagatgccacaaactcacgggctctttcttctcagctgcccttgagtatgtgcggagtcaccccttggaccccatcgacactgtggacttcgagcgggaatgtggcgtgggtgtcattgtgaccccagagcagattgaggaggctgtgagtctttccccaggcatcgtctgcctccccagtcctggccatggaaaggagtggctcagtttccctcctcaggaagacccagagtgagggtgtgggttcccagaatatctctaaaggtggctttcctgaaccacatggtttggctttctgcaggtggaggctgctattaacaggcaccggccccagctcctggtggaacgttaccatttcaacatggggctgctgatgggtgagcagggcctggaacggggctatattgttctctctggtcatgccttttcttctgggcacgagtgagaaggaggtgggggaaggaacaggagtgacttaaagtggtctggctgggctcaggctctggttctggtggtcagccaggacctttccttgggaaagaggtggggggagtactcttttttgcctttctgcagctccttgtgcctatgcttctaggagaggctcgggctgtgctgaagtgggcagatggcaaaatgatcaagaatgaagtggacatgcaggtgagcgtgcttcactaagctgaagctggcaaagactctggcatgaacagagcctggaatccactaagggataaaaggcaggaagagggctgggcatggtggctcacgcttctgatcccagcactttgggaggctgaggcaggaggattactt

SEQ ID NO: 29564 - DNA, 2300 bp, Homo sapien
ctgctgcctggtttttccacttggtcatctttgtcttgacttttcctggaagcagtgccaggggcttatgcaggcaagctaacctccagactgggcccatacaatttaacatttctgctttgtgcaagtcgtagacatctagggcactagctggatatcgactggtatgctaccacttgtggcattcttggtgacactggtggggctactgcctcattctatgacttgtagccatggcgtccacagtgtaccatgaagtaaccagggaagggagtgcagatcttgatctcattgagggagccatcactagacctgtaggacttggtgatggtgctacagtgaatctattggcagcatcaggtactgaggaaatagtggcagtggcaggcactctgcatggctttgctcaccatgggcacctttatggtgggctgggtacttgcagcttcaaatttggtgcacggctggtgtggctatggctctgcttcttggtacctgtccttagcaccactggtctgcatcccctgcttaattcctgcacctggcctttctcatgcagtacactgcagggctaggcatctggctggggccacggggccatggagatgtgggaagccccaggacagcattggacctggatagcgatacagcatgtggccctggtctgcacctggcatgtgatcattaggtggtatccagatgtaggcccagacttggaggttggtcattaataatgggatgtgggcacaaaagacacagaatatagataaagactagtcaggatcctgcctattccttgaaggtccagaagtatgagcatcaccaattcctgcaagagctccaatctcaaatgtggggatttccaccatcccaccaccagctgctcattctctgcaaccccctacctcagtcccttactaccttagtcccttttctcacacacacacaaagtctctgttctgtttcagccagcaggtcctggaagtccagtgagactgtggaaagatccccaagcacaacagctataatcatgaagctataaccatctcatttgtcccaccctctcacaagctcaataaaatatcctctcaaaggcctgcagagggatttcaaggtctaatttgcttgtggttttcctgataatgctttggcaagagggtaagtgtgggatgagatttttttttcttttctttttttttttttgagacagtcttactctgttgaccaggctggagtgcagtggcacaatctcggctcactgcaacttccgcctcccaggttcaagcgattctccagcctcagcctcctgagtagctgggattacaggcgtgcgccatcacgcccggctaatttttgtatttttagtagagacagggtttcaccatgttggcgaggctgatctcgaactcctggcctcaagtgatccgcccgcctcggcctcccaaagtgctgggattaaaggcctgagccactgcgcccggccaagattttaaaccaaatcatcatagaacttatgtgaggtccctcctggcccagacccgtcccttccctttcctggccagctgtgtccaagtgggcacctgaaaaccggcggacttatggggcccctggatcggtcattccacacattctctacgatggagtctggatgagggatttcctgggcttcatttgttcaactgtttccatgacaactccaaagctgtggcgtcaaaagcgtgacagggactcgcatttgcccccgaggacaattactatattgagatggagttaccagggctgaagtagaaaagtcagagcaaaaccacgcctgtgtcttcctcctgcctcagggacgaacaccttccttccaggtccgtggcaaatatctccaaaagccctgccgcctgccaacaccccttcaagttcccagttccacggaggcggaagcaaagcccccggaaaggccggtttgtccgccctgtgttgtttaaaggggatagacgaccttggagcgccccgccccctcccgccaaggaaggaccccattggctctccccggaggcttcactctcattggtcagcgagtgaatgccgacctgcagactggggcctaagtttcttttagtttccggtgtctctgcaatggcggctctagactccctgtcgctcttcactagcctcggcctgagcgagcagaaggcccgcgagacgctcaagaactcggctctgagcgcgcagctgcgcgaggccgctactcaggtgcgagcccctctgcccccggcctggtttgcagaccatgctgcaacgcagcgcggggc

SEQ ID NO: 29565 - DNA, 2300 bp, Homo sapien
agaactccactgcgagcgaagtattggactccctctctcagagtgttcatgtgaagcctgagaacctgcgtttggcggaggtatctttgtccttccttgggctatcacatgtgtggatgtgtgtgtgtactcaccacagacgtgtgtacagtcattggcatctacagacatacacatgggctgggcacagtggctcatgcctgtagtcccagcactttgtgaggccgaggtgggcagatcacttgagcccaggagtttgggaccagcctgggcaacttggtgaaacactgtctctacaagaaataaaattagctgggcatggtggtacgtgttatagtcccagctacttgggaggctgaggcaagaggctcacttgagcccgggatgtggaggttgcagtgagcagagattgcaccacagcactccagcctgggtgacagagtgagactctgtctcaaaaataaataaataaatagataaaaaaataaaaatagggccaggcgtggtggctcatgcctgtaatcccagctctttgggaggccaaggctgatggatcacaaggtcaggagatccagaccaccctggcttacatggtgaaaccccacctctactaaaaatacaggaaaagttagccgggcgtggtggcacatgtctgtagtcccagctgctcaggaggctgaggcaggagaatcgcttgaacctgggaggcagaggttgcagtgagccgagatcgcgccactgcactccagcctgggtgacagagtgagactctgtctcaaaaataaaataaaataaaataaaaatagacatacacatgagtatgcctgtgactgtacaaaaacaggcgatgtgctgttattttttctgtgcaacagaagtgccctcagttcctagccattatcagggtttattcccctttgtggtggtggatcccaactgcatttccctttttagacaaggagcttgagctgcaggactatccctatgttcgctctgcctctccctctatcctgctgctctctccttttatcccagttgtgtgtgctagctctccccaggggttcctagcctttagcctgacagtgttggttttcttaggggtaagagtggggaggaggctctttgaatgtggaccctccatgataatatgttacagtcttataaggctatgctagttatagcagggcagagtccctcagtgtggagagctggtgtggttgatatctgcctcacacctggtctttcaggccctctgatgcaccaggctccttatggcattgggcactgagacaggtgccagcagaggcataagcctatttgggcctacagacctcaccactgcccacatagacccaaggcagggccaagccttcttaaactctggggcagggctagggaaagggcttatcctcacgtgggatctgtgtgttctctgtccccaggtaattaagaatcgttttcatcgtgtgttcctaccctcccactcactggacactgtgtccccatctgatacgctcctctgctttgagctgctatcctcagagttggctaaggagcgggtagtggtgctagaggtgcaacaggtgagtgggggccaacctgatggcacagcgccctggtgggtggggcacttcttcctggtcttgctgagccagacgacccaccctagcgcccccaggtgcccagcgtccccatctccaagtgtgcagcctgccagcggaagcaacagtcggaggatgaaaagctgaagcgctgtacccggtgctaccgtgtgggctactgcaaccagtgaggacccccatggtctcccctaccctttctttccaccttccatgtgccaccctgctccttcccttcacaccaaggcacatatgcttaagctttctacttgccaccctactttaccaggctctgggggaggcagggctggcgtacccagttcccagggactatgactagcccccagtatggagtcataggagatggggctaagggcctatccttgtcttcctcttcccgtcaggctctgccagaaaacccactggcctgaccacaagggcctctgccgacctgagaacattggctaccccttcctggtcagtgtacctgcctcacgcctcacttatgcccgcctcgctcagttgctagagggctatgcccggtaagtgcccagtggttggactagagtggtgtaggtgggggcagaggtgctagatgggctggtcaggagtcttacttgcgttgttctctgttgccaggtactctgtgagtgtattccagccaccctttcagccaggccg

SEQ ID NO: 29566 - DNA, 2300 bp, Homo sapien
ctggtgagttctagtagtacagggttgggtagggataccagtgtagtcgacagggcctgactgctgtatctttggcagaagaaacctctagggacccaggagctggtgccggggctgcggtgccaggagaatgggcaggaactgtctcccattgccctggagccaggccctgagccccaccgggctaagcaggaggcccggaaccagaagcgggcccagggccgtggtgaggtaggcgcaggggctggccccggggcccaggcagggcccagcgccaagagggctgtgcatctctgcagagggccagagggggacgggtccagggatgaccctggaccccggggtgatgccccacccttcgtggctgacccagccacccaggtgagagctgggcacctgtttgggtgttaggagatggggggaaagggtgtgcactggagtgggagccacctggcagacccagggctgattctttccacaatcttgccattaataggttgaggctgatgaacagctttgcataccaccgctgaactcccaaacctgcctcctgggctcagaggagaatttagcccctttggcaggagagaaagcagtgcctcccgggaatgacccagtctctccagccatggtccggagcagaaaccctgggaaagatgactgtgccaaggaggagatggcagtggcagcagatgctgcaaccttggtggatggtaaaggtgggggtgggcaggcagagccctaggttgggttgcaaagtttgtaggtggatagagagtagcaataggctggaacctgtcctggttggggctgagccatggtctcaatatagagcccgagtcgatggtgaacctggcgtttgtcaagaatgactcgtatgagaagggcccggattcagtggtggtgcacgtgtacgtgaaggagatctgcagggacacctcaagagtacttttccgtgagcaggacttcacgctcatcttccagaccaggtgggtgggtagatgatggggcaaacaatgcctcaggtgggacagtatgtctcatgctcttcctcttgtccttcctcctatcctgctgtgcctctgcagggatggaaacttcctgaggctgcacccgggctgtgggccccacaccaccttccgttggcaggtgaagctcaggtgggtggtgcccggccccaccactgtgcctgtcctaccccgtgggctccatctccctggctcatctatcctgatgctcattcctcctaagtccctgagttcagccttttcccacaggaatctgattgagccagagcagtgcaccttctgtttcacggcttctcgcatcgacatctgccttcgtaagaggcagagtcagcgctgggggggcctggaggccccggctgcacgaggtctgcacacgagctcccttcattgcccagttccacgtgaccaggacccaaacccctgtcacatgctgctaaccaccagccctctcattccccctttttaaggtgcagtgggtggtgcaaaggttgccgtgccgacaggtccaacccctctggattcaaccccaccaggaggtgctccccaccccctgacaggccaggaggaggcccgggctgtggagaaggataaatccaaggcacgatctgaggacacagggctagacagtgtggcaacccgcacacccatggagcatgtaaccccaaagccagagacacacctggcctcggtgagaattctggggtgggaaggacgaagaatggaggctggagagtcttggggctgttctctcatgtcgtctttgctcctgcagcccaagcctacatgcatggtgcctcccatgccccacagcccagttagtggagacagcgtggaggaggaggaagaggaagagaagaaggtgtgtctgccaggcttcactggccttgtcaatttaggcaacacctgcttcatgaacagcgtcattcagtctctgtccaacactcgggaactccgggacttcttccatggtgagggcagggcctggagcctgggttatgggcagagagagtgcctttgttcctcacacctttgctcggctactattcctagaccgctcctttgaggctgagatcaactacaacaacccactagggactggtgggcgtctggccattggctttgccgtgctgcttcgggcgctgtggaagggcacccaccatgccttccagccttccaagttgaaggtgatctgtgaccactgtcacccttggctggagggggcggggagggccagccagctgggtgtgcagtgggtgctagggcttcatgttc

SEQ ID NO: 29567 - DNA, 2300 bp, Homo sapien
tgtgttgctgagccctgggtgtagctaaagagcaagttgttgggtcttggcagtgatcactggcttctttccattaggctgtccgttccttgctggagaatttggccacaaagagttgccaagatagctgggccaggaagaaagcgccgcagccctgacccagacgctgttgccgaccccggggcactctggctgtcgaccaagcggctcaagatgtctggcggggccagtgccacaggcccaaggagagggcccccaggactggaggacaccactagtaagaagaagcagaaggatcgagcaaaccaggagagcaaggatggagatcctaggaaaggtgggagtggcattcccagagtaattgtggccttctctgcctcccatcttattggtatacagattggggtttgggagatgactttcttgttcttctctctgtcctggtttgatgatgagagaagaaggacccatgataacctcagtagagcctcagctttgaagcctgagtacttggctaagatccagaagatggtgctgttggggggcttgccttctttcctttttaaacttttttcttttttttgaacctgttctttttttccttttttttttgagatggagtctcattctgtagcccaggctggagtgcagtggtgcaatattggctcactgcaacgtccacctcctggttcaggtgattgtcctgcctcagcctcccaagtagctgggattacaggtgcatgccaccacgcaaggctaattttttttttttttttgagacaatgtctcactctgtcatccaggctagagtgtagtggcgtcttggctcactgcgggctctgcctcccgggttcaagtgattctgctgcctcagcctcccaagtagcctcagcctcccaagtagctgggattacaggtatgcaccaccacactcagctaatttttgtatttttagtagagacggggtttcaccatgttggccagactggtcacaaactcctgacctcaggtgatccacccacctcggcctctcaaagtgctgggattgcaggcgtgaaccaccgtgcctgtcccttttttttttttttttttaaaggcagggtctcactcttgcacagattggagtgcagtgcaggtgtgatcgtagcttactgcatcctcaaagtcctgggctcaagcagtcctcctacctcagcctcctcaccatgcttgactaatttttcttattttttttttagagacagggtctcgatatgttgcccaggctggtcttgaacctctggcctcaggtgatccttctgcctcagcctcccatgcagctgggatcacaggctcacgccaccgtacccggctgttctttccttcatcgtcagggtcagcatccactcctcaagaggagcagaccaaagagggtcagtaacgaatgggctttttgttgctagggaaggggagggggcacttgcaatttggctcccatctgaagcagtttcattaggctgggtctctgttacctgcttatcaccatcaggagcttgtgaagaccctcatgatctcttggctactcccactccagagttgttgctcgattggaggcagagtgcagaagaggtgattgtcaagcttcgtgtgggagtaggtcccctgcagctggaggatgtagatgctgctttcacagatacagactgtgtggtgcggtttgcaggtgtgtccatctgccctgagcacagtagtatgtttgaatcttctgatatctcctatcctacctcatggaccctgctctgtccccaggtggtcagcagtggggtggtgtcttctatgctgagataaaaagctcttgtgctaaagtgcaaacccgcaagggcagtctcctgcacctgacactgcccaaaaaggtgcctatgctcacgtggccctccctcctggtgagttctagtagtacagggttgggtagggataccagtgtagtcgacagggcctgactgctgtatctttggcagaagaaacctctagggacccaggagctggtgccggggctgcggtgccaggagaatgggcaggaactgtctcccattgccctggagccaggccctgagccccaccgggctaagcaggaggcccggaaccagaagcgggcccagggccgtggtgaggtaggcgcaggggctggccccggggcccaggcagggcccagcgccaagagggctgtgcatctctgcagagggccagagggggacgggtccagggatgaccctggaccccggggtgatgccccacccttcgtggctgacccagccacccag

SEQ ID NO: 29568 - DNA, 2300 bp, Homo sapien
gggaaactgtagtggtccttgtggctcagagctcatgagtgaaggcatctgggaaggaaggtgataatttctgttccagtctcaaactggatgcccatcctgccttagtactggagcagggttgctgctgaagaggtagcgtgacatctagatacacttttcagtccctttctgcttgggacagcagctggggagaggactttctcttgaaatgaagaaggaccaagcagtacataggagcaggttcttgccaagggtgggagctggcaggaggcaggtggagtgccttagccccaggactttttctgggcaatggtagaacctgggttgagcctgtttacagccacagagcctggttctcctgcggcttgtctcctgtcctgccttcctcctccaccttctatttctccagtggtgactaagcagccagtgagagtgaaggaaaagtgagcaccctgctcggagtgccagccctgtgggctggagccgtggctcctctccagattggtggagtagcctggtcccaggccatgacttccttgacctggtgccccctcagtgaggctttcacctgtgtgggactgttatggtgggtatctatgaggcttggccagaagtggttgctgctacttgcattatttattacctcttcagaatatcctgagagtgtccaggggtacttaagagatgagaagatacagctctgtagcattagtgtcctgtgttgctgagccctgggtgtagctaaagagcaagttgttgggtcttggcagtgatcactggcttctttccattaggctgtccgttccttgctggagaatttggccacaaagagttgccaagatagctgggccaggaagaaagcgccgcagccctgacccagacgctgttgccgaccccggggcactctggctgtcgaccaagcggctcaagatgtctggcggggccagtgccacaggcccaaggagagggcccccaggactggaggacaccactagtaagaagaagcagaaggatcgagcaaaccaggagagcaaggatggagatcctaggaaaggtgggagtggcattcccagagtaattgtggccttctctgcctcccatcttattggtatacagattggggtttgggagatgactttcttgttcttctctctgtcctggtttgatgatgagagaagaaggacccatgataacctcagtagagcctcagctttgaagcctgagtacttggctaagatccagaagatggtgctgttggggggcttgccttctttcctttttaaacttttttcttttttttgaacctgttctttttttccttttttttttgagatggagtctcattctgtagcccaggctggagtgcagtggtgcaatattggctcactgcaacgtccacctcctggttcaggtgattgtcctgcctcagcctcccaagtagctgggattacaggtgcatgccaccacgcaaggctaattttttttttttttttgagacaatgtctcactctgtcatccaggctagagtgtagtggcgtcttggctcactgcgggctctgcctcccgggttcaagtgattctgctgcctcagcctcccaagtagcctcagcctcccaagtagctgggattacaggtatgcaccaccacactcagctaatttttgtatttttagtagagacggggtttcaccatgttggccagactggtcacaaactcctgacctcaggtgatccacccacctcggcctctcaaagtgctgggattgcaggcgtgaaccaccgtgcctgtcccttttttttttttttttttaaaggcagggtctcactcttgcacagattggagtgcagtgcaggtgtgatcgtagcttactgcatcctcaaagtcctgggctcaagcagtcctcctacctcagcctcctcaccatgcttgactaatttttcttattttttttttagagacagggtctcgatatgttgcccaggctggtcttgaacctctggcctcaggtgatccttctgcctcagcctcccatgcagctgggatcacaggctcacgccaccgtacccggctgttctttccttcatcgtcagggtcagcatccactcctcaagaggagcagaccaaagagggtcagtaacgaatgggctttttgttgctagggaaggggagggggcacttgcaatttggctcccatctgaagcagtttcattaggctgggtctctgttacctgcttatcaccatcaggagcttgtgaagaccctcatgatctcttggctactcccactccagagttgtt

SEQ ID NO: 29569 - DNA, 2300 bp, Homo sapien
cactggcagaaggtggtagcatcctcagcagagtggctgagactcgtcggcaggcaagcgaggcacagcagcgggcccaggcagccctggacaaggctaatgcttccaggggacaggtggaacaggccaaccaggaacttcaagaacttatccagagtgtgaaggacttcctcaaccgtgagcctcccacgtgtcccaggccatgtggttgtcccctttggcaactcccggtgtctgtatctcccttggttcatacttgagcctcagggactacactggattagtgtttatgatcccttgactggctcctgagttattgcccatatgtggtcccaggtccatgttcttgagtctgagccccttgtatagtccctgtccttgtgattatatccttatgcctggtaacaaacccctatcccatgtacatgtcctgagtccataccccaaaactgtatcctcatgcccatgctggagaatctatgttcttaagttcttgctgtgtccctatagaggagggggctgatcctgatagcattgaaatggtggccacacgggtgctagagctctccatcccagcttcagctgagcagatccagcacctggcgggtgcgattgcagagcgagtccggagcctggcagatgtggatgcgatcctggcacgtactgtaggagatgtgcgtcgtgccgagcagctactgcaggatgcacggcgggcaaggtctgaccccatccctggcccctatccctgacacctggttttgatacctccaggttctgattcccccttctccccaggagctgggctgaggatgagaaacagaaggcagagacagtacaggcagcactggaggaggcccagcgggcacagggtattgcccagggtgccatccggggggcagtggctgacacacgggacacagagcagaccctgtaccaggtgaggtcttcctaggacatcagtgggacaaggttatgggcatgaaccgtagatctgtgtaacctttggctcacccatggcaggtacaggagaggatggcaggtgcagagcgggcactgagctctgcaggtgaaagggctcggcagttggatgctctcctggaggctctgaaattgaaacgggcaggaaatagtctggcagcctctacagcagaagaaacggcaggcagtgcccagggtcgtgcccaggaggctgagcaggtgggttgaggcagagccagctggagaaggtaggggtggaagatgggcctccactgagctaccacgctaacctaaccctctacatctgcagctgctacgcggtcctctgggtgatcagtaccagacggtgaaggccctagctgagcgcaaggcccaaggtgtgctggctgcacaggcaagggcagaacaactgcgggatgaggctcgggacctgttgcaagccgctcaggacaagctgcagcggctacagggtaagaaatggggcaccagagacacaagactgcgggaaaccccccctaaactgacacctgcccttcctagaattggaaggcacctatgaggaaaatgagcgggcactggagagtaaggcagcccagttggacgggttggaggccaggatgcgcagcgtgcttcaagccatcaacttgcaggtgcagatctacaacacctgccagtgacccctgcccaaggcctaccccagttcctagcactgccccacatgcatgtctgcctatgcactgaagagctcttggcccggcagggcccccaataaaccagtgtgaacccccactgtgttgtctggactctgatttggggcgggcgggggagtctccaggggaacctcgaggttgcccccagcagaacccatgcaccgctaagccacccgagcaccgcctccttccgctcgggcccgccccggagctgcgggtcgctccgagcccattcccgccggaagtgcgtcaccagcttggcgctccgcctccctcggccttagctagaagtcgaaacaaaacaagccgctaaggcggtggcggcggcgccgggacgggggaggggcgcgccggaaccggaaccgacctgcgccggaaccggaacggagagcgggttgccagggcccgaagagggctggctgcggcggtctcgctcggtgagtggagcaggctgcaactcgctggcttggccgcagcggggaggccgcaacgcgcggccgcggcggcctgttcaaggtcacgggccgtgccagtccctacccctagtgccccgcagcgtgccagcccactgatgccggcagggccgttacgctatgcctgtggccagcctcc

SEQ ID NO: 29570 - DNA, 2300 bp, Homo sapien
ccttggagacaaagagagagggggcgacatagtgttgatgaagaggagcagccattgtaggttgtaggtcggggtcagaggaagcgtgaggtggttgttgaggagaattggcaagttcttgggatttccaggctttatgagtatttccagtgagtctgcacaggtggatgtatgattctagagggccacctttatgagactattctgtgcagattctttgttgggctgcccagctgtttgttggcctagcgcagcccaacgcaacccagccatagtctctgctttggccaatggcctggttgctgggagaaggatgggggaggcccagatgatttgtacagggcccctagatgacccactgcacctgtccccactcgcccccaggtacttgatatttcctaatcctgtctgccttgagcctggtatctcctacaagctgcatctgaagctggtacggacagggggaagtgcccagcctgagactccctactctggacctggcctgctcattgactcggtgaataatctcctcttgcccacaccaaccaagatggcagggcccgtggtgtgggacttgagggatagcaggggtctgtggcagaagaggcaggcccatggtggtgccagggtgggcaggcttgtggcagtgctaaggcaagtgctctggcaatgcctacgtggtcccaggtctgaactgcgatcttccttgctcactccttcagctggtgctgctgccccgtgtcctggtgctagagatgtttagtgggggtgatgctgctgccctggagcgccaggccacctttgaacgctaccaatgccatgaggagggtctggtgcccagcaagacttctccctctgaggcctgcgcacccctcctcatcagcctgtccaccctcatctacaatggtgccctgcgtgagtgtctgtgatgtgggttgatggggcagaggtggggacccagcctgacttggcccaaccctcctccccacagcatgtcagtgcaaccctcaaggttcactgagttctgagtgcaaccctcatggtggtcagtgcctgtgcaagcctggagtggttgggcgccgctgtgacctctgtgcccctggctactatggctttggccccacaggctgtcaaggtactcttctgccccttgttccctcctatgcttctctctccttcccattactgttctctctcctccttctggacctgctgctggtttcctcaaactaagtcttggaccctctactctcaacctgggtcagttgtagttctcttccatttcctgaccttcccacctagactcccactactcacactcccctgagaccctcccccacccacactcccctcagaccccctcccctggctctggctcagctctgccttgctcctagcctgccagtgcagccacgagggggcactcagcagtctctgtgaaaagaccagtgggcaatgtctctgtcgaactggtgcctttgggcttcgctgtgaccgctgccagcgtggccagtggggattccctagctgccggccatgtgtctgcaatgggcatgcagatgagtgcaacacccacacaggcgcttgcctgggctgccgtgatcacacagggggtgagcactgtgaaaggtgagactggagcagctatgagtgggttggttggtgggcaggcttcccagggatgacacatttcttcttcctcctccctgcaggtgcattgctggtttccacggggacccacggctgccatatgggggccagtgccggccctgtccctgtcctgaaggccctgggagccaacggcactttgctacttcttgccaccaggatgaatattcccagcagattgtgtgccactgccgggcaggctatacgggtgagtggatgggggcaggcgtgggatcagggtgagttggctgggctgagcactcacagcttcctcttaaccgtgggcagggctgcgatgtgaagcttgtgcccctgggcactttggggacccatcaaggccaggtggccggtgccaactgtgtgagtgcagtgggaacattgacccaatggatcctgatgcctgtgacccccacacggggcaatgcctgcgctgtttacaccacacagagggtccacactgtgcccactgcaagcctggcttccatgggcaggctgcccgacagagctgtcaccgtgagtatgagtgtgggagggcatggctgaattggggttctgcttcttggcctcctcttgactactgtgctcatcttggttggcacaggctgcacatgcaacctgctgggcacaaatcc

SEQ ID NO: 29571 - DNA, 2300 bp, Homo sapien
cctgaagaaggcataaagcagcttcagctgcctgcatggtgcatggctggcctgcaatagggcaggcacagggaacggcttagggtcagatggaaaggtcagggccagaatagggatgttgtggaagggttaaggctgggtccagatcagatcttgactcatgtagggatcagggctagggtcaaggtttagaccagggatcaagtgttgattaggttcagggtttatttaaggttagggctgggtcagggtcagggttgtgatagagactgggaccaggatcagaggttagagccaggggtcagagcctggctcagatgacctgaccccagggttggagtgccgcctgacacagaatgcacaggcactgggcaagaaggcagccaccctgcaggccctggagcagcaggcagctgagctgcttgggcacatgatgtgctttgccaccaataagtatgccacctgctaattactgtctatggaagccattaagaaggactgtgggatcacctgggtaactcaaagtggccctagagtgatccaggaatctcctggccttgggagaccaaagatcctactgagtgcccactgaccctgagtgacccccccatgtggccccacgatgtcccccagtggccctctgaccttgagaaagcagacagatcatgtaactccctgaggccatctagtgtcccagaccttgatacacctttatctctgagtgatctaaaactgtgagactacagtgctggcattctccactcaaaataaatagatggggcctggcactatttactggctcatgcctgtaatcccagcgctttcggaggcagaggcgggaggatcacctgagatcaggagttcaagaccagccaagccaacatggtgaaaccccatgtctactaaaaatagaaacattagctgggcgtggtggtgggcgcctgtaatcctagctacttgggaagctgaggcaggagaatcgcttgaacctgggaggcagaggttgcagtaagcggagatctcgccactgcactccagcctgggtgacagagcgacactctgtctcaaaaaaaaaaaaaaaattaaaattctcagtaatttctagtatccctgatcccccaggttgactacatgatcctcagggtgactggagacctctactccggatatccagaataactcccagcgatgcctaaagtccaacggattgactgacccccacccaaccctcacccaacccccacccccgccgcccccatgctcctttgtgaagtggggtgattcccctgaggaactatcatcagctttcttccctggatggcagctcagggcactccctgccgggactgtggaggcggcaggccagacccagccctaaagaccggaggaccccatgtttcccccagcttcccgttcccagggccctgggtggggcgcgccccatatcccccacccactttcctccttctctccccctccacgccgccgcgcacattccaaccccaggctcctgcgatcccggcaggccaaaaagtctggagcggataaatagccacaagatccggagtcgctcgccgtagctctggtccaccacccagagcctatttccatacagggaaacccgcagcacttctcgtgcctacttaccgtagtgactagtgggggaggcagtgacccccctggagctgtgcttcgggctgggtgtgcactttccccatctctcccccagccccattctgtccagtccctaggactacccgagagccccccacagccctgaataggggcatgtgttgctcctgcttgtgccctccagcctctctgttgatgctggagccctgggatcaaacggctgagttgatggtaatttccacggcgcccatgacgctgaggggaaaaggctacggtctccttggtccagagttggagatcccgaagatctctcatttgctcctgccatgcccccaacttcgtgagccctcttccaaggatagtttaaagcaccaaaccccttaccttcccctggccctcgtataggtgtgggcttgggggcacaataaagatttgtgggtgaagtggtctgtctctggttcctggggcgaaggcagtttccggagggaaggggtagggttggggtgggggcgctctccgcccggtgttgcgctccttcccagaatccgctccggcctttccttcctgccgcgattcccaactttgctcaaagtcgctggactctaagctgtcggagggaccgctggacagacctgggaactgacagagggcctggagggaaacaggcc

SEQ ID NO: 29572 - DNA, 2300 bp, Homo sapien
gagactgtctcaaaaaaaaaaaaaaaaaaaaaaaaaaggaagaagaaggaaaaaaagaaccatataagatgccaaatggaaagcaaagattgggtcctgggatcaccctgtgttctctcccatctcatcctgtctggtcccagttgtgcctgtaggctcagcagccactagagtccaggtcaagtcagactgcactctgatgagcgctcccaaagagttccatctagggcatactgggcaccaggaggcaaaaagttcggccctaccacccccaaagggagctaggtacccccatgatccttatccctaatctctatcatttccccagttctcatgtctggaagggacacagcacagccggaggatggacctacccttcctggttttccatttgccctaacttctgagctgaacatcaccagagaggggtctggatataactgtactgttgctatccctggaggatgggctctggctctccatggaaggggtttctgtttgcacagccatggcccacctgcacacaggaggccaacactgccggctttggagaagctgcagaaggtaactggttgaatcggtcctgaataagtgaacagtcaatcttcaaccatggacggccagagactggactcacccacagctggggactgggggcaccaaggtggggcttcctgactgcaccccatgagatcctggcccctgggaccctactcttgctttctctccaccaggaaaaaaaggctagaagcactgaccccagaggaacaggagattttgcagttcctgctagataccttggctatacttaaaagcagcgaggacctcaccattagtgctgaggccctgggaagctaagaggcaccagatgaggcctatggcactgctgggtggactaggcacttgtctttaggagtgcctggacccctctgtataagcagggaaaatacagagcaaccagaggatcctggttggaaaaagggcaggaaaaagggctagtacccagtccctaaatgaagcatcccgccaccctcctgtgattgccaataggcttccacctgaccccaactaccaaataaggcaccactgcaagggtcagagtccaagagttgtggcaatatttctgcctcctggctcaggctctgaccctagtgcaaatgcccccactacctcatccatgaaaccagggctcccaggatggttcccaacctggacttgcaaacctctgactaatgggacctttggtcagagctgtggagaccactctgacctctcactgaagtcacagacccctagggttgattttgacctgtgtcctataaccaccaccccgtactagcccaagagcatggataaaaagactgaggtcccagactcctaggcaaaaggaaaggggttctgggcagtgttaagactggaagcaggacttccttccattgaggggctgaggctgggccagtgactatacctgcccccacctgcctgagcaagtatactcaggcccacagtggtatactggagcccccagactccatgtgcgcttgggcttgcgtgcaccacttgtgatcacgtgcacaccagcctttcatgccatgtgccacaggccctattctcaggaagagaggaaggcctgctgtcctcggagaagatacccttactgcaaaacaaaggagatcacctgagactccctgtcaggaggcactcctctttcaccctctggtcaggtgtctgggactgaagtgggcattgtcagtggctaaagatagatcagagggtggaagatggcctgaaccttgtcaggagcccctcccagatgtcaatgcaccactagctcccctcagaaaaggtgtcagatgacccctaatccagtcttggccgggctctagtgagtccttgcctggggccgcgtcagagggcacctctgttcttcagacttctgcacagggccgaacgggtttggagcagtcaccgcggccaccacctccaggcagtcctccttggtacccaatctgctccgcccccagactttgtggggaaatggggtctcaggggtcaagggtcggtagggcgggctgggtcccggaagcggaagcgcagtgcacttccggcgcgcagcgggcggccatgttggagcagcggaggcggcgcagaggcgcgtcttgggtccccgcggcggcgccggtaggttggagccgcgggcctagccgcgccgcggaggggcggcccgcgaggcggcagggcggacgggcaagcggccaactcttcccggacccgcgtcctccgccggcctggccgagacc

SEQ ID NO: 29573 - DNA, 2300 bp, Homo sapien
tagtcccagctactcgggaggcttagacaggagaatggcatgaacctgggaggcggagcttgcagtgagtggagatggcaccactgcactccagcctgagtgacagagcaagactccgtctcaaaaaaaaaataaatagataaaaaataaagattctcagaggcaggacaaacagcaggagggagttgaggtcacaaggggcaaaactttgaagatgctagcaagatttagttaaggaccacaggcacatatagttttagctatatggtatttcatgatgacttttccaagaacaatttttggggaggagtggcagcacattgaggtgacaagtaacaaggaggtggagcctgtgaggacagatggcttcaagagtttgactggagtggaggaaggggagactagagagacttggggtgttgggaggtatctaaaggcaagtggcttgtaagtgtttaattgctggaaaggaggaggagggagcttggaaagggaacagtagcaaatgtgaagggggctgcagagcagtgtgagcctcttggaagcctattggcaatcacaagagggtggaaacagtgccccaagtgagggcactgaggagcaagtccaaggtgaagtgggacaaggaggattgaggccttcaagtcagggtctgtgcagtctgtaaccagccttggcaccaccatttctgtgcaggccgactgaatccaactgacagtccctgaaaagagcaaaggctctcttctccggtcatgcgggagggtctacccatagacttctgggaaggccagatgtgagggaggccagggagttaataggtaatgcccccaaacagctctcaacccatgactaatggagatttgagaatgagtatctcagctccccttgttcttgggggcagcaatgatgtaaggcctatgttctacgctggctcccagaatccccagcaggatttggtcccaatggcccacagtggtagcttgcttgatgacacttcctttattggctgctttccttgtctccttgccactgctggtgtttcttggcctcacctcccatactaactatatgcatgtatatctttgtccaggtctgctttgggggaaactaagataagcactgtccatgaaagggggacaaggcagtgagcagacacagacaactgcaaggacctcttcccacaggtaccactgacctgtacaaatgggccctcagcttgaagacttagctaatactctgaatgctcagaagataggcagggccaaggtctgggcctgaggtaggtgggcccctgtcacactagtttgctcttgcttgaccccagaattggttagaggcaagctcaggatactaaaaattgatagttataatgtgccttgggtcccagagtagcccaggtctctcaggccctacaggatgaggccagagtgacccactgggaggtcccctggcctctgactcttccagcacattctctgctcagtatcactccttccaggaattctccccacccaggtttgtagaagggccagtgccttctgttcctccacccccgctagcctcagtgtacactgtaagacctattcctgctttatgcccaggtaagggcgccccaggctgcccccacacgacagaggcccaggccatgtccccagtggcctccagggggcgccgccgggaagcctgtaattgggctcctgggagctccgcggaggtgggcaggcgccggcccctcaagccctcgggttcggctggcctgctcgacacagcctgcgcacccaggctgggtcgggctcagaactgccccttgccatacacgtgttgtgtcgctcgccgctgcctcatttctactcttgcccgaggtcggacgctaaattctgtcaggcccagtgtccaagtgtccgtttatctgtccgtttgcatatgaccgtagatcggcacgccctgctccagctgcggcatgtgcagggttaaggcgagaggaggtttccctgagtcggagggggaggggggcgaggggcggacctggcccagccccgccccgcgccggagcagtgccggagccccgccagagcccgacttcagccccagccagatcccgcgtcaacggaggcggaacggcggaccccgtaccctggcagcatcggagcaccggcgggtgagtcccgcgggaaccgcgctcaggggaagtttggggcgcggggtgtagaaccccaagcgcgttagcccagacccgccccccacatccttgagctggaagtttggggccaagaggccctcctgccaggggtccaggagtg

SEQ ID NO: 29574 - DNA, 2300 bp, Homo sapien
tgaggggaaaggaagggtcctggatggagagtcctgttctagtcaccttactactgccctcctagacccagatttgacccagttgctgagtggtttgggtagtgggtgagaaggagaatccttcatgcctccatgggaaaggggaaaggctcctgggtacctggggcctgccctccttcccactccaggagggcctccacagtggtgtgctagccagaggggttgggttctccccctgcctttcccaccagtgattttgggccagccctgcccttagctacaggctgcttatttgtttcctgaggggccggtcagtgccctgacccctgttttccctctttcctccaggtgaaggcaaggtccctggactggtcatatacctcttgtggccctggcagaatcaagatgaggccctgtcatgcctccccagtgaggcctacagtctgagcagacagcatggcctgccactggcagtgaacaccatgtctgcaggaggtggccgggcctttgcttggcaagtgttcccccccatgcccacttgccgggtctatggcacagtggcacaccaagatgggcacctgctggtgttggggggttgtggccgggctggactgcccctggacactgctgagacactggacatggcctcgcacacatggctggcactggcacccctgcccactgcccgggctggtgcagctgcggtagttctgggcaagcaggtgctagtggtgggtggtgtggatgaggtccagagcccggtagctgctgtagaggccttcctgatggatgagggccgctgggagcgtcgggccaccctccctcaagcagccatgggggttgcaactgtggagagaggtgagtggcctcccaaggaaggcacttcaggtaccctaacaccttttattatttcctgacttagtcccttaccctcagagactgaacaagagctgtaatttttacatgggtgcccaggatgtggccttgtcccctgtatcctttccaacctagatttgagctgctgccttctattaactgccttttctggctaaggtgggaggcagagcccaagccgatcccaggatgatgggagaccccagccatgttcctgccccactcctcatttctaagagatgggggtgggatggcctaatgactcccagggttataaatagtctggggtgggggagaggagtagggccttggctcagagcctgtgcttagacttcctgccccacccccaacccttcccacacgccagggagcctgatatggacaaaggccaagctgatctgggatggttgccatggaagcccccagctgactggcccattaccctaaggcccccagacatgtcgtagctgactctgagggtttaacagagggcaagaacctactataatgaaagagtgtcacacagaggtgctggcagggatcctggggcagaaggcttgtggacagtatctttacccagcagacccaagccattcctctcccagccccatctccaactccagctggtccccagtcctcctccccagactgagctctgtgctaagcagatccccatgtttcttacccctggcttaagccatccccccatcttcctccccgaggggagtccccaccttgtggcctccaggtctgaccaccagcccaggccagccctgcttggatgccagactctgttgccatagcatctccagggagacagagtcggattataattagatcggctgcctcctgctctttactcggaggggccctggccagagtaggaatcccagatctcccagcccccactgcaggcaggtagtagagtgtctgttgctggggagggatgctataaacacatgggtctccagccacccccaggacttaccagggcagctgtcagggtggggtaccctggcaggctgaggtacaatctgaactactcttttctatgcagatggtatggtgtatgctctggggggaatgggccctgacacggccccccaggcccaggtacgtgtgtatgagccccgtcgggactgctggctttcgctaccctccatgcccacaccctgctatggggcctccaccttcctgcacgggaacaagatctatgtcctgggtaagggcctggggaatgtgggaagggggctcagagtctagaaatcctcatcctcataggttggctgggatagggatcaggctcagtccaggatggcaaaacaagagaagctttgttggggtgatccatgcctgctctgaggctctgacccctggtggtcttgctgtggttggaaaaccaaacc

SEQ ID NO: 29575 - DNA, 2300 bp, Homo sapien
cactgcccgggctggtgcagctgcggtagttctgggcaagcaggtgctagtggtgggtggtgtggatgaggtccagagcccggtagctgctgtagaggccttcctgatggatgagggccgctgggagcgtcgggccaccctccctcaagcagccatgggggttgcaactgtggagagaggtgagtggcctcccaaggaaggcacttcaggtaccctaacaccttttattatttcctgacttagtcccttaccctcagagactgaacaagagctgtaatttttacatgggtgcccaggatgtggccttgtcccctgtatcctttccaacctagatttgagctgctgccttctattaactgccttttctggctaaggtgggaggcagagcccaagccgatcccaggatgatgggagaccccagccatgttcctgccccactcctcatttctaagagatgggggtgggatggcctaatgactcccagggttataaatagtctggggtgggggagaggagtagggccttggctcagagcctgtgcttagacttcctgccccacccccaacccttcccacacgccagggagcctgatatggacaaaggccaagctgatctgggatggttgccatggaagcccccagctgactggcccattaccctaaggcccccagacatgtcgtagctgactctgagggtttaacagagggcaagaacctactataatgaaagagtgtcacacagaggtgctggcagggatcctggggcagaaggcttgtggacagtatctttacccagcagacccaagccattcctctcccagccccatctccaactccagctggtccccagtcctcctccccagactgagctctgtgctaagcagatccccatgtttcttacccctggcttaagccatccccccatcttcctccccgaggggagtccccaccttgtggcctccaggtctgaccaccagcccaggccagccctgcttggatgccagactctgttgccatagcatctccagggagacagagtcggattataattagatcggctgcctcctgctctttactcggaggggccctggccagagtaggaatcccagatctcccagcccccactgcaggcaggtagtagagtgtctgttgctggggagggatgctataaacacatgggtctccagccacccccaggacttaccagggcagctgtcagggtggggtaccctggcaggctgaggtacaatctgaactactcttttctatgcagatggtatggtgtatgctctggggggaatgggccctgacacggccccccaggcccaggtacgtgtgtatgagccccgtcgggactgctggctttcgctaccctccatgcccacaccctgctatggggcctccaccttcctgcacgggaacaagatctatgtcctgggtaagggcctggggaatgtgggaagggggctcagagtctagaaatcctcatcctcataggttggctgggatagggatcaggctcagtccaggatggcaaaacaagagaagctttgttggggtgatccatgcctgctctgaggctctgacccctggtggtcttgctgtggttggaaaaccaaaccccagtacctgagggactgtagggtggatgattcatgtgcaagtgtgcacacagcaggatgtgggaggctgaggcaggcagattagcaacctagtgagcaaggagcccaccaagcctcctgggctccttcccaggtaccccaattccattgacagggggccgccagggcaagctcccggtgactgcttttgaagcctttgatctggaggcccgtacatggacccggcatccaagcctacccagccgtcgggcctttgctggctgcgccatggctgaaggcagcgtctttagcctgggtggcctgcagcagcctgggccccacaacttctactctcgcccacactttgtcaacactgtggagatgtttgacctggagcatggtgagcagtggctgttctgggctgtcctcccgctctctgtgggatggaggggcatagtgtgtacatgactagatctgacctcccctctcctgcagggtcctggaccaaattgccccgcagcctgcgcatgagggataagagggcagactttgtggttgggtcccttgggggccacattgtggccattgggggccttggtaagtctctatggggctggggagaggagggagtcccaagacaggaaagactagcccccagcatgtgtgtcaccttctgcccatctccaggcactccaggggt

SEQ ID NO: 29576 - DNA, 2300 bp, Homo sapien
tttttttttttttgagacagtctcactgttgcccaggctggagtgcagtggcgcgatctcggctcactgcaacctccacctcccgggttcacgccattctcctgcctcagcctcccaagtagctgagactataggcgcccaccaccacgcccggctattttttttctttttttgaggtgaagtcttgctctgtcgcccaggctggagtgcaatggcatgacctcggctcactgcaacctctgcctcctgggttcaagtgattcttgtggcttagcctccccagtagctgggattacaggcgtgcgccaccacacctggctaatgctttgtatttttattgattgattgattgattttttttgagaccgagtctcgctctgtcacccaggctggagtgcagtggtgcgatctcagctcactgcaacctctgcctcctgggttcacgccattctcctgcctcagcctcccaagtagctgagactacaggcgcccaccaccacgcctggctaattttttgtatttttagtagagacggggtttcgctgtgttagccaggatggtctccatcccctgacctcgtgatctgcccgcctcggcctcccagggtgctgggattacaggagtgagccactgcgccaggccacgtttttactttttttttttttttttttgagatggagtctcgctctgttgcccaggctggagtgccgtggcgccatctcggctcactgcaacctccgcctcccaggttcaaacgattctcctgcctcagcctcccgagtagctggggctacaggctcgtgccaccacagccggctaattttttttttttttttgtattttttgtagagacggggtttcaccgtgttagccaggatgttctcaatctcctgacctcgtgatctgcccaccttggcctcccaaagtgctgggattacaggcatgagccaccatgcccaggccatttttacttaaaaaaaatgtgttttagacagtctcgctctgttgctcaggcttcagtgcagtggcatgatcatggctcactctaacctcaaactcctggactcaagggatcctcccaccttggcctcccaaagttctgggattacaggcatgagctatggtgtccagccatgttttaatttttatagctttatttaggtaaaattaatacatgataaactgcacatattgaaaatgtacaatttgatgcatttcgatatatgtatacacctctgaaacactgccatcaagagagtaaatatggccaggcgtggtggctcacacctgtaatcccagcactttgggaggctgaggtgggtggatcacctgaggtctggagtttgagaccagcctgaccaacatggagaaaccctgtctctactaaaaatacaaaattaactgggtgtggtggcaggcacctgtaatcccagctacttgggaggctgaggtaggagaatcgcttgaacctcagaggtggaggttgtggtgagccgagattgtgccattgcactccagcctgggtgaaactcctgagagtgaaactccatctcaaaaaaaaaaaaaaagaagaagaagatagtaaatatgttcatcaccccaagtttccttctgcctagtcgtaatctttccttatggcactcatttgcctcaggcaatgccacacctctgctttctgtcactatagattaatttgcattttctcgaattttatataaatgggatcatacagtatgtattcttttgtgtttggctttcactcagcgtaattattttgaaatttattcatgttgttgtatccattgttcattcctttttattgcttagtagttgtccattgtatggatatgccaaatctctcctcttgattttttgaatccatacacaaatcaggttttcatcctcactacatcactgtaactgctcctaccaaggtcactcaaagttaattctaactaatcttccctgaacacatccgcagcatttgtcatagctgatctctgcctcctctttgaagcagttccaagtgccttccagaatgcctcattctcctggtgtctttccccgtctcctgaccaggcttgctccaactccttggctgcttttccttcatctccaaagtcctctaaactggtgtgtcctggggctgaatccaatctcctttccatttatactccattggtgattgcatcctgtttttgtttgttttttgagacagggtctcattctgtcgcccaggctggagtgtagtgacgcgatctcggctcactgcaacctctacctcccaggttcaaacgatc

SEQ ID NO: 29577 - DNA, 2300 bp, Homo sapien
cttggcctcccaaagttctgggattacaggcatgagctatggtgtccagccatgttttaatttttatagctttatttaggtaaaattaatacatgataaactgcacatattgaaaatgtacaatttgatgcatttcgatatatgtatacacctctgaaacactgccatcaagagagtaaatatggccaggcgtggtggctcacacctgtaatcccagcactttgggaggctgaggtgggtggatcacctgaggtctggagtttgagaccagcctgaccaacatggagaaaccctgtctctactaaaaatacaaaattaactgggtgtggtggcaggcacctgtaatcccagctacttgggaggctgaggtaggagaatcgcttgaacctcagaggtggaggttgtggtgagccgagattgtgccattgcactccagcctgggtgaaactcctgagagtgaaactccatctcaaaaaaaaaaaaaaagaagaagaagatagtaaatatgttcatcaccccaagtttccttctgcctagtcgtaatctttccttatggcactcatttgcctcaggcaatgccacacctctgctttctgtcactatagattaatttgcattttctcgaattttatataaatgggatcatacagtatgtattcttttgtgtttggctttcactcagcgtaattattttgaaatttattcatgttgttgtatccattgttcattcctttttattgcttagtagttgtccattgtatggatatgccaaatctctcctcttgattttttgaatccatacacaaatcaggttttcatcctcactacatcactgtaactgctcctaccaaggtcactcaaagttaattctaactaatcttccctgaacacatccgcagcatttgtcatagctgatctctgcctcctctttgaagcagttccaagtgccttccagaatgcctcattctcctggtgtctttccccgtctcctgaccaggcttgctccaactccttggctgcttttccttcatctccaaagtcctctaaactggtgtgtcctggggctgaatccaatctcctttccatttatactccattggtgattgcatcctgtttttgtttgttttttgagacagggtctcattctgtcgcccaggctggagtgtagtgacgcgatctcggctcactgcaacctctacctcccaggttcaaacgatcctcccgcctcagcctccgagtagctgggaccacaggcatgtgttaccacgccggactaattttttgtagagctggggtttcgccatgctgcccaggctggtctcaagcatgttttttgctttctaagtcatctataagcaccagaggcagagttacatagatccttcctgcctacccgcactgtccctgccctcaggccactccagcatccagcaggccagaaacctcagaagatttcttgcctcctttctctttcctccaggggcccggttcgatgtccccatctgcccacggcgcctctcgtgccagctgctccgcctgtcctgcccttgctcagaccacccaagtatcatctgtgctctggcccctggccaccagttccaccccacatgctgtcctcacaggtggcgccttgccattcctggggaccagggcctccttgttctggtcatacacagtggagtgtaggtcgagcgacaagtgagtagatctgcatgccaggtgggccgagggtggccattccggcgtgagtgtgggggtgtgagggaacgttgcatggggtgcacgtgggctgggtgtggcgtgcagcggtgtggcgccaggcaggcagcttggcggggcccacaatcagcgcggttgagaccattagtacggttaaaaccgttagctgcctgtcgcggcgagggcggggccctggggactggacggaatcccagttggtcagaggagaccctgggggcggggccgcgcgagttgccgttaggacagttaaaaccgttagctgcctgtcgtggcggggcggggccctgggacaggacggaatccctattggtcagaagaggacctgggggcggggccgcgcgtgccgttgcagaggcagcgggacgcggccacctcgaagccacgtcagggcagccccaggtcgggcgcgtgccagcagccagaggtggggacaggagggctttgggcagggtgggttggggaaaggcggggggaggggctgaggagccggatggggccgtgggtctgggttcaggataccagcggtcctcccgggctttcccgggacgttggtcttgtag

SEQ ID NO: 29578 - DNA, 2300 bp, Homo sapien
ttctgaagagcagtgggcttatatgggactttggctttccatttttatcttgctgaagtttttgagtttttgcaacacaagtattttttgttatcagaaataagataaaacatttaaaagcatatattttttttctttctttccacccccacccccaaccgagatggagtattgctctgtcacccaggctagagtgcagtggtgtgatctcagttcactgcaacctctgcctcctgggttcaagcaattctgcctcagcctcccaagtagctgggattacaggcgcccaccaccacacccagctaatttttgtatttttagtagagatgggagtgtcactatgttggccaggctggtctcgaactcctgacctcatgatctgcctgcctcagcctcacaaaatgctgggattacaggcatgagccactgcgcctggcctattttttctttcaagtttatcaaactgatgtcccggtttaattttttaagtttacttaggaaatgaaatagaagccaggcacacttgtaatcctagcacttggggaggctgaggcaggaggattgcttgaggccaggagctcaagactaacctgggcaacatggtgagaccccatctcttttttttttttttttttttttttttttttttattgagacagagtctcgctctgtcacccaggctggagtgcagtggctcgatctcggctcactgcaatgcaagctcctcctcccgggttcacaccattctcctgcctcagcctcccaagtagctgggattacaggtgcctgccaccacgcctggctaattttttgtatttttagtacagacagggtttcactgtgttagccaggatggtctcgatctcctgacctcgtgatccgcccgcctcggcctcccaaagtgctgggattacaggcgtgagccaccgcacccagcccttttgttttttgaggagtttcactcttgttgcccatgctggagtgcaatggcgtgatctcagctcactgcaacctccacctcccgggttcaagcgattctcctgcctcagcctcccaagtagctgggattacaggcatacgccaccacacctggctaattttgtatatttagtagagatggctttctccatattggtcaggctggtctcgaactcccgaccccaggtgatctgcccgcttcagcatcccaaagtgctgggattacagatgtgagccaccacgcccggcctgtgagaccctatctctaccaaaaaaaaaaaaaaaaaaaaattagctggacatggtggcgtgcacctgtggtctcagctacttggaaggctgagatgggaggatcacttgagcccaggagtttgaggttacagtgagctatgattgtgccactgcactccagcctgagtgacagaccaagaccttgtctcttaaaaattaaaatgagaggccgggcgcagtggctcatgcctgtaatcccagcactttgggaggccgaggtgggcggatcactaggtcaggagattgagaccatcctggctaacacagtgaaaccctgtctctactaaaaatacaaaaaaaaaaaattagccgggcgtggtggcaggtgcctgtagtcccagctacttgggaggctgaggcaggagaatggcgagaacccgggaggtggagcttgcagtgggccgagatcgtgccactgcactccatcctgagcgacagagtgaggcagagcttgcagtgggccgagatcgcaccactgcactccatcctgggcgacagagcgagactccatctcaaagaaaaaaaaaaaaaaggccgggcgcggtggctcacgcctgtaatcccagcactttgggaggccgaggcgggcggatcacgagatcaggagatcgagaacatcctggctaacatggtgaaaccctgtctctactaaaaacagaaaaagttagccaggcatggtcgcgggcgcctgttgtcccagctactcgggaggctgaggcaggagaatggcatgaacccgggaggcagagcttgcagtgagccaagatcgcaccactgcactccagcctgggtgacagagaaaaactccgtctcaaaaaaaaaaaaaaaaaaaaaatcagggccgggcgcagtggctaacgcctgtaatcccagcacttgggaggcccaggcgggtggatcaaaggtcaggagttcgagaccagcctggccaatatgcaatatggtgacaccccgtctctactaaaaatacaaaaattaggtgggtctggtggcacgtgcctgtagtcccagctgtcctggaggctgaggca

SEQ ID NO: 29579 - DNA, 2300 bp, Homo sapien
gcgttaattacaattacactgcctgtctctggggatcatcagaaaaagatactgtttcttaatttattcctaaggcttaaaaaaaaaagttaggccgggtgcagtgactcatgcctgtaatcccagcactttgggaggctgaggcaggtggatcatgagatcaggagatcaggatcatcctggctaacagggtgaaaccccatctctactaaaaatacaaaaaactagccgggcatggtgacaggagcctgtaatcccagctactcgggaggctgaggcaggagaatggcgtgaacccaagaggcggagtgacccgagatcacgccgctgcactccagcgtggacgacaaagcaagactccatctcaaaaaaaaaaaaaaaaattaactactgtgttcctgccaggtttggtgagggtgacacagcccaagcatccaagcatgtccctggaacaatcaacatctttggctcctcagatgttcctggaactgtatgtggctacccaggggcagatgtggtgggaggcctatgggcctgaggcccaaaaagccacacagggccaggcgtggtggctcacgcctgtaatcccagcactttgggaggctgagccgggcgaatcaacgaggtcaggagttcgagaccagcctggccaacatggtgaaaccccgtctctactaaaaatacaacaaattagctgggcatggtggcaggtgcctataatcccagctacttgggagactgggacaggagaatcacttgaacctgggaggcagaggttgcagtgagctgggatcgcgccacggcgctccagcctgggcaatagtgcaggactgtctcaaaaaaacaaaacaaacaaacaagccacccaagggcttctccctctgatacaactctggctacagcccaaggatggaaatgaagctgattgcagtacctaattttcttgacattcacaggtatctatctatctatttatttatttattattatttgagatggtgttttgctcttgtggcccaggctggagtgcaatggtgcaatcttagctcactgcaatttccgcctcccgggttcaagcaattctcctgcctcagcctccagagaaggtgggattacggcgcccgccaccacaccagctaatttttgtatttttagtagagatggggtttcaccacgttggccaggctagtctcgaactcctgacctcaggtgatctgcccaccttggcttccaaaatgctgggattataggcatgagccatcatgcccagccaatttctctttttcgtgtttttgcctcagaagctccaaagggctcctgttgaggggcctcctacaagatgctttctttcccaggtcagttcccagcaactcctctcacccaaagtgcccagaaaacagcctgtctactctcaaaaaagatagttgcagcctggcgcggtggctcatacctgtaatcccagcatttagggaggcagaagagggagaatctcttgagtccaagagtttgagaccagcctcagcaacacagtgagactctgcctctttttttttttttttttttttgagacggagtttcactcttgttgcccaggctggagtgcaatggtgcaatcttggctcactgcaacctctgcctcccaggttcaaacgattctcttgcctcagcctcccaagtagctgggattacaggcacccacaaccacacccagctaattttggtatttttggtagagatggggtttcactatgttggccaggctggcctcgaactcctgaccttgtgatctgcccacctcagcctcccaaagtgctgggattacaggcgtgagccaccacgccaggtctgactctgcctctattttaaaaaatggtagttgcttcctagaagttagttttgactttttttttgttttttttgagacagagtctcactttgttacccaggctggagtgcagtggtgcgatctcagctcactgcagcttcgacctcctggactcaagccatcttcttagcctccagagtagctgggattacaggcgcccgtcaccacacccagctaacttttgcatttttagaagaggcagggtttggccatgtgggccaggctggtctcaaactcctgacctccagtgatctgcttggctcagccttacaaagtactgggattacaggcgtgagccattaggcccagccacactgggctaatttttatattttttgtagggatggggtttcaccatgttgcccaggctggtcttgaacccctgggctcaagtgatcggccttactcagcctct

SEQ ID NO: 29580 - DNA, 2300 bp, Homo sapien
ctgctgtcccatgtgctcctgagaatgagaaccctgcctttgcaacaaaccatgccccggtaaatgcaaaaccacatgctctgtgccccgagagaaaacctctaaccagcaaggaaaatgtattgatgcattcctccattttggcacctgaaagagagtcttggagaactgcaggagagggggaaaactggagaaaagaaaatttaaggtgattctaattttgatggtttaacagctacaattaaggggattcttgtttctgaaaaagttgttgaagatcctagatttagttcatgacagtgctcttgcctcctcttggcagctctgtgactgcatttggggagttgacagacattcttcagaatctggcctaggaaacagttatattttgtgtatatgttccagttgaggggctagttgtcaatcgttgatgtcaaaaaccagtcatggaaaccactttgcagtacccaaaggggtagtggatgtaaaataaccgggttttaaaaataaccttattttttaagttgcagaaacaaaagtcttaattccatcttaactcctgtgtttgaatctggacactggggcctttgataccctcctttgcccacattagggagaggcttaattgaaggctgggccctacttcctggcttcatctttgcctctgctccccgctcttaccccagatctttttggaccatcaccaggtctcttctagactttttcttctcccgagtaacttgaaattgcctggtcccaggcaccttgacttggagaagggatgaatgtatgagatgaaacttcaggccgggcgcggtggctcacacttgtaatcccagcactttgggaggccgaggcgggcagatcacgaggtcaggagatcgagaccatcctggctaacacggtgaaactctgtctctactaaaaatacaaaaaattagccgggcgtggtggcgggcgcctgtagtcccagctactcgggaggctgaggcaggagaatggcatgaacccgggaggcggagcttgcagtgagccgagatcacgccactgcactccagcctgggcgacagagcgagactccgtatcaaaaaaaaaaaaaaaaaaaaaaaaaaaaacttcaaagttctgccatcttggctgcttcataggaaggggataaagaggccatttaattggttcaactccacaagaatttttttcctttcaactccacaaatatttatattggtactcataagcagtgcaggccttgccgggtgtggtggcacgcctgtaatctcagcactttgggaggctgaggtgggtggatcgcttgaggtctggtgaaaccccgtctccactaaaaatacaaacataagccgagcgtggtggcgcgcgcctatgatcccagctacttgggaggccgaggcaggagaattgcttgaatcctggaggcagaggttgcagtgagctgagatcttgccatggcactccagcctgggcaacagagcaagactccatcttaaaaaaaaaaaaatgctgggcacagtggctcacgcctgaatcccagcactttgagaggctgaggcggatgaatcacctgaggtcaggagtttgagaccagcctggccaacatggtgaaaccccgtctctactaaaaatagaaaaattagctgggtgccgttgcggccgcctgtaatcccagctgctccagaggctgagacaggagaatcgcttgaacccaggagaaggaggttgcgatgagccgaaattgcgcccttgcacaccagcctgggcgacaagagcaagactctgtctttaaaacaaacaggccaggcgcggtggttcactcctgtaatcccagcactttggaagactgaggcgggcagatcacctgaggtcaggagttcgagaccagcctggccaacatggtgaaacccccatctctactaaaaatacaaaaattagctgggcgtggtggcaggcgcctgtaatcccagctactcaggaggctgaggcaggagaatcacttgaacctgggaggcagaggttgcagtgagccgtgattgcgccattgcactccagcctgggggacaaagcgagacttcatctcaaaaaaataaataaaaaataaaaataaataaataagtaaacaaatgcaggctgggtgaggtggctcatgcccgtattcccagcactttgggaggctgaggcgagtggatcgcctgagcccaggagttcgagaccagcctgggcaacatggctaaaccctgtctctaaaaaagaaaaaaatttaatacagtctgcgatgctcgtgagtc

SEQ ID NO: 29581 - DNA, 2300 bp, Homo sapien
aatagctctgttttttctattagtttcccaaaattatagtttaaaatcttggtccctgacagctccatttttagccttttgatcctttttgagaaggaacagattagaaaagaaggtgagttgttttttggttgttaagacacacactgtaaacttttttaatttcaggggttttgttttggggatttttgtgtttatttagtgcaagcctaataagctagccagattaattctctggagaccgctagagtattttctttgttgacttggcagacactgcatatgcgaagaacaaactgaatggtaaatggtattactttgatgatagcaacgtgtccctggcctctgaggatcagatagtggtgagtaggccatgatatgtggttcttcctcatgtcgttatggattaaagctgggaagagcctctatcaggctagttggttatttcatcatcctgatgtgatagtgggagctaggtgtgacagagctggctggcattccttcagggaccttcataaatgagaagctcagctctcctcagagttctctgcacaaggctccttccatttcctgctgcctggcaggggcagccatcctcaggtggaagggtctcctctgtgtggatatggcagatccttgagggttttggacagctagagaaaagctggggaaaatgggtgatttttccaagcactgaatggtctttccccctcttgtatttcagactaaagcagcttatgtgctattttaccaacgtcgagatgatgaattttataagacaccttcacttagcagttctggttcctctgatggagggacacgaccaagcagctctcagcagggctttggggatgatgaggcttgcagcatggacaccaactaatgctgactccacgatcctgccaccctgtagcgccagtgtaatcccccaggagaacatctttgacactctgcagactgctagtgttctgtctaaaaaccagacaaggaaatacccttcttttatgagcagaaggaaacaaaaaaaaaaaaagaagaccgtttacctagaagaagctatgtcaagaggctgaattatttttatttttaaacaggtggtgagaaatttctgtgaaacctgtgaagctgaaaagggggtgggatgggggtactcaatggagtatgtctgatggatcccgaagaatggagaggaacacaggcgctgagtatggagcagcctggagacccaccccacctgcagggctgccctgagcgcctggatttctggttctgatgccaatactagtcaccccaagtagtctgctcacagtaacccaaacctcaagtaaactcccctttccctcgctatgtgcactgatatgggtttataattttctgaaagttacccactgaagcccatttctccgttgagtcatcttgtaatttccagctttctccccgctaaggaagatatctagtgttggggatcctggcccctcaacctcctgtggaacccagcagttctgttatatcccctgctaccctagatgaattaagacggttaaatactgtgtggaacttttattagataacacactttttattagataacgcttaaaggaagtcagtacataaaactgcccggtgctgtgtcccgtctagttgtttccatgttggcttgagaacagaaatctttgtgggagttagccgggaaagggctccagttcatggcgatttagggtagtaatacattttggtgttacccagatgctttctagaacgggttctttcctcatccctgccaagactcttcccggggcccccattcgaaagccccgtccccactcccaccgcggggccagccgctgcgtgtgggcaaggccttaaggaaccggacgtatgggtccgggattttttgtctgaccttcaacctaatccgtgggggtttggggcctgcgcggggcacgcgcatgcgatgaccgttggatgggtcggcgtcactgcgctgcgggtgaggacaaggacgtggctgccgactcgccaaagggggggtgccggtagggccagcggcctgggagccgcggtggggcgggaggcagcggcggggcgggccaggaagctgtgggaagtggggcggggcgtctttggggcttctggcagatggcgggttcctccgcgagagccgagaaccgcctactccaggaggaaagcccgagggttgtgggtcctgctatagccagggccaagctccaggaaatcgtggccattcaggggtagtttgcagcctcatttgtaacattattgtgttgtcctgtgcattt

SEQ ID NO: 29582 - DNA, 2300 bp, Homo sapien
gatcacaggtgtgagtcaccgtgccctgcctgtgttcatttttatttgctaatttttgcacacaaacataccatttgggcaagtttctcatcctcagttttctcatccatgaggttaggctggttgtgtgagggtccacattgggcctacagttggaacttcaaaattgaaagccaccgttgctgctattgtgtcaagcacagactgtgtgaactggccttgggcaccttctctgttgccctttcccatgatcctcaccaccactttgtgcagtcaatgctatagtgaggaaactgaggctgaagtgttaaacaccttacctaaaaccacacagtaagttgacactggatatcagatctccattgggttctgtagtttctgagagtctgggtggagcaggaactgggctgggattgctgtaataaacacatcctgcttgggaatagtgtaaagtcaagacaagaagcattgcctctgggaaatgcttgaatcattgtgggaaactgttacctaaccacagactctggactcctagttttagagaaagataaatttttttttttttggatatggagactaaggtatgttgttcacatcccagctctgcaaacccaaacacccaatgttcctctaactgggattattctgtaggctcccgaggcactaagcattctgttgatgttagtagccacctgcctagatgcaatgggggagactgacttggcatgtccttgtgagagctattgttttgcttaaatcttagaagtttcagctccttttatgggttccctggttttggattattgcacatagccatcctgaagattggcactgaatagctctgttttttctattagtttcccaaaattatagtttaaaatcttggtccctgacagctccatttttagccttttgatcctttttgagaaggaacagattagaaaagaaggtgagttgttttttggttgttaagacacacactgtaaacttttttaatttcaggggttttgttttggggatttttgtgtttatttagtgcaagcctaataagctagccagattaattctctggagaccgctagagtattttctttgttgacttggcagacactgcatatgcgaagaacaaactgaatggtaaatggtattactttgatgatagcaacgtgtccctggcctctgaggatcagatagtggtgagtaggccatgatatgtggttcttcctcatgtcgttatggattaaagctgggaagagcctctatcaggctagttggttatttcatcatcctgatgtgatagtgggagctaggtgtgacagagctggctggcattccttcagggaccttcataaatgagaagctcagctctcctcagagttctctgcacaaggctccttccatttcctgctgcctggcaggggcagccatcctcaggtggaagggtctcctctgtgtggatatggcagatccttgagggttttggacagctagagaaaagctggggaaaatgggtgatttttccaagcactgaatggtctttccccctcttgtatttcagactaaagcagcttatgtgctattttaccaacgtcgagatgatgaattttataagacaccttcacttagcagttctggttcctctgatggagggacacgaccaagcagctctcagcagggctttggggatgatgaggcttgcagcatggacaccaactaatgctgactccacgatcctgccaccctgtagcgccagtgtaatcccccaggagaacatctttgacactctgcagactgctagtgttctgtctaaaaaccagacaaggaaatacccttcttttatgagcagaaggaaacaaaaaaaaaaaaagaagaccgtttacctagaagaagctatgtcaagaggctgaattatttttatttttaaacaggtggtgagaaatttctgtgaaacctgtgaagctgaaaagggggtgggatgggggtactcaatggagtatgtctgatggatcccgaagaatggagaggaacacaggcgctgagtatggagcagcctggagacccaccccacctgcagggctgccctgagcgcctggatttctggttctgatgccaatactagtcaccccaagtagtctgctcacagtaacccaaacctcaagtaaactcccctttccctcgctatgtgcactgatatgggtttataattttctgaaagttacccactgaagcccatttctccgttgagtcatcttgtaatttccagctttctccccgctaaggaagatatctagtgttgggga

SEQ ID NO: 29583 - DNA, 2300 bp, Homo sapien
tttctatcaccctgaaatgttgtctgtttaagaaattgacaggtcttggatatctcaaatgatttgtatggatttttgccctttttaaaaataaataaataaatagagacagggtcttgccatgttgaccaggttgatcttgaactcttggcctcaagcagtcctcccaccttggcctcccaaagtgctaagattacaggcatgagccatcaggcccggccgatttttgcccttttaagctcaagaaaatagataagttatcaatgaatagttactgagaagaggagtgccatactatatatcttgaggttctgtgcatcagaatttgaatttcagtattctgtcttacctccctcagtgctgagatgactgagtctgccattgcatatcagaccagccttgggcagcagactttctttatgcataagaggctaggaaatcacattggacatctcactggacaggattgaacacatgcatgcttaagtctcccatgtggtgaatgagagtacccttggctgtggtgaatctcacttagtgcagctgcttgagttcttggactcctttgcagcatgaggatgaagctgtgtgaaccaaatcctctttaggattagagaagggtacatttccttatgggaaggtgagagactgaggagccctcattctcccttactgtgactgcattgtggagcaaacctcagttcaggtacctgcttaggccctatataatttcttgatgtgcccattgctggtatacaagatcatacttgtttttgctgccatgtttttcttctcacagggaagccaagttgagatcagatcccatgagggtgaacactgtgtgggaacagtacatcttcttagtcattttctgtattctaaaaataacccagtattctataagggaaataccagttttatatttgaaacaatggaggaggattcactttcttctttggctgagcgcagtggctcatgtatgtaatcccagccctttgggaggctgaggcaggagggttgcttgagtccaggagtttgagaccagcctgggcaacataaggagactgttgctatggattaccaaaaaaaaaaggtaaaaattaaaaactttaaaataagatttactttcttccttatgtccttatatagattctagcagattgatgaaattgatagcaatttaaaatttgggcaattagcccttgaattaatttgaaagtagaaatctaaaataagagcctgaaaaatattaaaacatgagtttgaaacagagaggttacactggcaaatttgaagaaacaaaattctccatagaaggcgtagtgaaaccaaattgccatttttctgttctcatgtccttatatccagctatttaatttgcatccagcctttttggggaaagtcatctcttattgccatttttctttttttttttgagatggagttttgttcttgttgcccaggctggaatgcaatggcacgatctcggcccactacaacctccgcctcctgggttcaagcagttctcctgcctcagcctcccaagtagctgggattacaggcatgcgccactaggcctggctaattttttttatttttagtagagacggggttccaccacgttggtaaggctagactcgaactcctgacctcaagtgatccacccacctcagcctcccaaagaggtgggattataggcgtgagctacctcgcctggccttattgccatttttctttgcctttcactaataatttttaaaattcagggaagcagtccagatgtggtggttcacacctataatcccagcactttgggaggccaaggcaggcagatcacaaggtcaagagcttgagaccattctggccaacatggtgaaaccctgtctctactaaaaatacaaaaaaattagctgggtgtggtggcacgcgcctgtagtcccagctactcgggaggctgaggcaggagaattgtttgaacccgggaggcggaggttgcagtgagccaagattgtgccactgcactccagcctggcgagagaatgagactccgtctcaaaaaaaaaaaagaaaaaaaaaaagaaaaaaaatgtagggaagtttatgatttgtaaatcaaaccaggatgcttgaagatgaaccttgtggggttttttttgttgtttttttttaagagacagagtctcactctgtcacctaggctggagtgcagtggcacgatctcggctcactgcaacctccgcctcccggtttcacgcaattctcctgcccctcagcctccccagtagctgggactacaggca

SEQ ID NO: 29584 - DNA, 2300 bp, Homo sapien
accctcagccattttgtctctgcttcaaaacttcctataatgcctgcctgccttttaaggcaggatatatggtctgtctggcctcctttctagctttagatccccttaggctgttgtagcgttgtagtgcccgcctcaactggcctaatccccactctctgatcctgtcctgccttttccagaaattatcttctggtcccttgagtctcccctcctgtaacatgcatcctcatctttattctgccagcattttttttcaataccacactcaaatgttactcaagtcaaaggcttcctatgagagcaggggttgtgcctggcgttctacagcctttggttcacacccccttttttttttagagggggtcttgctctgttgcccaggctggagtgcagtggcgcaatctcggctcactgcaacctctgcctcccaggttcaagcgattcttctgccttagcctcccgagtagctgagactaggtgtgggccaccactaacggctaatttttttttttttttttgtatttttagtagagaaggggtttcaccatattagccacgctggtctcgaactcctaacctcgtgatctgcccgcctcggcctcccaaagtcctaggattacaaacatgaaccaccgcgccggacgcccggtctttttttttttttttttttaagacatttcggtctccacgttggtcaggctggtctcgaatgcccgacctcaggtgatcctcctgcctcggcctcccaaagtgctgggattacaggtgtgagccaccgcgcccggccggttcacaccctttatttgtatttatttttttttttttgagacagggtctcactttgccgtccagtctcaagtgcagtggcgccatctcgactcactgcaacctcgacctcctgggctcaagggatcttcctacctcagcctcccaagtacctgggaccacagacgcgagccactgcccggctattttttgtatttttttgtagagacgggatttcgctatgttgccgaggttggtctctaactcctgggctgaacctatccttccgcctcagcctcccaaagtgctgggacgacaggcttgaaccaccgcgcccggcctggttcacacactttaatggcacttaccacatactgctaggcattgaggttatttctgtaacatctcttcttttctactagattctatgagggcaggaactaggtcttatttttctctgaggacaaggactgttagacaagtgtatggagacgcatctagaccaactgcctgacttcctctttcctctgggtttacttctccctccaagaggagggttgtgtgtgtgagcggggcgactggaaaacatagtgttcaggacgttgtatcttgttccaggaactaagtacacgcctgggtaactaatgtggagtacctctccttcccctgttgctatcgcccctctgtggctgcttggcaagtagctcagtatgaagagctgacggaattctgcggtgggccaggtggctctggcgtcgactgtttaaggcgactgttaatgactacaacacaccattgagtcttggtcccaaggcgctggtgcacatggtacttcccgaaatccctgtagggccgctggagcaggagccccgatcccacgtttgggcagctgactcgcctaaggcctccagctgaaagcggaattgcaggggtgagaatgagcagacctaactaccgggcttctcgcacctggcctgcatttatttaggaccacgataacctcgaaggccaggctggggtgcccgatgggtcgtgggcttgctgcctaactccctgagatcggcgggctgaacagagcttcgaagtgtagcgccatcctgagcagaggaaggggcgcccgaaggccgcgtagcgggcggcagggcgggaggaagtagcagctgctgctccccgcccacccctctcgcgtgtgcctttccgctccactgttcgccggtgagctaggtggcgcgagagcggaggggagaaaagacagcggctgcaggagccgaaggccgcggctcgaggtggggcaggggcgggcacgcgagcgtgcgtgcgtgggcgcggtctatagcacgccgcgcgcggggcggatgtccgggccggctgggccggggccgcggaggagatggcggaaggtggaggctgccgtgagcgaccggatgcggagactcagaagtccgagcttggacccttaatgaggaccacactccaacgcggggcgcagtggtgagctcccggctcgctcttcctctatgcagaaccagggg

SEQ ID NO: 29585 - DNA, 2300 bp, Homo sapien
cacttggtcaggagttcgagaccagcctggccaaaatggtgaaaccccatctctactaaaaaattacttgggcgtggtggtgggcacctgtagtcccagctactcgggaggctgaggcgggagaatcccttgaacccaggaggtggaggttgcagtcagctgagatcatgccattgccctccagcctgggcgaccgacgagcaaaactgtctcaaaaaaagaaaaaaaaatcttttagatgaatttgaatactttttacttactatatgtatgccacactattagctaaaaggactatttttttttctttgctaggagccggtgaaacctgaagaaggcagagatatggcaaacaggattggcgcttttgggtacatggagtgttcagcaaagaccaaagatggagtgagagaggtttttgaaatggctacgagagctgctctgcaagctagacgtgggaagaaaaaatctgggtgccttgtcttgtgaaaccttgctgcaagcacagcccttatgcggttaattttgaagtgctgtttattaatcttagtgtatgattactggcctttttcatttatctataatttacctaagattacaaatcagaagtcatcttgctaccagtatttagaagccaactatgattattaacgatgtccaacccgtctggcccaccagggtccttttgacactgctctaacagccctcctctgcactcccacctgacacaccaggcgctaattcaaggaatttcttaacttcttgcttctttctagaaagagaaacagttggtaacttttgtgaattaggctgtaactactttataactaacatgtcctgcctattatctgtcagctgcaaggtactctggtgagtcaccacttcagggctttactccgtaacagattttgttggcatagctctggggtgggcagttttttgaaaatgggctcaaccagaaaagcccaagttcatgcagctgtggcagagttacagttctgtggtttcatgttagttaccttatagttactgtgtaattagtgccacttaatgtatgttaccaaaaataaatatatctaccccagactagatgtagtattttttgtataattggatttcctaatactgtcatcctcaaagaaagtgtattggttttttaaaaaagaaagtgtatttggaaataaagtcagatggaaaattcattttttaaattcccgttttgtcactttttctgataaaagatggccatattaccccttttcggccccatgtatctcagtaccccatggagctgggctaagtaaataggaattggtttcacgcctgaggcaattagacactttggaagatggcataacctgtctcacctggacttaagcatctggctctaattcacagtgctcttttctcctcactgtatccaggttccctcccagaggagccaccagttctcatgggtggcactcagtctctcttctctccagctgactaaactttttttctgtaccagttaatttttccaactactaatagaataaaggcagttttctaaacttcctgtatcctgttgtttgtgttgctctctccagggctgggggtaggaggatgcaaggacttcctggcctagctcaccctggagaggtttgttgagtgcaaaggactagcttgtgccccacctcccacccacccagcagctaatctggtccctcccaacaacatggaaatgattaccctgtaccgcattctggttcagatttgggggtagggtgaatgcagcctgaggaggccagggagggaggactccggcagcgtttccttggcctcggcgagctactgggctccacttaaggaggctggggcagagcttccaggactctgcccggttagaaaacccgcacgagggcggtgccgctttggagacagggaggagggagaccggaagcctagatccctctggctgtcccctgcactgccggtaacatggcacaggagaggagggctgtttgtgcacgggcagctcctgcagctgctgccgtcgcccaccagcctcctatgccaaaccccacatcctaactcaggaacctctgagaaaaaacggagccctcgagggccccagcccttggaagggtaacctggaccgctgccgcctggttgcctgggccagaccagacatgcctgctgctccttccggcttaggaggagcacgcgtcccgctcgggcgcactctccagccttttcctggctgaggaggggccgagccctccgggtagggcgggggccggatgaggcgggaccctcag

SEQ ID NO: 29586 - DNA, 2300 bp, Homo sapien
ttacaggcctgatgagccactgcacctggtctatttatttttatttatttatttatttatttattttgagacggagtctcgctctgtcgcccaggctggagggcagtggcacgatcttggctcactgcaacctccacctccctggttcaaggaatttccctgcctcagcctccctagtagctgggattacaggtgtgcaccaccatgcccagttaatttttttgttttgttttgttgtttttgagacggagtttcgctcttgttgcccaggctggagtgcaatggcacgatctcggctcactgcaacttccgcctcccgggttcaagcgattctccagcctcagcctctcaagtagctgggattgcaggcatgtgccaccacgcccagctaattttgtatttttagtagagacggggtttctccatgttggttatgctggtctcccaactcccgacctgaggtgatccacccgccccggccttcacagtgctgggattataggcatgaaccactgcgcctggcaatctttttgtatttttaatagagatggggtttcaccatgttggccagactggtctcgaactcctgacctaacgcgatccacctgcctcagcctctcaaagttttgggattatagacgtgagccactgcgcccagcctatttatttgtttttaagagatgaagtctcactttgtcaccctggctggagtgcagtagtagcgtgatcatagctcactgctaccttgaatcctggactccagtgatcctcccacctcagcctctcaagtaggtgggaatgcaggcacatgtaccactgtaaactgctaagtttttgtatgtttttgtggagatggggtttttgacttttttgatacagagtctcactctgttgcccaggctggagtgagtgtagtattgcgatctcgactcatcacaacctccacctcctgggttcaagtgtttcttctgcctcagcctcccaagtagctgggactataggtgcacaccactgcgcccggctaattttagtaattttagtagagatgaggtttcgccatgttggccaggctggtctcgaactcctgacctctggtgatccacccacctaagcctcccaaagtgctgggattacaggcacgagccaccacgctgtctggagatggggtttagccatgttgcataggctgttcttgagctcctaggcccaagctgtctacttgccttagcctctcaaaagtgctggaattacaagtatgagtcaccacgcccagcctcttttggttattttcaaaagtcacttttttttatttgagacggagtcttgctctgtcgcccaggagtgcagtggcgcgatctcagctcatggcaagctctgcctcccgggttcacaccattctcctgcctcagcctcctgaatagctgggactacaggtgcccaccactacacccggctaattttttttgtatttttagtagagacggggtttcactgtgttagccaggatggtctcgatctcctgacctcatgatccgcccaccttggcctcccaaagtgctgggattacaggcatgagccaccgctcccggccaaaagtcactcttcagccatttgaaataccagtaaaccccatagggtagaagttatgctgagagttgatgaacaagttagaaaaagaacatgtggaccctgggtcagctgctgccctagaatggggaccccttctgtaagctatgtcagaatcatctaccagcagtgacagatgtcctgtaaagtgcctgcctttgtggggcaggaagtgccccccgtgaaactaccttgtgttgtggatcttttgctcctccagagcccttactcgggccccacctacagagatgctcagcaccactcttggctggactgagaaaaagctgttggttctctgtttaaaggaaagggattatatttcctttttatggttttgaaactagtgagtttcattaaatgtctagcatttttctgaagccacaaagaaagtgtctctgcaatttcactgaggttcttggaaagtcttcaagatagaattgtatgtatccccaaattctctacatttttctttcagaaaacatcccagaaaagtggaccccagaagtcaagcatttctgtcccaacgtgcccatcatcctggttgggaataagaaggatcttcggaatgatgagcacacaaggcgggagctagccaagatgaagcaggcatgatctggggcaggactgtcttgtagtattcttgaactagggccccaagtttggaggtttgggga

SEQ ID NO: 29587 - DNA, 2300 bp, Homo sapien
ctcccaaactattcaccatcaacaaggtttaaaagaagaaacaatggaataagctagaagtcctgaattttagctgactctggaggccaactgcttgggagtaaatggagaataccttaacagagcagacagttctggtctgctcctgactagataggtaaccttgggaaatttacttaagtctctgggactcagtttgctcatctgcaaatggggttggacaaccagtcctgaaagattcctcttagatctaaaactcaagaactacacagtattcctactctcttcttccctccaacacagatttttatgagaacagagaggataaatctagcactagactttaactcaaaccaaggtgcaccttatatatttaatgtccccaagagccatcagtgctccacaaaagtagatggaaccaattaagacaagttatccagagatccttcaataagtcattctttacaattaaaaactagtttttcagtccaatgtcacttgtgccaaatgctcaaaacagtatctccgccaatctagccacatctaaggtgacaatcatccgcatggtacacattacacatctgggtgatactaagtggttgaaaaattctctccacatacaacattttaaattatggaagttttttggtttttcaatttttctccttcagaaaggcagagtgaaatatctacttacacacctgcaagaaacgtttaagactttcttcaagacagaaccaaacaagtcaacaacagaggtaaaaatttaaaatcagaactattaaaaaacacaagtggaaccaactttgaggtaaaaaggattccaattttccaccgtaaactactaaacaaggtttgtgaacaaatcaacttggatgcgaatagcgctattcaatgaagacgacccgtaactgtagatccaatcagtaactaaggtacagatatttagatcattcctaatcaatacagcgacttcgactaagcaacattgcatctattttcatgcaacatcgcttaaatcatttacagttttgtgtgttgttttttttttccaaatggaaaataccccttttccactcaaaacagaccccaaagctttcagacgagttcgggcgcgttccaggtggtatggccgtagatcatacccctaagcgttcaatacaatcttttacttacttacacagtctccaacaagtctgcattaaaagaaaacctacccaaagtgtaactggactttaatcaatatgaaacagtgattgtcgtttctcgttaaacgtaaaaagcaaaatggagttgtaaagagtttctttcccatttcaactccgacagccacgcgcgctttcagcggccggctacactgcgcggtcgcggggcccggcccaaagcccccgccctgcccggcgccgctgggagaggaagctccggggaccgagggcgggcaggcgggcagcctgggctccaccaggcccggccgggcgggggaaggggcacaggagactaccgggcgcgcttccggggactgcgcgggcggggtcgccgcttggggcgcggggcccgggctgggagtcaggtcaagggtcaggggccaggggcggctcggccacgagcagccggtggggcgcggccgcggcggtgcggcggcctgccggccggaagagtaccgggctggcgggcctggggccccgcggcgcctggagggaacccttccgctcacctcaggcaacgaatccgagtccagcctcttcgcgccggggacgccggtccgcgagtcgcaaactcggagacgaaggcgggtagctgaagaccagaccgtggactaacgagagaaccgacggaggaccgcgggcggcgggagggtagcgcgagagagcgagggcgggcggcggcgggagggcggggaacgacgtgcgcgcctccgagtgcccagcgggctcgagccggcacaggtcgcggccccgcgcacgcgcgcgcactcacagctcatccactattgctcaggagcccgtccacgccctaaaagcaaaacccttaaccaatcattgcagccgcgtggggcatcacgggaactccggggctataaaagacctggttgctattttgtactcccggagtcactcatcccttaagcaagcagggtggggttaggtgcgcgtgcgcggttttaatactcctccccgaactgccaactcttcacgcacgcgaagtaggccccaccctggctgggtttacgcgtgcgcactaacgggcctggtcccggaagaccacacgcgtgcgtggtggggactacggtgacagtaccc

SEQ ID NO: 29588 - DNA, 2300 bp, Homo sapien
tctgggctcactgcaacctctgcctcctgggttcaagtgattctcatgcctcagcctcccgagtagctgggattacaggcgtatgccaccatgcccagctaattttttctatttttagtaaagacggggtttccctatgttggccaggctagtctcaaactcctgacctcaagtgatccgcccatctcagcctcccaaagtgctgggattacaggcatgagccatggggcctggcctcttctctaagacagaaacctgggcagtggcagcctttctaacctctagccctaactcttggacccctttatctacttgccatgaagtaggcatttataaaggcaaattagatcagaccacagccttgctgagttagtctttcaatggctcccagggtccaacaagctctcacgttcaagctccagcatcacagtcttacctattctaatatgtcacccgtattcttccctcttagccttgctcaatccattccctttgcttggtacactttgtcaccctgtggcatttgatctcggcttaggtgtctttcttgggagaagccttccctgaccacccttgccccatgcactgccgccctcccctaataaatccctggctccccatgagcagggcccgggttgtctttgttctctgggcctcgtgtggcccctatcacgtgataggggcccagagattatctgaatgaatgccctgattagtgagcgcatgttttgcagaagaggaggctgaccctgatgaggtcaatgtgctcaggacagagattactgccttcccaactgaggggattgtgcagagtggaatccaacaaacctgtcatttcatctctctgaaattatgacaataccaccacctatcctacaggctgctgaacagcatgatgatggactgtccagaccttggtgtcaccctaacttgaagcctgagctctacgtgcagacttgaagcttgctgcaaaggccattaagctggtgggcttaaagcctgagaactcccctctctgtcaccagcacaggagtgtccttggaatgccaagcatggggttgcggtatggacagatttactcaccacgaagggaaatgcgtggagccatcaggcgtggatccattctgaccacccagacctggaggcagaaacacatccagagctgcagaaggctggggtgggaatctgagcaggcatcagcccaggtcaggttagagaccactggtattgtttggtgaagtctggtgagggtcctaagggactaatggtattgccaggtgagagttctgaggaacagatacaatgtgatgggtggactggtggggattctggcgtaaaatggtatggtggcatgagtcagggcacaacgttaagttctcccatccaagtacctggcttagcttccgaggtcagatgcgttcagggtagtaaggccgtgaaccaatgttaagttctgatgagcctcttgcaggatagtggggaacccaatggtacagtcgggagagggtgggggcgggggcggccagcccacggaggttcgtaggaagcctcacctggacggtgatacaacccggtcactgtattcccgtagaacccccacgccagctggatgcccaggagacttaacaccaaccacagcagcagcagcttgaagagggtcacgcgcatgtcctgcgcctcccactcccgcaagaactcgctgcccagcgcgcccagcaccgtggccggcagagcctgcaaggcctgcccagaccaggactccgccatgactggccctcgccccacccggggtactgtcaccgtagtccccaccacgcacgcgtgtggtcttccgggaccaggcccgttagtgcgcacgcgtaaacccagccagggtggggcctacttcgcgtgcgtgaagagttggcagttcggggaggagtattaaaaccgcgcacgcgcacctaaccccaccctgcttgcttaagggatgagtgactccgggagtacaaaatagcaaccaggtcttttatagccccggagttcccgtgatgccccacgcggctgcaatgattggttaagggttttgcttttagggcgtggacgggctcctgagcaatagtggatgagctgtgagtgcgcgcgcgtgcgcggggccgcgacctgtgccggctcgagcccgctgggcactcggaggcgcgcacgtcgttccccgccctcccgccgccgcccgccctcgctctctcgcgctaccctcccgccgcccgcggtcctccgtcggttctctcgttagtccacggtctggtcttcagctacccgcc

SEQ ID NO: 29589 - DNA, 2300 bp, Homo sapien
gtcttggacctggaaagttggacatgtgtgtggctcaacagttttctcgggggagttcagtgaccttttggtggccaccctctgttctcacctgtgagttcttgcaggtggcgacttcatctgcaaggtcacttacatagccccactcagctgcttcggaaagcgtgacgaagcagtagtcctcagtgtgtgtgtaagtgaagaggaccttgtggtagcagggaccatgcttcattcgtggctgtgtccccatctgagggcctggtatgcagtaagatcaataaatacttgtggaatgcatgactgctggctgcctgtgtctgcctggtgggagagctgtggaactaggggtccacatgaggacagactactgtggtgctgcctacctgccaggctggcccaccttccccacccccacttgaccttactctcttgaggtcctaaaggtatgattcagacctttcagccctttccagaactttgaccctctggagacagggcggttctgcagggggcggtctagcccctagctttgttctgggcagcccaatcagctctggattgcccgagctgccctgaagagtcagccgaaagagctggaggcttcttccctgtggttgcgggttcctgcattctctgctctaaatcccagcctgcccttggggctgcccacgcccccttcagatcctttgctccggagagagacctgtccgagcagaggcctggactacatctcccggcgtgcctggcagtgtggtggcctctgtgcgccgtctgcactcgttgcaggcgacgatgcagagggctgtaagtgtggtggcccgtctgggctttcgcctgcaggcattccccccggccttgtgtcgtccacttagttgcgcacaggtgggatagagggtgctgatcttggagggtgggggagggaagcggctgggggctagggccctggtggcactaagcccagccgcccacaggaggtgctccgcaggacaccgctctatgacttccacctggcccacggcgggaaaatggtggcgtttgcgggttggagtctgccagtgcagtaccgggacagtcacactgactcgcacctgcacacacgccagcactgctcgctctttgacgtgtctcatatgctgcaggtgagccaggggagcacactggccatctgatcaggccttcctccctgtttacagtggtccactccttggctttgtttgctgtgaactggattccaaggacagccttctcagaagagctagaggtcatgggggtgtcatggataggtcaatggccccaaggaaatgagctcagagggtctcatcatctcatccttctagcttgcccccattaaatggtgtgccttaatgtcccgggttttccagggctgacacccactctcatgtattgggctggatgttggtttgaaaaggggttatttcaggaaggtgctaggtcctgtccagttccctggcagtccccccacacagagtgactgggggaggtcaggaaatcagaaggtggtcctttgccacgtgtagaaccaaaagactggttagtcactttgggtgggctggactgcactgtggatggcagggaggatgcatccttgcttagtagccttttggattgtagctgttgcaatggcctgaggctttcaatctcttccccagaccaagatacttggtagtgaccgggtgaagctgatggagagtctagtggttggagacattgcagagctaagaccaaaccaggtgggcccttttatttctgctctatgagttttcttagtcatgagccagcaaatgggctgagtccctacctcaggcttaggggcacagagatgagtcaaacacagcttctcagggcttgcagtcttggacagaatccctgagtcatttccagagacacagacatttgtagggaggggaatatcccagtcttactacatcaggctaggaggccagaaaccaaggttaatatgctgctctctggccatcccttctgcttaacccctctctattcaacatgtggtccctggccaggcgacgtgactcaaacacctgtaatcctggcacttggggaggccaaggcgggtggatcacctgaggtcaggagttcgagaccagcctggccaacatggcaaaacctcgtttctactaaaaacacaaaaattagccgggcgtggtggcgcgtgcttgtagtcccagctactcgggaggctgaggttgcagcaagctgaggttgcaccactgcactctggcctgggcaacagagtgagactcagtctaaaaagaaaa

SEQ ID NO: 29590 - DNA, 2300 bp, Homo sapien
cttaccgtgttacttcagcatgagctcctggcatgggggtgctctgtcttcgcctggctgcaactcaattcttccttctacccaaaaacactccagtcagttgtacttactgagaatccctgagtgccctctgccccttctggcaacatgcacattcctgtcttctgcctgctccctcatgtcagtgcagttgggctgggctgacctactaaaacctgctccatgtatggacctggaaggccattgctgccatggcacttgggacacttgaggaagaaacagaaaccttatttcttcctgtgtgtcccctagtggttttctttccatttgtgttatgccacagagagaaatttcctgtctgaactcttctgctgcctgcctaggaaggaaacctgaagatttgggcagcctgagtctcttggtttctgagctggctcctgaatatatgttcaagtgggtgtgcccatagggcctgggcacgtgtctctagcaaaaccagggcctgagcataagaactgggacccttctaggcagggtgcagtggctcacgcctgtaatcccagcactttgggaggcccaggcaggcggatcacctgaggtcaggagttcaagaccagcctgaccaacctggagaaaccccgtctctactaaaaatacaaaaaattagctgggcgtggtggtaggcacctgtaatcccagctacttgggaggctgaggcaggagaatctcttgaacccgggaagtggaggttgcggacctgagatcatgccattgcactccagcctgggcaagaagagcgaaactccatcttaaacaaacaaacaaaaaaaaaagaactgggacccttctgccatctgacatagcccaaagcacatctctatcctttctcccagttgcccctctccttttttgttgttttttttgaggttgagttttgctcttgttgcccaggctggagtgcaatagtgcaatcttggctaactgcaacctccgcctcccaggttcaagcaattctcctgcctcagtctcccgagtagctgggattacagtcatgcatcaccatgcctggctaattttgtatttgtagtagagatggggtttctccatgttggtcaggctggtctcaaacacctgacctcaggtgatctgcctgccttggccttccaaagtgctgggattacaggcatgagccaccgcgcccgccctgcccctttccaagagatatgctcagcataatgagagatcaaccgtggtggggagtgggtccaagtaagggttctcattgttgccttttaagaggcctaagtcctgcattaactcagtccaaccattaagtgatgcaggctgctcttccctcatgtgagaaaaacctgtttccctctggttcttcctggctttgcacctggtggctattacaaagcagtactgcagtatgtcttggacctggaaagttggacatgtgtgtggctcaacagttttctcgggggagttcagtgaccttttggtggccaccctctgttctcacctgtgagttcttgcaggtggcgacttcatctgcaaggtcacttacatagccccactcagctgcttcggaaagcgtgacgaagcagtagtcctcagtgtgtgtgtaagtgaagaggaccttgtggtagcagggaccatgcttcattcgtggctgtgtccccatctgagggcctggtatgcagtaagatcaataaatacttgtggaatgcatgactgctggctgcctgtgtctgcctggtgggagagctgtggaactaggggtccacatgaggacagactactgtggtgctgcctacctgccaggctggcccaccttccccacccccacttgaccttactctcttgaggtcctaaaggtatgattcagacctttcagccctttccagaactttgaccctctggagacagggcggttctgcagggggcggtctagcccctagctttgttctgggcagcccaatcagctctggattgcccgagctgccctgaagagtcagccgaaagagctggaggcttcttccctgtggttgcgggttcctgcattctctgctctaaatcccagcctgcccttggggctgcccacgcccccttcagatcctttgctccggagagagacctgtccgagcagaggcctggactacatctcccggcgtgcctggcagtgtggtggcctctgtgcgccgtctgcactcgttgcaggcgacgatgcagagggctgtaagtgtggtggcccgtctgggctttcgcctgcaggcattccccccggccttgtgtcg

SEQ ID NO: 29591 - DNA, 2300 bp, Homo sapien
gtaaatacttatgagtgcaatggctagatcatattgtagatataaattaagaaagaccctgtttttcaaagtggttggaggccaggtgtgggaggcaggaggattattgggacccaggagtttgagaccagcttgggcaacacagggaaaaataaacaaaactaggccaggcacggtggctcaggcctgtaatcctagcactttggaaggccgaggtgggcagactgcctgagctcaggagttcgagaccagcctgggcaacaggatgaaacaccatctcgacttaaaatacaaaaaattagcagggtgtggcggcatgcacctgtagccccaggtacttaggaggatgaggcaggagaatcccttgaacccggggactcaggaggcggaggttgcagtgagctgcgattgcactgcactccagcctgggcaaaaagagcaaaactctgtcttaaagattaaaaaaataaaaaggccgggcgcggtgcctcatgcctgtaatcccaccactttgggaagccaaggcgggcagattacctgagttcaagaccagcatgaccaacatgatgaaaccccgtttctactaaaaatacaaaaaattagccgggcacggtggctcacgtctgtaatcctggcactttgggaggccaaggcggatagattgcaaggtcaggagttcgagaccagcctgaccaatatggtgaaactccgtctctactaaaaacaaaaaaattagccaggcgttggtggcgcatgcctgtaatctcagctactcgggaggctgaggcagaagaattgcttgaatccgggaggcggaggttgcagtgagccaagttgcgccactgcactccagcctgggtgacagagactccgtctcaaaaaaaaaaaaaaaaaaaaggaaaaaaagaaaaaaaaattagctgggcgtggtggcgggcgcctgtaatcccagctactagggaggctgaggcaggagaatcgcttgaacctaggaggcagaggttgcagtgagccgagattgcgccactgcactccaacctgggcgcgactgagcgagactccgtctcaaaaaaataaaataaaataaaaataagaaataaaatagacaaatctagcaggacgcagtggcgtgtgcgtgtagtcccagctactctggaggctgaggtgagatcactggagcccgcgaagtcgaggctgcagtgaaccgtgatcgcagcattgcactctagcctgggtaactgagaccctgtctctaaaacaaacagaaaaccccaaagtggttggaaatcagcaatggatgagggttccaagcactccacatctttgtcagtctttaattttagcctgtctaatgactgtgtggaggttctaatttgtatttcctctataaatattaagtatcttttcatgggtttattggctgtttatctacttttgcaaagcgcgtgttcaaatcctttttttttccaacggctaatacgtatttttgaggttaatctaggctaatcactgctgatttgtgtttatgtatttatatgcctttaacagactaccgccctaagcagtgaaagaaacccaaagggagccgaatggcttgcatacagaaaggctgggcagttgctgggcgcggctcgcgggtaggctctaagcctcgagcagtgattggctgaagaagaacttcagtgggaggggcgcggtgacccacgcctgtaattccgacactttcggaggccgaggcgggcggatcacttgaggtcaggggttcgagaccagcctggacaatatggtgaaacctcgtctctaccaaaaattaaaaaaaaaaaaattagcagggcatggtggcgggcacctgtaatcccagctactagggaggctgaggcaggagaatcgcttgaatcccggagacggaggttgcagtgagtcgagataacgccactgcactctagctggggcgacagagcgagattccgtgttaaaaacgaaaaagaaaaaaacttccgcaggcacttccgactcccggccgatcctgagcttcggtgattggctgggctggccgtacgcggggcctcccgggatttgtagttcttgaggctcggctgaggatgccgggaagggctggtggtcgggggcctagagcggcggttgcacttagttgcggctgctgtcaccatgtcccgcgttttggtgccttgccatgtgaaaggctccgtagccctccaggtgggcgacgtgcggacctcccaaggccggcctggcgtgctggtcatcgatgtcaccttccccagcgtcgctcccttcga

SEQ ID NO: 29592 - DNA, 2300 bp, Homo sapien
gctcaagcacctggctaatttaaaaaatttttttgtagagatgctgtctcactatatagtccagactggtcttgaatcatgggctcaagagatccaccctccttggcctcccaaagtgctggaattacagacctgagatgtaaaactatatagtcagacactaaaatatgcagcagaacgtatggctgcaaagcagtgcacggtggtggggtaggtggtgcactctcagagccaaaggagtgaatgagagaatagaatatattttgcttagaaacccaaataaataattttctgcatggttagcccccccttttttttttttggagacagggtctccctctattgcataggctggagtgcagtggtgtgaacacccgctcactgcagtctcaacctcctggtctcaagcaatcctcccacctcagcctcccaggtagctgggagcacaggtcatgtgccaccccgcttggccaattttatttttaatttttattttttgagacagagtcttgttctgttgcccaggtggagttcagtggcatgatctcggctcactgcaacgtctgcctcctgggttcacgtgattctcctgtctccgcctcccgagtagctgggactacaggcgtctgccaccatgcccggctattttttgtatttttagtagagacggggtttcacgttgttggtcaggctggtctcaaactcctgacctcaggtgatccacccgccttggcctcccaaagtgctgggattacaggtgtgagccaccgcggctggtcaaaattttttttttttggtactttttttgcagaggcggggtttcgacacgttgcccaggctggtcttgaactcctgagctcaagctatccatccacctgcctcggcctcccatagtgctgggactacaggcgggagcacagcacctagccccttccttttcttgtctctgtgaatgaggtttggagccgagacactgaagtatagataattgcaaaaaggtatgtttttgggagatggggcattcctttcttatctctgcaacttgcatctcccagacgctcctgaggagggagggaaagccagggagccccagagctctccgggatccagggaggaaaccatggctggtggcagccagttctgtgttcagaatgtgcttgctgtcaagagtgcaggcctggaattccagcctggccacaggccaaggagggaatggacccatcctgcgcatggtgtggggatgagaagcagagcccaccacgggtctcattcccagacccatccggtaactgtcagtttcagtaactgtgaagtctggggcttttggggtggggggctgcaggttaagtcctggggagagctagagctaccttaggaccctccccttgaatgttccaggcagcaacccccctctcttatttcttcccccaccaaaagaatgcaggccactaggagtgagtgaccagcgcctgcgagttagagctattttgggcaggagagcaggcgtcggattccagtgttccaggcagggggaggggacgagggttaggcctgaggcgctttccgactccccagcctgctgtgggcgaggctctaggagatgagctagcttcccgctcctcctgtccctggcctcagtctcccatccgtgtaagggccgggcagcaaggctttcatcctttgcaattgagagaacgcttcctgattgttctcatggcttagaaataccccttgatttgcattcgaaggaaataaggagggctgaacgcagtcgacgggtggccagttgctgggccagttcgcagtcctgactgtcccttgattagtcttagaggcccaaaggcctgaagttgggcggggagcccctcccccacactactggttctgaaggctccgagtgaccgggaccgaccgccggggtgtgtcccgggacggacttccctggccgtgggggcgaggcttccataatggggcgtgacttttagggcgggggagtggctagccaatgagcagagaggtgctggccggggcggggcttgcgcgcgggtgcggcgcgctgcggagcggccgacgcaggcagaagccggcggcgcgcggacagccagtcggcgccgcgcggagctggccgctggattggctgcaacactcgcgtgtcaggcggttgctaggctccggccgcgcgccccgcccttgcgctcagcgccctctcaccgcccggtacgtgctcgcgcgaaggctgcggcgcggcgctcgcgcctcttaggcttggcggtggcggcggcggcagcttcgcgccgaat

SEQ ID NO: 29593 - DNA, 2300 bp, Homo sapien
gtttcaagtagcccaacccacactgactggggtctgtgaagctataacagcctgggttgggacaaggtcaggccactggcctgcccatagtgtttgtgagcatattcttccccaggaggaaatatatggcacaagaccgccacatcccagaccatcaccagggagacaactaataacagagttgtcataagtataccaggcacttgtcctggtgttttacctacatcaggctgggtgcattgactcatgcctgtaatcccagcactttgggaggccgaggtgggaggatcaccagaggtcaggagttcaagaccaacctggccaacatggtgaaatcccatctctactaaaaatacaaaaactagccaggtgtggtggtgggcacctgtaatcccagctactagggaggctgaggcaggagaatcatttgaatccgggaggtggaggttgcagtgagccgagatcacaccactgtactccagcctgggtgacagagcgagagtctgtctccaaaaaataaaaataaaaaaaataaaatgaataaaaaataaaatatctacatcagccactctacccttacaatcccccatattcgaggagctactaagattctaactttgcagaataggaaatggaggctcagtgagcctaagtcagttgccaagggtcctatcggggctgaggtgcagactcttttggagcctaaatgtgcacatgtagtcaccactcacgaagctgtatcaaacatcctgcagcacaggaggaaacacagcaaggaccatcatctgcaggaagagaggctctcttcatcctaggtcatcccagaggggccaggcagtttagcgtgaaaacgggaggtatgaagtcaggagaaaatatcaggaagtgggggctctgcatttcctctttctcttacttgctccatcccagaggtcgggaggagcagctcggagtgcacaggggaaggcccagggagggtcctggcccctcctcacaagaactgacacagccaccggtctgtccagcaggctggctatcagcattcactgggatccctggattattctaggttcagttagaactgctaacaccctatgtgatatatttcgcaacattaggagaattgaatgggtttgtaaaatgggttcaagttactcacgcctttctacacagtcatgatttatgacgtcagagatgaactggaatataggctcctaggaaatattctcccacaggaaagtacaggcttgtgtgagaagccaccacggcagacaatcctgagtagcgggcagaaaccggctgtaaatgtgagggagcggggaagtaatttggaaagctctcagggtaatgcagaggcaacctgcggccccgcatcgagacagctccaggcctgagaaccatcaagtcctcttttccatccccaaggtcactctcccagggctgactgaggtggcctcccagctggcttcacacagccctgtcacaccttccatctgtgcccggggcgcttcctgagactcccagttcctcagtgtgaatcccagatggttcccatcgccatctggataaaggctccactccccagctggccttaaagaccctcacaatccggcccgaccacccagcaccctccctctccttccctctacgaccttgcgtctctgaatacacttgttcctctgccttcccaactcctatgcatacttttgaggccattctcgggtagcccctctcctctccgaggcctgtccttatgacgcctgcccgctgtggcactccggttacccggaggagagttgctactctcgagttcaccgaggcggaaagcccctctgactccaaagcagggctcagcgcgacgtcccagaggccgcttctagtggcaggtgcccctcctcacagggccctcgcagccccgccggcccccgcccggctccttctcagcatgatacaaccgcgtcggccctggacagcgcatgcgcgggcgccggcggctgtttcccagcgaccccgaggctggcgggagcgcgcacaggggaaggggggcgtgtgcagggaagggggcgcgagacgcgcatgcgcagcggcaggcggcggcgcgagccgagctgggagatggcggcggcagcggcggcgccgagagtgtgagcaccgcccgggagccgccggcccgggcgcagcgcgaccccgaccccgcccgcccgcctgcccgccatgggcaacgaggtcagcctggagggcggcgctggcgacgggccgctgccgcccggcggcgccggccccggcccgggccccggccc

SEQ ID NO: 29594 - DNA, 2300 bp, Homo sapien
tcgcctcacccacagcagttcatgggtctgcctgcagcagaatgtacagatgaagtacaaatgaaacactaaaaaggcatatgagcaatagacatcagcctccttccggtccctctgagctgcccaggtctttccagaatttcatatgattggctctgcaacatctgataaactacaagcagagcagcctgtttggttatcagaagagaaatgacaaattccccatacagggaactctcaataacaaggtgtttttccattcagctacagaagctttcccttggaaggagaacactaaagcctgggtgagcctccctcaagctaaaacccaaacagcaactcaacatgcagcaaaatggacagtgtttgcagtgctaagagctgtgtgctatccaactgcattactattatagctagtataaaatggacaaatcccacctctaaaaaggatgctcacaggctgacctgtctgccgcaggtttcaagctactaacagcctttcattactgttagttgtctaagaaatgacttctgaggaaataaacacacaagaggcacagtcgggcagccaaagaataaaaaattatgcgtcctcagtttatgtgcttccacacagaaaagccagggcaacatatatcagcagacccacatggagctggaagcacctccctcccaccccctgggggttttgctactccccaagcctatttggtgcaaagataatgccttccattttatcgtgtcatctcttagtagttttcctgagttttcagtctactgacttattatatattggcattcccttacagccttcattgccacttgactgtttttgcaggacctgggttggcatacatttaaaacaaactggtttcacagtatttaatcagatatgttctgtttaaagcattctgtgtgggtttcagcttttccactggtttgatctaaatcataaggtaacgagaacatatctggtgctggatgactcaatagcatttttgcttcaccccaaaatgtttccctaaaccttggtgaaagcacatgatcctattagtattgttgggcctaaataagcacctcttggtgtccagtgggcaattttcctttcccccaaaggtgattacagccactaaatgcccaaggaaagcccaagaccaagttcatggttcaactattttcatctctctgttcctcgcagtgacacttatcttccctgacagccactcccattgtgctgttttctcggcccagcacaatggacacatgcagacaccagcagacagggaggacgttttccatcccattgctctcctgtgcggagggaccaggttaaggttacataagcccctcctgagcagtcaggcccgagcgttggggagaagcgaatttggggttcgtgacggagtcacggtctgcaggccccgactgaccctgcgctcgtcatcctgccacgccaaggcggggcagctggaaaggaagggccgcttcccgcgaccacccagttcacgccaatccggcagggttcagagtgcggccggacgtcgaacctcgctgtccacactagatcgcgggatcctgggcccgggtcccggcctcaggctgcagctcaccgccccccgggcgccgagacacgcgcttacctgcccgggccagggccgggaccggggccggggccggggccagggaccggtggtaccgcggtcgaccgcgctgctcccgccgcggggagctgtccgccaccggccggtgctgaaggcggctttcctgcgccggggccggggccggggcccgggccggggccggcgccgccgggcggcagcggcccgtcgccagcgccgccctccaggctgacctcgttgcccatggcgggcaggcgggcgggcggggtcggggtcgcgctgcgcccgggccggcggctcccgggcggtgctcacactctcggcgccgccgctgccgccgccatctcccagctcggctcgcgccgccgcctgccgctgcgcatgcgcgtctcgcgcccccttccctgcacacgccccccttcccctgtgcgcgctcccgccagcctcggggtcgctgggaaacagccgccggcgcccgcgcatgcgctgtccagggccgacgcggttgtatcatgctgagaaggagccgggcgggggccggcggggctgcgagggccctgtgaggaggggcacctgccactagaagcggcctctgggacgtcgcgctgagccctgctttggagtcagaggggctttccgcctcggtgaactcgagagtagcaactctcctccgggtaaccg

SEQ ID NO: 29595 - DNA, 2300 bp, Homo sapien
cctacacctctctgccttgctccgaattttccaacccccaaactctcaccggctgccagaccttaggccttcctcagatggtcaggagtacctccttaccgaagtcacccagagttgctagaccttttttttttttttttttttttttaacacagataaacaggaatcccagcttcacctctggccctctccccagaattaacattttgatgcgtgtccttctttcctgtttgttgttccagtcttcattttaaacagaagccagaaggtgcaatatatcctgttttctagctttctgtttatttccacgtttatttcaggtacttaaatgttcgtcttccagtgctcaacctccagagagatacaccattagttcatagccagtctaccacacacaatctaaggaacaggcactatgttcccagtgttcctattataaacaatgcttgatgaacatcctattttccaatctttccacccaaattggtggctggggccactcattctactcctgtttctggccttgatacagtcctgtacatactgacaaatgcagtggcgtcagaaagttgggactctttttttttttttttcttgagacggagtttcactcttgttgcccaggctggagtgcagtggcatgatctcggctcactgcaacctccacttcccaggttcaagcgattctcctgcctcagcctcccgagtagctgggattacaggcgcgtgccacccagcccggctaatttttgtatttttagtagagacagggtttctccatgttggccaagctgatcccgaactcctggcctcaggtgatccacccgcctcagcctcccaaagtgctaggattataggcgtgagccaccgcgcctggcacttttttttttttttttttaagatggactctggctgtcgcccaggatggagtgcagtggcgcgatctcggctcactgcaagctccgcctcccgggttcacaccattctcctgcctcagcctcccgagtaactgggactacaggcgcctgccaccatgcccagctaattttttgtatttttagtagagacagggtttcaccgtgttagccaggatggtctcgatctcctgacctcgtgatccgcccgcctcggccttccaaagtgcagggattacaggcgtgagccaccgcgcccggccggccgggacttttttttttttttttttttttttttttacttaactagttatcttgagtaagtaatgatgcggctgatgggaaaggggaagctacaggccagacaagtggactctcaatcacaagcacgccatggagcagggagccagggccctgaatgtggaagaccagccagactcaggtatatggagggaacatccttactgtccagcctctcctgatctctgttggcaccttagcccagccaatcctgtaccacgtgcacagggaacctgcctgcctaggttttttccacaggaagctccctggtcctgggtggagtctgagcccaccaggcctttcacacccaagagctcagggtgaggcctggggaggaaggcagggacccaccagctcacggtccccaacaaggtgccactgagaaggctgggtaaaggctgcggggatagatagctcttgcggcaggcctggcgactgataagtccgggcagcaccctaagagttggcacccgcccctctgccccgcaccccagggctttgcttcgcgccctccgcccggaccctggcccttctcttcttcgtctgcgtggaactccctccagggcagggcctggcactgtgtagtgaatgtcggcctcgtggtggacccgaaggaaccctacagtcagccccagagccgcgggagatccacgctgcggccggctccgccccgcccaaccctcaccctcacgctcacgctcacgctcacgctcacgctcacgctcacaggctcccggctccacattcctcgcagggctccaatccggacccgcccgccttgcccttcatcctcaaagactcattggtcccattcccctcgggccccgcccttcgcgtgcttgggccatgcccgtccgaccgcgctgcttccgccttgcagcaccccctcaaccccttctctcgtaggcccttctaccctccccgaagccgggctcccgggttccgcttccacagggccgccccctctcctccgagatccaacgcctcgcccctcggtaagaggcccaggactcagcccacggccccgccccccacttggctagtccgcccctggcgagacccctgctctcacccacccaggacttc

SEQ ID NO: 29596 - DNA, 2300 bp, Homo sapien
ggtacccaaccccattgttcatgatgcaggtccgtacgtagtctgggagcaagagacagaagatcaacttgggctgaggtcccctgtctcccaccctgcccctctccacccccacttgcctttcttctggaagaggtcacagcgcccagaacgccgcagcctcgtgtggggcgagtgttgagtccatggcagcagttggcaaccatggctgctcacgttgtagtggaaggccctggagagaagaaggcacagggtaacgccacagcccaggcttccctgcccccagtcttatctaggcccagtggccactcaccggcagtccattaagggcccacagcgaccagcacactcttcagcatctgccacatcctcctgccaaggcccgggcaccaccgcatgtagcaggtgctgtagctctgtgccccggagcacttggaagtcattcaatggcgagcgctgccctgcagagtaggcatgagtgggtgcaggtcaggtgggcatacatgtcagtaatgtgtattggcatgtccacactttgttcattcaggggatcaaagctacaaggcttctgggatggaccctgtatgcactttcaagggccagtctagccccctgcacagatacttgtgaaaaaaatttcccctgggaagcaggcccagacttggtagttatcaccggtgcctctgtttagtggcccaggcaccgggctcagatctaacacatacgctctgtgagagcagtgggtgatgaagcttgccccacctcatctctcaaatgagaatgctaaggctcagagccatcacattacccagccaggggccctggctaggcattcagactccaaatctgggctctcacctgcacaaaggcatatgctaggttagaggggtagatcaggctcaggaggggtcactgcctgctgtgtgcgtgcatctgtgtggtcctgacactgcttcagtgctagagcagacgtgctaatagaggcctaagtgggcaatgtctatgtgttcctagggcttcccagctgtgctcaagagggcaaggtcactgccccatgcccactgagcctctggctccccgacttttttctcatcctagaataggagaatggggccaaccccctcctgaaggcagatggggatcagggttgggggcacttaccagggacccctaagcattgagtcagaagcagcaggagtgggagccaccccatccttctggctggaggctgcactgtgacccaccacagccccatccgggaagttgtgaaacctgtccctacgggattgggtggctctggctccacacgtcagctcagggcctgctggaccctgacctgagacctggtgacaggagccatgaggggccaggcctcaggtcccataggtcagttgcaagggcctagtacagcttagtggacaggtgttaggaaggtttggtggggacacttgaggtgccctggggttggggtgaaacccctctgcagcctagtcagcccaagggcattgtgaaagtgagagctgccagaggtctgggctccagcccctgggtgacattaaacttttctgaatttcggtttttccctgtaaattggggaaaattacttgccccagcttcaacactgcctcccctccacccttttgctgctgccttatcaggccccagctgtaggcaggtcagcccacacccggcggcagagcccagagaggctcgctcatctcagccgccagaagtgtcatcccagggaaggtgagcgaggctgtccactaggactaaataggggtggaggtaacaggtagcagggactctggcaggaacggcctttcagacgttttaaggaccgtctgagcggggcctctaagtatgggtaggagacaggcggcctagggattccggttagcatgtcgcgttctgccgcagcagggctgggagcatccccagagcaggcggaggtcggaggtggtgaggcctttcggcgaagctgaggcctggaacaacccggtgggaagccatggagggggtcccctagcggaggctgggcgcgggccagtgcgcgtgcgcggctggaggctcagcgcgcaagcgtgcgcgtgatttggccctgaacggacgccgtagccaagaggttgggcggatgttgtgagccgggtcgctgcggccgaggctccgggtgagtgaggggcggcagggctctgagcctggcgggttccggctattcccttcgcggtccgggctagtccagtgcgagggcacctgcagcgcagggatctgggtgcgaaactccgagcggaagctggtct

SEQ ID NO: 29597 - DNA, 2300 bp, Homo sapien
taagccatactgagtccagctcacaaccagaagcgacaatcctacacattcccccaagtgcagaccaccactggtctggtcatctctagccataagtcccacttactccccacaaggctggagcctctttcctcagccctgggttcctcccttcttttatccatggtcctgatagtttcaccattcccactcacacatgtggcctcccacctcatccaagcaccacccttgcccagccctcatggcaaactccattggtcctcctagtgcatctatccctcacatcatgttgctgctgcagctgctccagaacctgcactgagtccctggtgctggcctcactgatgtgtagcggtgctgtccaacacagcagccgtcatccacatgaggttacttaaatttaaagttttaaaaattaacaattcgatttctcagttgccttagccacatttcaagagttcaatgaccacatgtggctaatggttactctgttggacagcacaaaggtagaacgttcccaccatcatataaagttctattagacagcgcaggtctagagtttcgctctgcagcactgccttagccagcactccctactctgcagttcagtctcttatctcaccccaaacagaccctctactcccgccacaaacccttgtgggtctgcaccacgcctgctcctcgggaaggtgattttcccgacctcgggccctcggtgggcgtccatgatcggtgccccttcactaccagagtagttgaagatctgattaaactcagtcattcatttgatgagcagaccttccagacacccggagtgggctccgggagtcagttgctgaggacccaggtgagaggcggaccttgtccccgcccggggactccctgtcacggctatcccgtccaaccccgccggggtatccggactcagaactgaacctactccgtctgggagcccaaggacggcgagggcggcgcatggctcccccaagtcgcccccgcctggccccaagctccacaggacctgccagaccagcttccgctcggagtttcgcacccagatccctgcgctgcaggtgccctcgcactggactagcccggaccgcgaagggaatagccggaacccgccaggctcagagccctgccgcccctcactcacccggagcctcggccgcagcgacccggctcacaacatccgcccaacctcttggctacggcgtccgttcagggccaaatcacgcgcacgcttgcgcgctgagcctccagccgcgcacgcgcactggcccgcgcccagcctccgctaggggaccccctccatggcttcccaccgggttgttccaggcctcagcttcgccgaaaggcctcaccacctccgacctccgcctgctctggggatgctcccagccctgctgcggcagaacgcgacatgctaaccggaatccctaggccgcctgtctcctacccatacttagaggccccgctcagacggtccttaaaacgtctgaaaggccgttcctgccagagtccctgctacctgttacctccacccctatttagtcctagtggacagcctcgctcaccttccctgggatgacacttctggcggctgagatgagcgagcctctctgggctctgccgccgggtgtgggctgacctgcctacagctggggcctgataaggcagcagcaaaagggtggaggggaggcagtgttgaagctggggcaagtaattttccccaatttacagggaaaaaccgaaattcagaaaagtttaatgtcacccaggggctggagcccagacctctggcagctctcactttcacaatgcccttgggctgactaggctgcagaggggtttcaccccaaccccagggcacctcaagtgtccccaccaaaccttcctaacacctgtccactaagctgtactaggcccttgcaactgacctatgggacctgaggcctggcccctcatggctcctgtcaccaggtctcaggtcagggtccagcaggccctgagctgacgtgtggagccagagccacccaatcccgtagggacaggtttcacaacttcccggatggggctgtggtgggtcacagtgcagcctccagccagaaggatggggtggctcccactcctgctgcttctgactcaatgcttaggggtccctggtaagtgcccccaaccctgatccccatctgccttcaggagggggttggccccattctcctattctaggatgagaaaaaagtcggggagccagaggctcagtgggcatggggcagtgaccttgccctcttgagcac

SEQ ID NO: 29598 - DNA, 2300 bp, Homo sapien
gctttgaggggcttctcctggtggatgatgacctgctgggggtgagtgagggtgaggtgtggagacccaggtccagccccttctgacatagccccaggctcctcctgatgtggccctagtctctctactcatctgatggggctgcagccaaaacttgtcctgacgtggccccagaccattgtgttctcagtcctcaaactctcccactaaagccctgaaacagtcttgatgtggactcagcccccagcccttcccagcacagccctgagtccctctctcatcctgccttggcccaggatccttcctgatacaagcctacccgctcccaccgtcctcaggcacagtgcagtgttggccgccacaggcaaataccaccagggctggctcagttggggatggggtctttttcccttggggagatgctctgtgtgcctgggagctagcccaccacccctcttcttcacccaggtgattggacacagcaactttggcaccatccgctctaccacatgcgtgtacaaaggtgagaccttaccctgctgtggcctaggtagtgaggagaaagtttaagggcccaggcatgaggcaagaggcagtctttgtccacctcgtggccctaactcagctctttccagggaaatggctctacgaggtcctcatctcctcccaggggctcatgcagatcggctggtgcaccatcagctgccgcttcaaccaggaggtacacgttggggaggggacccctccctgggcccagggagagcttctcctgccacaggcctcatcaggtctccagatcccctcagaactgcctaggaccctaactaacctggactgccctctggagaagaaacgtgtcccacccaatcccaggcaccccagctcagagaatacctcttactctttccctcagatcatctgttcccttctgtagagccatatgcatccaaggctggtgattggtgggctctggcccagaccctgcctgcctcaccagggacctcataggcatttcctccctaggagggggttggagatacacacaactcctatgcctatgatggcaaccgcgtgcgcaagtggaatgtgaccacaacgaattatggcaaggtgagagccaagcccctgtgggtcatccgccccatgactgttactacagcttatttggagccactgggcagccataagggactacagggcaccagggaagggtcagggacccaggtcctttgtccttgtggctagtctcccttgggtggttctggaaacgcagctggggttcagagtcagcaggctgctgggcttctgtgcatctggtgaggcctcctctcatggcaggcgtgggcagcgggggacatcgtgagctgcctgattgacctggatgatggcactctgtccttctgcctgtgagtttcctatctctatgcacaggcctggcccctggggcctccccagactgcccccagtttcctgggccctgtaaggggccagactgagtttgatagcctgagggtgggcagccacatgcttagcactggctcacagacccacccttctccccaggaacggtgtatcactgggcactgcctttgagaacctgtccaggggcctgggtatggcctacttcccagccatcagcctctctttcaaggagtccgtggccttcaactttggcagccgtcctctgcgatatcattttgtgaagatggctgtgggctgctcagaagctcttggggaggctgggatgaggggctccctaccccaggggtgccatgggctggtggcaggccctggctgctgcagagttagtggggggccatgtagagtgtcgaagaaaactttcctcgcagcagcctggttggttgggtgcccttgtctccactgaacagatgaggaatgtgaagcatcctccctagggagaataagtgggcaagttgtgatgcaaaccagccctgccctagagcccaggccccggggtggggggtgggcagtggagagggagtaggcatgtctgagccacagataaggcgttgctggcttaactctggcacctacccagtggcaggctaccggcccctgcaggacccaccgagtgctgacctggtgcgggcacagaggttgctgggctgcttccgggcagtgctgagtgtggagctggaccctgtggtgagctggggtctgggccaggcggggtggggggcttccacagcctcctgcccctcacacttctccctcctccccctccacacaggaggggcggctgttggacaaggagagctccaagtggcggttgcggggcc

SEQ ID NO: 29599 - DNA, 2300 bp, Homo sapien
tttcctccctaggagggggttggagatacacacaactcctatgcctatgatggcaaccgcgtgcgcaagtggaatgtgaccacaacgaattatggcaaggtgagagccaagcccctgtgggtcatccgccccatgactgttactacagcttatttggagccactgggcagccataagggactacagggcaccagggaagggtcagggacccaggtcctttgtccttgtggctagtctcccttgggtggttctggaaacgcagctggggttcagagtcagcaggctgctgggcttctgtgcatctggtgaggcctcctctcatggcaggcgtgggcagcgggggacatcgtgagctgcctgattgacctggatgatggcactctgtccttctgcctgtgagtttcctatctctatgcacaggcctggcccctggggcctccccagactgcccccagtttcctgggccctgtaaggggccagactgagtttgatagcctgagggtgggcagccacatgcttagcactggctcacagacccacccttctccccaggaacggtgtatcactgggcactgcctttgagaacctgtccaggggcctgggtatggcctacttcccagccatcagcctctctttcaaggagtccgtggccttcaactttggcagccgtcctctgcgatatcattttgtgaagatggctgtgggctgctcagaagctcttggggaggctgggatgaggggctccctaccccaggggtgccatgggctggtggcaggccctggctgctgcagagttagtggggggccatgtagagtgtcgaagaaaactttcctcgcagcagcctggttggttgggtgcccttgtctccactgaacagatgaggaatgtgaagcatcctccctagggagaataagtgggcaagttgtgatgcaaaccagccctgccctagagcccaggccccggggtggggggtgggcagtggagagggagtaggcatgtctgagccacagataaggcgttgctggcttaactctggcacctacccagtggcaggctaccggcccctgcaggacccaccgagtgctgacctggtgcgggcacagaggttgctgggctgcttccgggcagtgctgagtgtggagctggaccctgtggtgagctggggtctgggccaggcggggtggggggcttccacagcctcctgcccctcacacttctccctcctccccctccacacaggaggggcggctgttggacaaggagagctccaagtggcggttgcggggccagcccaccgtcctcctcacactggcccacatcttccatcactttgcaccgcttctggtgagcggcattgggaggggcatgggaggggaggagacaggccatgctagacacgcccgtggtagatgtgccctcactgagggctgcagtgctgaggtcccacagcatcacctggcgagggccccatgtgaccagggccctcagacctcagtcagtcccctagggaaacagggacattgccaaccaagggcatcaggggatgtcctggaaagaagactgaaggataataacatcccaggccaaggaaactgcgtgtgccaagccttagaggagccgtggggcaatggccttcttgtccctcagtcagaccccggaaggggtcatctatgtttggtgttgctcgagtggctcaaggctctgtgcctgaggcttgtgccttggccatgtgccagggcaggggtgccttgaccagagtggaaggccaccacctcaccagtgcctggccttggtgcagcgcaaggtgtatctggtggaggctgtgctcatgagcttcttgctgggcatcgtggagaagggcacacccacacaggcacagtccgtggtgcaccaggtcctggacctcttgtggctcttcatggaggtgaggctcctgacctcaggcctcaggcctggctgtcagtcttcactggggtcgggaagatacggggagaatcttggaaaaggccccagtcatggctgccttggcatctcttcccccaggactacgaggtacaagattgcctcaagcagttgatgatgtctctgcttcggctgtaccgattctcacccattgtcccagacctgggcctacaggtgggagcccctacccctgccctgagccccctgggactcgcctgtccactctgaacgccccctctccacagatccattacctgcggctcactatcgccatcctgaggcatgagaagtcccgcaagtttctgcttagcaatgtcctgtatcctttccttgctgc

SEQ ID NO: 29600 - DNA, 2300 bp, Homo sapien
agataaggcgttgctggcttaactctggcacctacccagtggcaggctaccggcccctgcaggacccaccgagtgctgacctggtgcgggcacagaggttgctgggctgcttccgggcagtgctgagtgtggagctggaccctgtggtgagctggggtctgggccaggcggggtggggggcttccacagcctcctgcccctcacacttctccctcctccccctccacacaggaggggcggctgttggacaaggagagctccaagtggcggttgcggggccagcccaccgtcctcctcacactggcccacatcttccatcactttgcaccgcttctggtgagcggcattgggaggggcatgggaggggaggagacaggccatgctagacacgcccgtggtagatgtgccctcactgagggctgcagtgctgaggtcccacagcatcacctggcgagggccccatgtgaccagggccctcagacctcagtcagtcccctagggaaacagggacattgccaaccaagggcatcaggggatgtcctggaaagaagactgaaggataataacatcccaggccaaggaaactgcgtgtgccaagccttagaggagccgtggggcaatggccttcttgtccctcagtcagaccccggaaggggtcatctatgtttggtgttgctcgagtggctcaaggctctgtgcctgaggcttgtgccttggccatgtgccagggcaggggtgccttgaccagagtggaaggccaccacctcaccagtgcctggccttggtgcagcgcaaggtgtatctggtggaggctgtgctcatgagcttcttgctgggcatcgtggagaagggcacacccacacaggcacagtccgtggtgcaccaggtcctggacctcttgtggctcttcatggaggtgaggctcctgacctcaggcctcaggcctggctgtcagtcttcactggggtcgggaagatacggggagaatcttggaaaaggccccagtcatggctgccttggcatctcttcccccaggactacgaggtacaagattgcctcaagcagttgatgatgtctctgcttcggctgtaccgattctcacccattgtcccagacctgggcctacaggtgggagcccctacccctgccctgagccccctgggactcgcctgtccactctgaacgccccctctccacagatccattacctgcggctcactatcgccatcctgaggcatgagaagtcccgcaagtttctgcttagcaatgtcctgtatcctttccttgctgcctggcaggccagacatggggtgccctctggactcagcagaggccaggaaggggagtgtcatcaggccaggggtcccctgggagcatcaggaggaccagagctgcccaacgtggcattttctctacagagcaaggacgagagagcaaaggactgagcctggccagccagcctagccagggggttctgaatgactgcagactcgggctacgcagaggtgtgggaggggccacagggcctgccctcttcggccacagcccagcacttttgttcatgttccacagtggggattcctgcaagatctttaaggaggcagctcttcctgcttcccagaattgttgggaactgcatgagtgagtgagagcatagctttgagcccctggctgggaagcctcagcttgtagccgttttcttggtctggggtcttccagcctccaggaggcagacacaaagctgggagacacagaggtcagagttggggcctgagaaaaggccaccagtccctctctccagcttgtcccacagtcatctgttcctgtgacaagcccttatcgtgcacctgctgggtactggagctggtgggcttaaccaccacagctttttgtcagggagcatgccctgggggtcagacacatagcagcaacatgcccctgtggtggtgggagagctgtggtaggcacatccagggatgggctcctggggaaggactcttgagggtgtgcagagtgccctttggcaagcagagccctgccttgacacccgccagcttcgacgtgctccgctccgtcgtcttcttttacatcaagagccccctgcgtgtggaggaggccggcctgcaggagctcattcccaccacctggtggccccactgctccagtagggaggtgagtgcaccccaagtgggatgggcagaggtcatggcaaggcccctggcctgggcatctggccactgggcatctagcatgaggccttttcactggccctggtccctgaagccctggagatggagtgt

SEQ ID NO: 29601 - DNA, 2300 bp, Homo sapien
ggcatcgtggagaagggcacacccacacaggcacagtccgtggtgcaccaggtcctggacctcttgtggctcttcatggaggtgaggctcctgacctcaggcctcaggcctggctgtcagtcttcactggggtcgggaagatacggggagaatcttggaaaaggccccagtcatggctgccttggcatctcttcccccaggactacgaggtacaagattgcctcaagcagttgatgatgtctctgcttcggctgtaccgattctcacccattgtcccagacctgggcctacaggtgggagcccctacccctgccctgagccccctgggactcgcctgtccactctgaacgccccctctccacagatccattacctgcggctcactatcgccatcctgaggcatgagaagtcccgcaagtttctgcttagcaatgtcctgtatcctttccttgctgcctggcaggccagacatggggtgccctctggactcagcagaggccaggaaggggagtgtcatcaggccaggggtcccctgggagcatcaggaggaccagagctgcccaacgtggcattttctctacagagcaaggacgagagagcaaaggactgagcctggccagccagcctagccagggggttctgaatgactgcagactcgggctacgcagaggtgtgggaggggccacagggcctgccctcttcggccacagcccagcacttttgttcatgttccacagtggggattcctgcaagatctttaaggaggcagctcttcctgcttcccagaattgttgggaactgcatgagtgagtgagagcatagctttgagcccctggctgggaagcctcagcttgtagccgttttcttggtctggggtcttccagcctccaggaggcagacacaaagctgggagacacagaggtcagagttggggcctgagaaaaggccaccagtccctctctccagcttgtcccacagtcatctgttcctgtgacaagcccttatcgtgcacctgctgggtactggagctggtgggcttaaccaccacagctttttgtcagggagcatgccctgggggtcagacacatagcagcaacatgcccctgtggtggtgggagagctgtggtaggcacatccagggatgggctcctggggaaggactcttgagggtgtgcagagtgccctttggcaagcagagccctgccttgacacccgccagcttcgacgtgctccgctccgtcgtcttcttttacatcaagagccccctgcgtgtggaggaggccggcctgcaggagctcattcccaccacctggtggccccactgctccagtagggaggtgagtgcaccccaagtgggatgggcagaggtcatggcaaggcccctggcctgggcatctggccactgggcatctagcatgaggccttttcactggccctggtccctgaagccctggagatggagtgtgggtgttctgagtgaaggaggcctggctaggtcccaggtgaccctgctgtattccacctgctacccctgcctagggcaaagagagcacggagatgaaggaggagaccgcagaggagcggctgcggcggcgagcctacgaacggggctgtcagcggctcaggaagcgcatcgaaggtcagcccgccttgggcacggggtagggtgggaggtgtgtgtgtgcacatgagggtgcttggaggtgcccatgtctaggtgggacttggggaaccctggtggtggagccctggcccaaacctgccccccatctcctggagcctgagggccatgttcctcacctgacctccagtggtggaagaactacaggtccagatcctgaagctgctgctggacaataaagatgacaatggggtgagtgactcccaggagccctgggtggggccctgtggggagggatgctgcactgggccttaagacccagagggtgggaactgggtttggttcccatggcaggggctgggggaaggtgcagcactgagccagcccagtctgggcctgcattctcagctcagcacagcctcacttttccctctctcaaagggtgaagcttctaggtatatcttcctgaccaagtttcgcaagtttctgcaggagaacgccagtggccggggggtaggtgtcctccaggccagcccactgtggatccccggctgcactacacatgccatgccctcagcacctggcacttctcggactgcctcatccctgcctagccccaagcttttctctgctgcttttccctccctgcttaaccctcgaccctcaggcagggccttgg

SEQ ID NO: 29602 - DNA, 2300 bp, Homo sapien
ctgtgtttgctctgattgtcccacgggctcctaccattgtgggctcttttcttccgtccttgcccccccatttctctgtgcgtcctttatagggctgccttgggtgggtgctggggggccctgtgtttgagtccccaagggtcagtgggagccttacctgccctggattgggggatatcccacaggactggggctgggcctctctgcttctcctgagtgaacggctgccatgagtacccccatcaccccaagttatgcagctgctggctctgacctgaaatggcaggggtggagaagaggtaggggaggtctgtttcttggtccaggagacagtttctctgtctgcctggatgggtgagtggccaaagccagaattcccaggctgtgctaggccagattggaggggagggctgtggggagggtcttcctactgggccgtgaccactggcctagcctcctcaattcctcgcagaggcctacatcccgccccaggtcttctataatggcaaggtggactactttgacctgcagcgcctggggggcctcctctcgcacctgcggaagaccctcaaaggtgtgtacaggcctgtgggccgggagcagttctggggccaggtgggggactgtccctgagcctgctctgctgtggatgctgagccatcctatggccaccagagggtgcccaagtctttccacccactcaggcagggagacactgatctgcctgccctacatctgggcagcttctctttcccgccagcacccacgccataggggtcgggcgtgcctggcaggggaccagggatcttggtgaggtgtggatggggcgtgcaggtgctgccggagctgccttcagggatgagcacaagctgccccggtgcagggctgagggcacagcgagagcaaggccctgagccgggcacaagggtgggtctgtgctgtcagaacctctctctggctgccgcagtgtatacgccggagtgcaggggctgagagacagggagcccaggtgtccccacacaggagataagggcctgcccaggtaggtaggggagggcacaggtggaggagaggagtcaggatgaccccaggcttcctgccagaggttgtgtggatggggtgccatcagggagaggggctgcaggaggtggtggagatgagaaattctgtttggacacagcgcgtttagcggggagcaaggcctgggcggggggcagcgaaggcggggtcagttgtcagcacggtggtggggatgagcctgggatgaggcttggctcccactgggagtgcccagaatgaagcagccctggcatctccttttgtttatggagtagtcagagagtgggggaggccctggagagcaggaagtcctgggaaacaaagccagggaccagcaggaagggcatgatgggcttacatctatgtagaataaagaaagtcaatttgaaaataaatgaaaaagaagggtgtgatggggaaggcctcctgttactgagtggcagctagacggggcccttgagatgcagagtgaaggctgggtggaggaggcggaggggcgaggggcagatacggtgctaaaccgggctctgcaaggcctcctgcccagtgtgctgggctctctcaccgtcctgggcacttccactgtggccccttgcgccaccactggcctgagaaccctcctgctcttcctcccagatgaccttgcttccaaagccaacattgtgatcgacccactggagctccagtcaaccgccatggatgacctagatgaggatgaggagccagccccagctatggcccaggtgccgcagtgggggcaggcggtgggatttgtgttgggcttatcctgtatcttatgggcaggggtctcatccagggccacttcccgctccatgcaggcaaagggtttctcactgggctggtgccttgctgtgggtggaggcatggaccctccctcacaattctgcagccccgtgggccaagggaaccctgagccagccctggtcctggccgcctttcttcactgcagcgccccatgcaggccctggctgttggggggccactgcccctgccccggcccggctggctcagttctccaactttgggccgagccaaccgcttcctcagcacagcggctgtgagcctcatgaccccacggcggcctctgagcacctcggagaaagtgaaggtccgcacgctgagcgtggagcagaggacccgtgaggacagtaggtgcttggtggggtcaggcaggtccccgaaggacccttccacagtgtacagtccccgatccgggcaaa

SEQ ID NO: 29603 - DNA, 2300 bp, Homo sapien
gagctttgtctgatcagtcctgggtccatcagtttgtccatgtgtccggctgccagcccgtcccttgggatccttcccctggggtgtagccttgttcattagtatatactcattccttcatgctttcctcagcagaacacttccacttctgaggtgagcttttgccccatgcccttcctccacaggtgttgcctttttataaagacctgatagcagaataaattggtgtttccctgttgacccagcaccatttctgtgggcctagaatatggccctcaacccttagagtggggcagtgagggcttgaggagtgacccttcctttctcatggttttagtcattttggctgccagcccttaatggcacagatctgctgcttctaacagatggccaggaggtgacaccgatttcagccattgccaaggttagcaccctctcctttgagcctagggccacactgttcattgtcactttaggcaagtgcctgtttggctttaaaggtaagcctgccagctgtgagaagccttggtaactgatggactcatttcctggtccttaaagatgcagcctcttaagggctccttgatggatgccatctctcctagcccccagccctggtgccactggtgggcaggttcccattctttggggctgggagggacagcttgcctgtttctggtcacaaattacagtcttctctcctgtaccattctgtggcttcagccatgggggcagtagcccttcattagtgtagatagtcattccctggtagggtggagggtaagacatagggtctggaactgtttgggaccttttggggatgtcctgtgcctcccagattcctcgattctgggaggagaggctgccgcattctgctgctcctcacagcgagcaaagctgcacccacttacattcagtattttcctggcactacaaagagtgggaaggcctgggatttgctgctgctcccttagagcagggcccctcttttcagcactttggacacctggagacccagccctgttatttaatggtagtgggcaagtgtgtgtgcatactgtctgccactgctttctccctgccccatgccagagagccctgtccctgccaggcccagccttcttagccccaacttgggaacaaagtgcaacatgggatcatgggttggggtgctcaggtgagccctctctatagtgcttccctgggccaagctgacaccagcccctgagggtggggtgggacgggtggtgcttaaaagaggaaggggaccagtgtagcaacttgccagggaccccacccctccctctctgggcctgtgcagtgagcatggggattcccatcaaggggcctggcacctgtgctagttacgtagccgctgctcacgcgctcactcctgaccacatgcacgttccctagatgcagactgctttgaactttaaagctgtacaatttggttatgtttgtgctgacttaaaatatattttaatgaggaaaaaataatggagaaccctgggaaggacctggttcttttgcttctcggggaactgtaagccctcgcgttctgggaatcgctctctgctgctctttcctggaagctaagcctgtctccaccgcccgaggcctgcgccggtggctcccgccgcagttgcgtttgctttggaccttgcgtgcgggggagggggtgctcggtccgagcccgctcctttctgtacacctagcgctgcccgccccgcttgtgtctgaggtcgtgtatgtcaaaaataaagccgctagaaacggaggcgagtctgtctttgtgaaaatcccgtggcccgggagccttccctggtcaccctcggggcgaggccggggccgtggggcggggccggcggctgctggaccgcggcgaagcagggaacaaggcctcgcccttggcgccagttccgcctttggatccgccaatggccagctgacccgcgggtcccggcccgggtctccatggcagcccggcgtactcgggcgctcattggctacgtctgtcgcagcgctgcgctccaacgttccgacgccggcggccgtgccacgtacgcggcagccgattggcccgcggtggtcgcgtcactgcccgcgccgggtccggcctgagttcggggccagcagccgtctacccggtgtcgcgttctgtgttgtggcggccctggatccggcgtcagggcgaccgggcggacgaggtggagccagagtctgtcaggcgggttggtgaagggcgcggggccgggcacggcgttgggagtgcgcggcagggaccggccaggcgggct

SEQ ID NO: 29604 - DNA, 2300 bp, Homo sapien
aggcctccttcagcctgaccggggccagggcagaagccaatctacagtactgaacaggatccacagctgcaatgaccacctccagagaccctgacctgccctccacaatccagcaactctatttttaagtatttactacgtggtggaaactgccttggacttttgctgtggaaataagagacaatggtttggtggtgatgacagtgagttaatagatgacagcacagtggtatattgatatggtagagctggcatagggtaccttaggagtcatagatgtgtgcactatactcaggtttggagagaatggagtctaggaatactacctggggcagagttgccttgacctgaaggcagtattgccttgtcccaggtagtattcctagacttcattcaggataactaggcaaaaaaaaaaaaaaaaaagaagtgtatgtgcattaaaatagtgcaatctggggactgggagtacagaataattgattttggtgatagcagtgaaataaaacatagctagctgcctgggcagctttgggttaagattttgcagttttgcagtagttttttctttctttttgtcttttttgagacagggtcttgctctgtcacccaggctggagtgcagtagtgccatcacagctcagcagtggtattttgtaccccattttgtccataattacaagatccaggaaaaacaacaacaacaaaaaacccgatggtttgtctcttacatatgggaccatattcctgctctactaatactttttcttttttggtcttaatctttctgatgtattcttgctgactacattcctaatttaaaaatacactcagtgttaagaaatttgccaactactttaaatattttgagagaaaattgacattataaagagggagtttgagtacaaggagcttttccttgtcccactggttggtatagagtcagacagaaagggaatggtcataaattgacaaccatagatttaaagtagaagaaatctgaagcctgaattcctttgggaaaagcaaaaccttaatgatcctatagcaggggtccctgggtactggtccatgacctgttaggaactgggcctcacagcaggaggtgagtggtaggcgagcaagcaagcaaagcttcatctgtatttacagctgctccccttgcttgcattaccgccggagctctgcctcctgtcagaccagcggtggcattagattctcataggagcatgaaccctattgtgaactgcacatgtgagggatctaggttgagtgctccttatgagaaactaatgcctgatgatctgtcactgtcttccatcaccccaagatgggaccgtctagttgcaggaaaacaatcttagagctcccaaggattctacattatggtgagttgtataattattttattgtatattacaatgtagtaatagaaatacaatgtacaataaatgtacagcctcaatcatgctgaaaccatcgcccccacacccgttctgtggaaaagttgtcttccatgaaactggttcctgctgccaaaaaatttggggaccactgtcctacagctcagcaatgaatggcctgcctggtccttggcaccttcagtggagaatttgggaatctcatgtgacctaattcctcagacagaaacccttcctctgagtgaaggagagacccttaccagtactggatatcctaaggagtctgaacagaacaaattcccattgccttctgtttttttctgatctcatctttgggtgtgaagtaaaccgggataggtgctttcctgatggttgtaatgtgctgtagctctaaaataaaatcctttagataactcagaagggaggtgggaactaggaaaggcagagaatgtgggcttctgtgcacaagatagatggaagaggccaaggttgcatcattcagcaaaaatttaaccaactgcctttcatgtgccacgtagtattgtacgtgctagggatacacatagtagggaacaaaacaagagtccctgctctcactcatggagctccagggaaattgtgactcacccagtgttttgattccttcttcctctcttcttttctgtaggacagaataataagctgaatagaatctgaccattggctttcacctggccaggaccttctatgtagctctccttttgtggcccatgtgctgcatcctctgccctcagtgtgcaactggcccccaacgcaatgtgtgtttgtcaaaccatggaagtggggcagtatggcaagaatgcaagtcgggctggagaccggggagtcctcctggagccc

SEQ ID NO: 29605 - DNA, 2300 bp, Homo sapien
gcagatatctttttgatatactgatttcctttcctttgggtacatacccagcagtgggattgctggatcatgtggtagctgtatttttagttttctgaggaacctccgaactgttatccacagtagttataccactgttgctttttgagggtcccatcaaacttcagggcaatttgccaactgtatgtggaggttttcttgggaaggatctggagcttttgcactgcggtgaggggtgatgcagacttgagaatcctgtggcatggctggtcctggaggattagcagaatcccccttttgagggttgttggcttttcttcctgatctgtttcttctggttcctctgctctcacatctccctgtgttgacctgagctattgcatgtagccaagtggcctgcagcaatctgctggtgggcaggtcttgctggatgcagtgttggcccactctccatgcccaacctgacatcaggtctcaggcttctgccagctctccaagaggaccttactgtggtaaatccaagttatcacagtctttactcgtctgttgagtctgtgggcctgaaccccctcagggtactggagaacctcccttttttttttttgagacagaattttgctctgtcacccaggctagagtgtggtggcgtgatctcagctcactgaacctctgcctcccaggttcaagtgatcctcctgcctcaacctcctgagtagctgggattacaggcacctgccatcacgtccagctaatttttgtatttttagtagggacagggtttcaccattttggccaggctggtctcgaacctctgacctcaagtgatccaccttctttggcctcccaaagtgctggattacaggcatgagccactgcgcctagctaggaggacctccccttctgaaccagttatggtatcccagggccaggaagaagctgaaagccttctgtgggaacaaaacaaagcaaaacaaaaacgcttcatggggcttccaccaaagttagtgttttaaggcacgcctcaggaacagcaacttggaagcaggttgttccaggaagtggttgtaggcagatttttcctgagttcttcccctgctctgagggctcattaaatcttcctctgagaagctccacttttatcttcattttacagatgggacaaccaaagctaaagagaggctaaggctcaaaagtcagagttagctagttggggcatttgggtgtgggcccaggccacgtaacttcatctgttgttctaagcctgaagccaagcccagagttaggtgttctgtatggggagcaaggtgtgaccatcttcctgggaccattagtctgcttgggaggccggtcatgacagtccagggcaaaagatgctgtcacaggatctcaagacaagatgctctagggaagagaaaagggagtgcccgctgtgtgtcaggacttgtgctaggctctaaacctcaggcaggaaagcatgggcaatgagccagaggctgctgtggcagcacagactgcggtacctcgaggctagtaagggacaaagcgtgggaagctgggatagaggctcctcacactctgaaaccagcaggaggaggtgcgagacccagcacctccatttctagaggtggcgtgaccttggctcggcctcccctctctgagcctcagtttcctctccagagtgaactgggggctgcaccccccttctcccagagtgggggacaaaaaaacgaatagcacaccgctgagattccctgtgtgtgcgcaagtgtatgacaagacgccgccggtaccgcacgagggccagggacgcagagaggccaagggcgctccggcctcgtagtagccagcgaaaactccgccgccagccactccgggaacgaagcgcatgcgccaacccatgccgtcacagtcacgtgccccacgctttcggcagaggccctgagaggcagactctgactgacacgtgagctgacctgtcagcaggaagcacttcccctggcgacgagcaaaaagactgttgattggggatagcaccccctcgggggcgggttctttgcagtcctggttactatgacgcccggcccccgccccctcggctagccgccatcttgttgttgatccgtacccagtgggcagcgccgggagctggaccaagcggccggtgagaggccgctgtagcggtgctcagccacctgtgctgcctgccagggggcgggccgaaacctggaggcccggggggcccagctcccgtagggagccgtgggcgctcggtgcccgggccgggcaggtgagtgacagga

SEQ ID NO: 29606 - DNA, 2300 bp, Homo sapien
agcaatgggggcctttgagcaggaatgacctgggctagcccttgtttagataatcccagctgctttcagaaaaggattctgcaataagagtggaagtccctgccctcatccaggcaacgaaggggagggcctaggcctgggcagggcaggtgcactgaagggggtcactttggggtatgttttggaactaaaatcaagtcttgctgatgcatggatgtgggcaggaaaagaggcatcaagcatgactcctacatttctggcattaacagctggttggatgaaattgccataaactgatctgggaaagactggagaagagtgggtttggagaggaaaatccaatgatcatttatggacacgtaacccttgagatgcctgttagacatccaagaggagttgcagagtcagctgctaggtgtatgactctggacttcaggagagagatcagcactggagccttggatctgggaggcatagtgagtgaatggatggtatgtaaggccataggcctggataaggtggggtgggaggaaatcagtgtagtcagagggagacagcaatcgggactgtgccctgggacattccatgaggtggaggtaggggagatatgaagcagagctatcaaagaagctgagcaggaacagccaggagaaatctgagaatgtggggactcaggacccaaggggagcaagcattgaatgctgcctaggcagtgagggtgaagaacaaaccactggattcggcagtgcataggtcactgggaaccctgacaagggcagttttgtgtagagagggacaagcctgattagagtgtgtggagaagagagtgaggactgaagaactggagatggcaaataaagacaaccgtttttgtttttttttttgagacagggcctcactctgtcacccaggctggagtgcagtggcatgatcttggctcactgcagcctccatctctggggctcaagtgaccctcctatctcagcctctcaagtaactgggactacaggcatgtgccaccacactcagctaattttttttttttttttttttgtagagacagggtttcaccatgttgtccaggctggtctcgaactcctgatctcaaacgatcctcctgcctcagcctcccatacaggcataagccaccgtgcctggccagaaaacttaaaaaaactgacatataaatacaataaatagacagatctcaaagttacagcccagtaaatgttaaaatctgtagacacttgtgcagctgccacccagatatagaacatcctcagcaactcctggatgccacctggtgccctatccaactgatattcccaacggtaaccagtatttgtatttctatcataaaggattccttttgcttgttggatgtagacaactttttttttcttttttctttttttttgagacagggtcttgctctgtcactcaggttggagtacagtggcacaatcatgactcactgcagcctcgatctcttggggttcaagcaatcctcctacctcagcctccagagtagctgggactacaggcctggatcaccacacccaactaattttttgtagagatggggtctcactttgttgcccaggctgatattgaactcctgagctcaagtgatcctcccacctcagcctcccaaagtgctgggattacagatgtaagccgccacacccagcaagttttgagagattttgttgacggttgggctcattttttataggcagataatgttctaatggagggggtccagctggagttgagactctgtggggtagcaggtcctgggccaaattttcctgggtgctgtgcttgctctatctccacggattgcatgaccagtttcctcatctgaaccttaatcctcctccccttccatgcccttagagttgtaatgaatgggggcaatggaaaatgggatattctgagcctctggaagcctgccagaggtctagaactcagtcaccagggatgggtggggatagaatctgggaggcccaggagtcccgcctgcccagctatgtttgagcaactgacctggcaacagggtgagtcagacaaacagcctagctttctgaagcctcctctgctgtctgtgtcttcaggtcatcatggtgctgctcaggctcctcgtgttcctctttgctccggtggtctctggtgaggaggtggtgggtgggggaaccgtagttttcccttggagtcctgacccttcccagataagctaccatggaggacagggattgggggagaggtaggaaagtgtaagaatctgaacccctggccct

SEQ ID NO: 29607 - DNA, 2300 bp, Homo sapien
aaactgcccttgtcagggttcccagtgacctatgcactgccgaatccagtggtttgttcttcaccctcactgcctaggcagcattcaatgcttgctccccttgggtcctgagtccccacattctcagatttctcctggctgttcctgctcagcttctttgatagctctgcttcatatctcccctacctccacctcatggaatgtcccagggcacagtcccgattgctgtctccctctgactacactgatttcctcccaccccaccttatccaggcctatggccttacataccatccattcactcactatgcctcccagatccaaggctccagtgctgatctctctcctgaagtccagagtcatacacctagcagctgactctgcaactcctcttggatgtctaacaggcatctcaagggttacgtgtccataaatgatcattggattttcctctccaaacccactcttctccagtctttcccagatcagtttatggcaatttcatccaaccagctgttaatgccagaaatgtaggagtcatgcttgatgcctcttttcctgcccacatccatgcatcagcaagacttgattttagttccaaaacataccccaaagtgacccccttcagtgcacctgccctgcccaggcctaggccctccccttcgttgcctggatgagggcagggacttccactcttattgcagaatccttttctgaaagcagctgggattatctaaacaagggctagcccaggtcattcctgctcaaaggcccccattgctcctcatcacaccaagaacaaaacccacattctgctctaaggccgttagagcctggttttgctgaccttttccctcctgccaccaccaccaatcacagacacctgggccttctttatgtttggccctgtccagctcctgtccgtcggggtctcttccctggctgctccttctgcctagaatgttcttcttctccttcttctccttctccttcttctccttctcctcctcctgcttcttcttcctttcttttttttttgagacggagtctcactctgtcgcccaggctggagtgcagtggcgcgatctccgctcactgcaagctccgcctcccgggttcacgccattctcctgcctcagcctcaggagtagctgggactacaggcgcccgccaccacgcccggctaattttttttgtatttttagtagagacggggtttcaccatgttagccaggatggtctcgatctcctgacctcgtgatccgcccgcctcggcctcccaaactgctgggattacaggcgtgagccaccgcgcccggccagaatgcccctcttcttgattgcatcttgatgtcacctcctgtgagactgactttccccaagctagcccacggccctcattccctggtattttcctgttgctggtatgtccagtctgtctgcagctacactacccttgagcctagcctgtgttgatagagcagcctcagcaccgaccctcagtctgcacctggtaccggcaaagggaatgccgacggtcgcgcgtcgccgctggactcgcgactagccaagcactccccactagagggcagtcccgtctagctcggttgggacgcggctgaggccccgccggtgcgctgccacaaagtcccgccctctcttgagtcctcagacgggctgaaccccacttccatcccgttcagggagtgccaaggccagcctcacgaatgggtcccgtgggtcaggccccgagggtccacaacctctctgggtccgaccatccggggtgctctgcctatgtgcggacgcagcacggcgccccgtgagagggaccgctatttcaccattgaacaaacggggaggatgaggcccccgcacggaggcgacctgtcctgcgtcacgcagcaaacgcagggtccactcaacagtctgggggctcggggggtccccgtaccggccccgtccggcttccagttatgaccccgcccttcccacccagaaccgcggcggagtcgggagggacgccgggctttagccccgccccctttggccgcggggccggggcggggcgcggctgccagatgtcggggcggcggcggcgggagctacggagagcgaggagtcgcgcaggcaggcggaggctgagggcgccgctggccggccctcccagccctctccgcgcggctccgccggggttccaagaggagctagtaggttcggtgggggccctggcatggacatgcacagcgctcggcttgacagcttccttagccagctccgctgggaactggtgaggctcg

SEQ ID NO: 29608 - DNA, 2300 bp, Homo sapien
aactctactcctgtgtatatgcccaaaaaagctgaaagcccaggcgctgtggcttacacctgtaatcccagcactttaggaggccgaggcacttgaccccaggattttgagaccagcctgggcaacatagtacttgttcaagaatcaggctgggcatggtggctcacacctgtaatcccagcactttgggagggcaaggtgggaggatcacttgaggccaggcattcgagaccagcctgggcaagatagcaatacccacccccaatctctacaaaagcaagtaattaattaggaaattagccaaagccaggtgcggtggctcacgcctgtagtcccagcactttgggaggctgaggtgggcagattgcttgagtccagagattcgagaccagcctaggcaacatatcaaaaccccgtctctactaaaagtaaaaaaagaaaaattgcactctgggaggccaaggcggggggatcacctgatgtcaggagttcaagaccagcctggccaacatggtgaaaccccatctctacaaaaatacaaaagttagccgggcatgatggcagtgtctgtaatcccagctactcaggaggctgggtcggaagaatcatttgaatccaggaggcggaggttgcagtgaaccaagattgtgccattgcattccagcctgggtgacagagcaagcctccgtctcaaaaaaaaaaaaaaaagaaaaattagccagatgtggtggtgcatgcctgtggtcccagctactcaggaggctgtggtgggaggattgcttgagcccaagacactgaggctgcagtgagccatgatcacaccactgcactccagcctaggcaaccagagtgagaccctgtctcaaaaacaaacaaacaaacaaaaaccactttaacagggtatggtggtgcacacctctagtcccagctacttgggaggttgaggcagccggatcacttgaccccaggagatcgaggctgcagtgagctgtgattgtgccactgcagtccagcctgggcaaccgagtgagactgtctcaaaaagaaaaaaaaaaaaaaaaggacatagcagcactattcacaaatccaaaagttagaaataacccagatgtccatcaacagatgaatggataaacgaattgtggtatatacatataatggactattattcagccattaaaaggaatgaaatattgatacaggctataaactctatgaacattgaaaacattctaagtgaaaggaaatagacataagaggtcacattttgcaattctttttttttttttttttttttttgagactgagtctcactctgttgcccaggctggagcgcagtggctcgatctcagctcactgcaacctccatctcccgaattcaagcaattcttctgcctcagcctcccgagtagctgggattacatgtaggcatgcaccaccatgcctggctaatttttgtacttttagtagagatggggtttcaccatgttggtcaggctggtcttgaactccagacctcaggtggtccacccgccttggcctcccaaagtgctaggattacaggtgtgagccaccatgcccggccacatgtatggtaattattgaatgtgtttggtatgttcgttgtgggtgatgaaatattttggaactagatagacgtgatggttgaacaacactgtggatgcactaaatgccactgaattgtacactttaaaattgttaactttatgttacatgaatttcacctaaattaacaacaacaacaaaaaagaacttaagacagcacttggtttggctattacgtagtttcgtgacaaacagtggtccatctcccagagaactggccccaggttcctaagaaggcaaaaggagacacaggacctctctgcactattttttttgcaacttcttatgagtctataattatttcaaaataaaagtctaaaaggaaaataagaacatgtgtgaatgtggctgccccatgcctcccaccctcaggtctgacactcagagactgatcacctcttgagagtcctggaactcatcccaggttttagaccctgaatggcctgtctggggctggcgtctggaggcaggatcaggagccagctcagagcatagtttaactttcacttttcttttctccaggaagagagctgtgaccagcagcgtcccttattcgcttggccttggttcctgtttgcactggctacagcagggcactggcccctactgtcaccgccacctacacaaagaccctatctctgagcgctgcagcctactgttcagccccaggtttg

SEQ ID NO: 29609 - DNA, 2300 bp, Homo sapien
gaccctgttatttgtgttatttcctgcctttccgagtcctgcagtgggctgccctgtaccctgaacctcatgagcctctaagggaaaggaggaacaattaggacgtggcaatgagacctggcagggcagagtacaagcccagcacccagtgtcccagccttactgggtccttaccctgggccaaacagggagggctgatacctccttgctcttcctagatgcccacctcctacaatctcagcccacaagtcctctccaccctagggggcttgctgcatggcaataactcataatctgatttggaggtttgccctttacaggggcagattttctgctcagttcaacaatgaaatgaagaggaactccctctttctacagctcacttctatcagaggcccaggtgcctcagagccacattgagttgctttttctgggatgaggaagtagggttaaactccccagtttcctgagggaggctcctgacaggtgccctttgtcagaccctaccacagcctggataggcagccacattggtcctcgcccttgctcggcactccgtggtggtcctgcccttctccctgcatgcctgtgggtctgctctggtgtgtgaaggtcggtgggttaactgtgtgcctactgaacctggcaaataaacatcaccctgcaaagcctctggccaccctctcgcctttgcttcctctgtcctactggggaggagcccctggaaggcagtggggaagggagaggctgggagcaggttcacaagtagtggctgggagtagtagtgaacagtgccctgtggatttcttgggctgagggtgaagatcatcctcaccacagtgtattcctcaatggtggtggtggtgggggtcctctgaactctagaaatccatgtgagtagtgggtcttgggctgcatttggaccaaggaatactccctgggctgagagctcaagtaagggctgctgtttttgactcctgttgaccgaggagccttactcttgatttaggcatagagctggaatctacctgggccagccaccgcaaggacagaccctgctcatagccaaagatagcttccctgagctagggagagggtgtagggtgagcaatgcacaaagattctatgctgctctgtgttgattccttctttctgtgaacacctgtgctttccacctatgccccaaatgaaatctcactctgggtctatttcagctggagcagatcagctttatattatgggactatgcacagggtttcttctgggtagagggagtaacactgccacagatactaagcctaaaaacccaaaagttgacttactccagcccaggtgggcctgggtgaactcaccagggatgctgctctctgggaggacctcaaagataacctcctcaaagataacttctctgatgtgggaataataaaaaggatttgttagtctctagtctttgaagcatctgggcctccaaaattccaaccctactacagtctcaagcataactgatcctcctgagagctaagagctaaagtcagggtactggccctagtgtctccaaactcaaggatagtcatatcttacttggatgaagccaaggttggcctggggtgacctgagggactggggcctatgtgtccatctttctagaatcgcccggaactgaggactgagagggtagggtattgtggtctatgggaactacagaccatagcgcatggtccatcactgtccagagcccaagggacccatcgggaccattgttctattcccttgcggctgcggttttctctgccttggcccagcctgcctcgcgccagctctggcatgggaccacaatgcgctgccttgccctggaaaagggtccagctggcagcctcgctgctccccgccttgatataatgctgcgctctcaagtggcaggtcgagtctccccagaggacgcctgagagcgaccgcgctccgcccaggattctctacggcctcggggccgctaagccccgcccatagttccgcccatccgagaatttgtccaatccaggcgaagtattcacgctccgcccaaagttttgtgttgtcacttccggcccgctccaggaagtcgtgctgcggagccaaatttgaagcaagcggaggcgcgggggcgcgtctacgaagccggacctgtagcagtttctttggctgcctgggccccttgagtccagccatcatgcctatccgtgctctgtgcactatctgctccgacttcttcgatcactcccgcgacgtggccgccatccactgcggccacaccttccacttgc

SEQ ID NO: 29610 - DNA, 2300 bp, Homo sapien
cttcacatacaccagagatcaaggggctgctctggtggggagcctgaaaacagccaatgatgtagggtcagcacagaccctgcccactgctggacatggtccagcccccttcccatgtccagctctcaaagcctgattcagcctccacaatcctgagacttgtgtcaggcaggaaggggactgataactccagggaccagctacagcgtccacacacacgtgccagcaagcatgcctgggtgcacaaagaatgcagacacacgtgcccctgggcaccactgcatacactgtgctgttgcatctccctcggcaaaagagagcatacacaacacgtacacgtgtgcacacacaccctgccacgtgctctcacccacatgcacagagcgtgcttaggaccaagaagaggtggagtactgccagcagcaggcagggcgctaaggagccaccccttcccctgcctaaaaatccccattccagcttctcattgacccccatgcctggatagccatgaccctcaggaaagacagaaaacatgtatgtggcatgtgtggggtcagcaagctacagcttggctacaccataaaactcagagacccattgtttcaagaatagtgggcagatggcaggaaggactcagtgccaggccattcattcattctgcagacatcagccgagcatactgagatgagaaacgggttctgccttgcagatacccagcctgccaggagattcctacccagtggtggggtgggtcccataacccgagaccactcagagcccagggaccccagaagtggcaccagcctggcctagaggaggtaacaccaagccagggaggaaggtgaagggctcagtaccccctctggaggaaaattttgaggaaccttgtttgaggcggtcatttcctaagctagccttcagtctgagccccagccccagcttctggacttggacagtccctcctgtcatcagccatgggtggccagggcagcctcaagatggctgagggtttggggatgaccccaactccctctcccacagcagggtcaggaggctcactgggaggagtgaggtgggataaaacccagctccagacactgagaggcctgagtctggtcttcagatactggccttaggatggtcctcagggcttgtgaggggtgtgggtcaggctttgggtccgtgagcctcactgacaagggacagagaaatggccaaggacttcctttaaagcttcctcctggtggttctgagcctcctccctctgattagcacccaggccaggtgggataccttggtgccacagttctcctgtgtccccatatcccaggccaggccactagagtgatacaactcatgaagtgtttgacagtgattagactgaaaagaaagcagaggccacaccatgtcacaggtgacttttatagtttgggaaatttggtgccacacaggaaggggctgactgtgctgccacccttgctggtacttatgtttgggaaagactctggccttgcaggagttggggatggggtgggataggagactttgctactacagtctagggccctcactgttttcacactgactacctgcaaacacacacctctgtgtgtttactgctcctagctaggggatgcgtagctaggggatgctaggggatgccacactgactacctgcaaacacacacctctgtgtgtttactgctcctagctaggggagcctgccctagcccgactgcccatctggtttttctaagttggtcctgccttttgggtcgggttcggggagctgggcaaagccccgttccctagagactaatgactggcaagcgatcctatgcagctccaggactcaggctttcccccaactctccactcaccaccccttacattgggcataggaggcctcctccggccccaggctgagggcctaagggagccattgagaaccttggccagggctaagcaggccagtgctcaccagcaccgctgccatcccgcgcgctcctgctctccagtgggattctgcccttaaggctccgccagggtcggggcggggccggttgggaggccccgcccccagcccgcccccggcccggggtgcgaatccggtgccggcaagcggctggcgatgctggaggttcgctagccgaagcggctgcatctggcgccgcgtctgccccgcgtgctcggagcggattctgcccgccgtccccggagccctcggcgccccgctgagcccgcgatcacttcctccctgtgaccaaccggcgctgcaggtgcggggcgggccgggctgg

SEQ ID NO: 29611 - DNA, 2300 bp, Homo sapien
ggggcccatagttcacagcccagacccaccctgtggaccttccctgtcttctagggtccaggcctatctaactgaggggtctgtcaggctaaggttgtcccccaggggcctcagtctagtgttgggggaccagttaccaaggggcagctgctgagatccaagtgtgggactaggctcccccacccccactcctcataaacagaagagagaactctgggaaatcacctagtcggaactacgttttctttttctttttttggagatggagtctcgctctgtcacccaggctggagtgcagtggcacaatctcagctcactgcaacctccaccccctaaattcaagctattctcctgcctcagcctccctagtagctgggattacaggcacccaccaccacgcccggctaatttttgtttttagtggagatagtttcaccatgttggccagatctgtctgttcaccatgttggtcttgaactcctgacctcaagcgatccacccgcctcggcctcccaaagtgctgggattacaggcgtgagccaccacgcccggtcacatattttattttaaaaacatttttagcagtttttttgttttgttgagttttgttatgttgcccaggctggtcttgaactcctaacctcaagcaatcctcctgccttggcccctcaaaggagtgctaggattacaggcatgagccacggtgcccagcccagaactacattctcattgaagagaataagatccagcaaggcctacagagcatgttggaagtgtcctgagagccaaagcccatgattcctccatatcaggggggcactgggtagagccaggaaggaagggggagtccccaaggcccatactgtggaccccattatacagcttccatatactgaggctgcagaggaggtatgggcctccacttacgtgcctctctgactctgaggtccagtcagcaaggccagatcccatcctaagacccttatggccctgggagagcagggcataacacaccttcctctgacaccatcttgtcgctgatagctcaggagaagcacatggaagaatggtcccggccgggcgcggtggcttacgcctgtaatcccaacagtttgggaggctgaggcgggcggatcacctgaggtcaggagtttgagaccagcctggccaacactgtgaatcctgtctctactaaaaatacaaaattagccgggtgtggtggtgcgcgcctgtaatcccagctattcaggaggttgagacaggaggaggttgaggctggagaatcgcttgaacctgggaggcggagtttgcagtgagccgagatcgcgccactgcaatccagcttgggccacagagcaagactccttctcaaaaaaaaaaaaggacagtcctttcccacaaagggtggcgccccataacatctcttgtaagtgccccacatctcccctctggtcttccacacaatcctggtctctgttctccacatggtgggcccccaggccacctctgggcaccagccactgagggtgttgctactaagtgcaaactagttccaccgcaagcaaagagcccagtgtcctgccccccttctcgctgcgaaccagtcggtagtggggggatgggatgggacggctcagactggctcacctctctccaggccacaccatgcacatccacccacaggccgctgagaaaaaggcgccaagacgccaggtgaaggtacaggagccaggcctccaagggccggaagagtcggatgggcggagggcctgggctaggccaagccttcctcgcggccccgcccccacggcccgactccgcccgcccagcccggcgccctcgggtcggctgagcgctaagcgccagtgtacagcggcggctggggcggcaggtgaggcggctggggcgttgctgtcgtgcgtccgcaggcgtcaggtgctcagacccgagggccgggaagggatttgggtttcacaggaacctggggcgggggtccgctatcttggggctgtcgggaccgctgcttaaatttggcccagtccagacctcgagtcgggcccccagccaggcccacgcccaggtccaggcccaggccggtagggatcctctagggtcccagctcgcctcgatggagctcctcccgccgctgcctcagtccttcctgttgctgctgctgttgcctgccaagcccgcggcgggcgaggactggcagtgcccgcgcaccccctacgcggcctctcgcgactttgacgtgaagtacgtggtgcccagcttctccgccggaggcctggtacaggcca

SEQ ID NO: 29612 - DNA, 2300 bp, Homo sapien
aaattaatttgtcttctatggagatgaattctatagggtgtaaattcaagttaatgaaatataggcaggatattagccaggcatggtggcttatgcctgtaatcacagtactttgggaggccaagatgggaaaattgcttgaggccaagagttcgataccagccttgtcaacatagcatagtgaaaccaccatctctaaaaaaaaaataaaaaaagaaaaagaaaaaggaaaggaacatagccaggacatttctgtaccaagcagagaatgttatatcttgacttaaactctccttccttccttccttcctccctccctcccttccttccttctttcttaactttctccttcttgttgtccatgatcatggctcacttcagacttgatctcctgggctcaagtaattcttcctgcttcagcctgtggagtaattgggattacaaggctgtgccaccaagcccagctcatggctcaaactcttatagtgtaataattagagaaaacaactgtataaatgattcttgccctaagggagggaacttggacttctgagctaatgaggagataaaatactgagtgatctgtggagacctggagagactctcagttaaggaatagggcattttcttatgtccttacctaaaagtgggggacatgggggtgagaaagcttcccttagactatgtgcaagaacttgatagccttatgcaaagccatcttcagtgaaaggccacagctttgtcaccatgtcagtcacaggccagtgttgtggaagcaggctacaagtggcagccatctgagactggaagaaaagcccaggggcggagctctaccctaactccagtgtagggcttagagaggaaaaggacactgcccccaggtgcttgtggagcagcagggaaagtcagaggagtgatctgactttttttttcatcctattaacttttgggagaattaaccataaggctgtaaagtgaattaattgcttcagaaaagaacatgagcagtggtgccaaacactaattttactttttaaaaccatctctaaaaataagggtcttttgggagagcctgttgttgactgttttcctgttgtttttattgctttgcgtctaggaaattacaaacaatgattctttgcaatggtaaatcacctggggagcttttaaaacaatagtgatgcctggctccccaacactccaccctactctaaattcaattaaatcaaaatctctagggctggtgtccaggcattagtttttttgttgttgtttttgagacagggtctcgctctggtgctcaggctggagtgcagggcatgatcatggctcacagcaacctcgacctcctggaatcccacttcagcctcccgagtatctgggactacaggcacacgccatcaagcctggctagtttttgtatttttagtagagatggggtttcaccatgttggccaggctggtctggaactcctgacctcaagtgatccgcccacctcggtctcccaagtgttgggattacaggcgtgagccgcctcgcccgtcctagttctttttttttttttttaaagcttcccggcttattctatgtgccgtcagagttgagaactaccgttctagagcattatactgatacattaaaacgtggctacaaatatgtttttagaaacaattagtgcgacttttgcgcatgcccacatcctttacagcctgtgtggctgggcccactaatgacatttatccagtcccccaaacttgcactgtccttccacaatcagtgggagaaacaatcctaacgtccctttctctcacttgaaatgaactgctagctggctcggacggagaggcccagagtccagggctgttctgtgtgggactctagactcggaggaggcgcccaggcccctagaaggcggcgccggatgaggcaatcgcggacccgggtcaggacctgcccacggctctgctgggactaggagcccagaaccagtccctcggcgccgcaggcggccaaacgctaaggactacatttcccacaatgcaccccgggggcgggccgagtcgggctgagcggctggagctgggccttggccgcgagaggccggcgaaagctatcttcctgcaccggcggccgggtgagggcggtgggagggagcggtgcctgcgctgtggccatgtctgtgtacgcagggggccggggccccgcgaagctgtgccctcaggccggccccggccggacacccttacccctccatgggtccggcagagggcagtgaccggcaccttctgtgcgtcctgga

SEQ ID NO: 29613 - DNA, 2300 bp, Homo sapien
gtgggtgcacggccatcagccccttttctttctttcttttttttcagacggagtcttgctctgtcgcccaggctggtgtgcagtggcgcaaatctcggctcactgcaagctccgcctcccgggttcatgccactctcctgcctcagcctccccagtagctgggactacaggcggctgccgccacgctcggctaattttttgtatttttagtagagacagggtttcaccgtgttagccaggatggtctcgatctcctgacttcgtgatccgcccgccgcggcctcccaaagtgctgggattacaagcgtgagccactgcgcccaacctctttctttttcttttttgagacggagtcttgctctgttgtgaggctggagtgcagtggcgcgatctcggctcacggcaacatccgcctcccgggttcaagcaattctctgcctcagcctcctgagtagctgagattacaggcatgcgccaccacgcccgggtaatttttgtatttttagtagagacggggtttcaccatcttggccagactggtcttgaactcctgacctcgtgatccacccgcctcggcctcccaaagtgctaggattacaagcgtgaggcactgcgcccggcctctttctttctttccttttttctgagacggagtcttgctctattgtccaggctggagtgcagtgacacagtctaggctcactgcaatctctgcctcccgggtttaagtgattctcctgcctcagcctcccgagtagctgggattacaggcgcctgccaccaagcccgggtaatttttttttttttttgcgacagtctccctctgtcgcctaggctggagtgcagtggcgctatctcgactcactgcaagctccgcctcccgggttcacgtcattctcctgcctcagcctcctgagtagctgggactacaggtgcccgccaccacgctccactaattttttgtgtttttagtagagacagggtttcatcgtgttagccaggatggtcttgatctcctgacctcgtgatccacccgcctcggcctcccacagtgctgggattacagtcgtgagccactgcgcccaacttctttctttctttctttcttttgagacggagtcttgcgctgttgccaggcaacagtgcagtggcgcgatctcggctcactgcaacctgtgcttcccgggttcaagcaattctctgcctcagcctcctgagtagctgggattacaggcatgcgccaccacgcctggctactttttgtatttttagtagcgatggggtttcactatcttggccaggctggtcttgaactcctgacctcgtgatccacccacctcggcctcccaaagtgctaggattacaagcatgagccactgcgcccggcctttttctttctttctttttttctgaggtggagtcttgctctattgtccaggctggagtgcagtggcacagtgtcggctcactgcaacctctgcctctgcctcccgggtttaagtgattctcctgcctcagcctcccgagtagctgggattacaggcacctgccaccaagcccgggtaatttttgtatttttggtagagatggggtttcaccatgttggccaggctggtctagaactcctgacctcaggtggtccactcgccgcggcctaccaaagtgctgggattacaggcgtgagccaccgcgccccgccaaccagctggagatggcttaaacttactcccgaagaagctcccttccatttctctcacactaacggacaataaggaggcctcgagctaggcaggccagggccgtacccgagctgctggcagggagcaaacctcaggaaagtcaagccaccaaaaaactgtaagcctcaatcaactgagaggaaagcacaagaggaccaggtgtcacagggcagaggccaaaccacaactcccagcaggtcacgcggagtagggcgggtaagcgcgccttcttattggatggcgatggacagcgtgctcttacgacccaccccagaaggcaagtcccctgcgcgcggggcacggcgggagtaagagtctgcgggaccggcagctgtacttcatctcccagcgggccgagcgctgaaggcagcggcgcggcgcctttgtggtagcagtggccccgcgcggaggaagttccggtgtccgcggcgctgggtcggtggcggaggctgaggagaaggaggagcgggccgtggaggcttcgccgcctaggtaagggcccgggactggaggggaggcgtgccagagcctgccagggaatagccagcagacaggcccgct

SEQ ID NO: 29614 - DNA, 2300 bp, Homo sapien
gaagtttttaattttggtgaagtccctttatctactttttcttttaaagttccttgtgctgtaggggtcatatttaagaaatcattgccaaatccaaggtcatgaagatttgcctctttttcagtagctataacaaaggtcctggaaataacttcttatcttgacttgagttacatgtctgtcttcaaagcaatgactgtggtgagggtaatagattattccgattgctcatgctggatggtgtccgatcaggtctgagacagtggggttgatactacagtgctgtttccaaaaaggaagggctagtgagcgctagaaaaatcagtaaatacttacttcatgtagtaaatgtgaagcattcatagcacattgaaaagtttatggtgcccagagtacctttttttttttttttttttgagacagcctcactctgtttcctgaactggaatgcagtggtgcgatcttggctcactgcagcctcaacctcctgggttcaagcgatcctcccccacttcagccttccaagaagctgagactacacatagtcatcatgcctgactaatttttgtatatatattttttaagatggagtctcgctctgtcacccaggctggagtgcagtggcatgatcttggctgactgtagcctccgcctcccggtttcaagcgtttctcctgcctcagcctcctgcatagctgggattacaggtgcctgccaccacacctggctaatttttgtatttttagtagagatgagatttcaccatgttgcctaggctggtctcgaactcctgacctcaggtgatccacctgcctagcctcccaaagttctggtaatttttgtattttttgtagagatggcattttgctatgttgcccaggctggtctcaaactccttggctcaagcggtctgcctgccttggcctcccaaagtgttgaggttacaggtatgagccaccgtgcccgaccccagagtacacattttaattaaaaacttatttttctggccgggcacggtggctcacgcctgtaatcccagcactttgggaggccgaggtgggtggatcacaatgttaggagttcgagaccagcctggccaatatggtgaaaccccatctctactaaaaatacaaaaattagccgggcatggtgacgcgtgcctgtagtcccagctactcgggaggctgaggcagaagaatcgctcgaaccggggaggcagaggttgtggtgggctgagatagtgccactggactccagcctgggcgacagagagagattctgtctttaaaaaaaaaaaaaaagtatttttcttattataaatttaatatgtaagtgatgtaagtgtttgaaagtgacttccagctggatgcggtggctcatgcctgtaatcctagcactttgggaggccgaggcgggcggactgcttgagctcaggagtttgagaccagcctgggtaacacagtgaaaacccgtctctactaaaatacaaaaaaattagctgggcggccggcgtgcgcctgtagttctagctacttgggaggctgaggcaggagaattgcttgaacccggaggttgcagtgggctgagatcgtgcctttgcacttcagcctgggcaacaaagcaagactccatctcttaaaaaaaaaaaaaaaaaagaaggccgggtgcagtggctcacgcctgtaatctcacactttgggaggcctaggtgggcggatcatgaggtcaggagatctagaccacagtaaaccccgtctctactaaaaatacaaaaaattagctaggcgtggtggcgggcgcctgtagtcctagctactcgggaggctgaggcaggagaattgcttgaacccggaggttgcaatgggctgagatcatgcctttgcactccagcctgggcgacagagcgagactccatctcaaaaaaaaaaaagaaaagaaagaaaagaaagaccttcaaaattattgctgctgatgtggtccctcataaaccaagcagtgggaaactggtttagcttttagttcacattctaaagtactaatttttgtggtttattttgtacaggtactgctataaccagaatttggtagaaaaaggatttacttgttggggccctcttgataaaaagagatgtggggggattctcgacctgctaacagaactggaccttttcggtaagttctcaaatttgaatattgaaattgccagtattttaattataaatgtgtaacattttcgcctactataaatgaagatattttctctgtggagaaatagtttctgattttttaaaaatagaaat

SEQ ID NO: 29615 - DNA, 2300 bp, Homo sapien
ttctttttgaaacggagtcttgctctgtcgctcaggctggagtgcagtggcacgatctctgctcactgcaagctccgcctcctgggttcactccattctcctgcctcagcctccccagtagctgggactacaggcacctgccaccatgcccggctaattttttttttttattttttagtagaggtggggtttcactgtgttggccaggatggtctcaatctcctgacctcgtgatccacccacctcggcctcccaaagtgctgggattacaggcgtgagccaccgtgcccagcctttttttttttttgagacagtctcgctctgcttgctctgtcacccaggctggagtgcagtggggccatctcggctcactgcaacctctgcctcccaggttcaagcaattcttgtggctcagcctcctgagtagctgggactacagtcacgcaccaccatgcctggctaatttttgtatttttagtagagacggggtttcaccatgttagccaggctggtttcgaactcctgatctcaagtgatctgcccacctcggcctcccaaagtgctgggattacaggcatgagccaccacgcccaggcctgagagcaataatttaagcctactcttagaataaccctgtatggcagatgcacctgaatgtgtgttcccaactagggaatctgggagtgaccaactagagcttagttccttacctataataaacatcttagcccctagtctgtcacatggaacacgggacatacaggagattgaggccctgagttttggggcaaatgaagtttgctaggtggaggtcattatggagagagtattattaagtgaatatgctatatacgctgcatgatgtttgcaggcggttgcggttttcctgcccagcccactggcactgggccatgcggatatgttttcctgttatccagccgtcaccagtggaccatttctttcttttttttttttttttttgagacagagtctcactctgtcgcccaggctgaagtgcagtggcgcgatcttggctcgctgcaacctccttccctcgggttcaagcgattctcctgcctcagcctcacgagtagctgggattataggcacctgccacggcacccagctaacttttgtatttttaatagagacggggtttcaccatcttggccaggctagtcttgaactcctgacgtcgtgatccacctgcctcggcctcccaaagtgctgggattacgggtgtgagccaccacgtctggccaccactggaccatttctgtacgtaaggtggttctcctttccagcccactgccactgggctcttttctctgtatgtaagcccctaatataaggttggagataaagtattcacggtttttgtcatttaaagtaataaaacctcacatttcatttgctggctctaggtctcttcttcagcctcttgaacctggttccttcccttgttgacgttaatagggtttcagcacaacacttgggtactgattaaagtaagaatgggggtgaaaactgtcaccctgtgatgtccctgggaagttccctgaggcttttgatgccggagcagagatcttcagtaattttcttcactactttatccctagggcctggcacagggcctaatgataatggcacaggtactcaataaatgaataaataatgctgagctcatagatttatagaaaatacttgtcggattgaattttgattatatctcttccttagttcatcaaagcccatctttgacaaaagaagtcatttggtttcttggtataggcaagaattctttcatacaattttttcttctttatcttctagagcaatagatcccagcctggaaccaaaacatgtgaaccagtctcttcttttgccaagtggtaggagatttttttaaaaaaacatgatcatgatttcattaaagaggggaactttttttttcacattcagaaactagaaaagacaatctttttttttttttttttttttttaattgatcattcttgggtgtttctcgcagagggggatttggcagggtcacaggacaattagtggagggaaggtcagcagataaacaagtgaacaaaggtctctggttttcctaggcagaggaccctgcggccttccgcagtgtttgtgtccctgggtacttgagattagggagtggtgatgactcttaatgagcatgctgccttcaagcatctgtttaacaaagcacatcttgcaccgcccttaatccattcaaccctgagtggatacagcacatgtttcagagagcacagggttgg

SEQ ID NO: 29616 - DNA, 2300 bp, Homo sapien
tattcttgaaagatttgttttccagagagagaagaaaatggtataggcacagttttctgtaactgatgtataactttctgtaactaatggtataggcacagttttcaatttgtatgacctgaaaaatcagttctggctgggtgcggtggctcatgcctgtaatcctagcactttgggaggctgaggcaggtggatcacctgaggtcaggagttcgaaaccagcctggtcaacatggtgaaaccccatctctactaaaaatacaaaaattagctgggtgtggtggcgggtgcctgtaatcccagctgtttgggaggctgaggcaggagaatcacttgaacctgggaggcagagtttgcagtgagttgaaactgtgccattgcactccagcctgggcaacaggagcaaaactccatctcaaacaaacaaacaaacaaaaatgtttgcaaagcatctagggcaataatatagcatctagtaaagcgatcaactaatgttcctcattttaatttattttttatttttatttttttttgagatagagtcttgctgtgttgcacaagctggagtgcggtagagcaatctcggctcactgcaacctccgcctcttgggttcaagcgattctcctacctcagcctcccaagtagctgggattataggtgtgcgccaccacacccagctaatttttgtatttttagtagagacggggtttagccatgttggccaggctggtctcgaactcctgagctcagctgatccacctgcctcggcctcccacagtgcttggattacaggcatgagccatcatgcctggcccctcctttttatttatttatttattattattattattattattattattattattattattattattttgagactgagtcttgctctgtcacccaggctggagtgcagtggcacgatctcagctcactgcaacctctgcctccctggttcaagtgattctcctgcctcagcctccctagtagctggaactacaggtgcatgccaccatgcccggctaatttttgtatttttagtagagacgcggtttcaccatattggtcaggctggtcttgagctcctgacctcgtgatccacttgcctcggcctcccaaagtgctgggattacaggcgtgagccactgcgtccagccttttttttttttttttttgaaacagagtctcactctgttgcccaggctggagtgcagtggcgcaatctcggctcactgcaagctccgcctcccgggttcacaccattctcctgcctcagccgcccaagtagctgggactacaggcgcccgccaccatgcccagctaatttttttgtatttttagtagagacgggatttcaccgtgttagccaggatggtctcgatctcctgaccttgtgatccgcccgccttggcctcccaaagtgctgggattacaggagtgagccaccgcgcccagcaccggcctcctttttattttttagcgacagtttctcgcattgtccccaggctggagtgctgtgacgagatcacagctcactgcagcctcgacctcttgggcccaagcgaacctctcacctcagctcctgagtagctgggacaagaggtgcacgccaccatgctcagttaattttattttttgtagagataggatctcactgtgtttcccaggctggtctcgaactcctggcctcaagcgatcctcctgcctcggcctcccaaaatgctggcttgtgagtgagccaccacttcacgcacggtctccttttgaagtagaattagacaatgttttacaccgtgccagtgaaagcaaactgtactctctacggcgctagtagcaaaagcaaagaattattaacatgcctaataggagccctaaaaactaatccaggtctgcaaaagccgatcgacaactctgtagtgatttagaagagaattgcaagacattaacacagagcgtcctaagtgacaggatggtctggcgaccacatttcccggcagccctcgcacagccaggccgcttcgaggattggacttctccgcaggaggcgggtgacagggggaggggataagcgtgaggtactgtgggtaggagacggccgtcggcggaggcgccattttgtgtagccgccgaaccttgttggaggttctggggcgcagaaccgctactgctgcttcggtctctccttggggtaagtgcggcggctgtctgtaacgacggtaggttcttgccatttgggctggcccccaagcctcccttgtcagctgccggaggcgactgatcagctccagccggt

SEQ ID NO: 29617 - DNA, 2300 bp, Homo sapien
acaagtacacaggccccagccgcttcccctactggtgtagttcctggtaccaaatatggtaagccaaacctcatggggctgttgacagttggaaggtcttagttgttgtctttgtttaatgagagttcttctccctttgcgggtgtcagagggacacttggggatgtgagacagagaagaaacattaggcctgctgcatctcactggcttagaatttgaaataaagccaatttcttacctggaatgactgtatgctggattttgtttttgcagcagtacctgacacgtccacttaccagtatgatgaatcttcaggatattactatgatccgacaacagggctctattatgaccccaactcgcaagtaaatgtgctgctttcctcctcaatttcactagaagtagtttcgcttagtgcatttatgaggcataaaatgaaatatttcctgcaaaagaatatatgactcagattagttttaacttcttcaaagccaccaaaatgtaatttttatatggagattgtaagttttaattgtagggttaaaaaatgttttgaggtataatatacacacaaaaaaatacacaaaacagaaatgtgcaattctttgaatgtttatacatgtctatacatttgtatattacatgtgtatatacaccaccacttattcccagcccacctaatcctcatgcccattgctggtcagtaacctatgtcttcaataaccactattttgatttctgttgccatagattattttgtcaagttacaatttatggaaagacctagctagaaattttaaattgtacttttctccctattgtttaaccttttagagtgtacaaatcagtggcttttaatatattcacagtgttgtgtaactgtcaccactgtctaatctcagaacattttcatcactcgaagaagaaaccctgtacctgttaaacagtcactccccattctgtactctcctccagtaactactaatctactctctgtctctatggatttgctttttttattttttttgtggcacgatcttggctcactgcagcctccacctcctgggttcaagcaatgctcctgcctcagcctgctgagtagctggtagctgggattacaggcgcccaccacacccagctaatttttgtagtcgagacagggtttcaccttgtttgccaggctggtctcgaactcctgaccttaagtgatccacccgcctcagcctccaaagtgccaggattacaggcatgagccactgtgcccagccctctgttcttgacatttcatataagtggagtcagacaatagattaccttttgtgtccagcatcctttactttgcctccctgtgtattcttgagggtagaatttagcagatgtatggagtgatgttttatttttggtggcatatataacttttaaaagggaaaaacaactttaacaccccataaataactctatttatgaccgggagctgtatatatagaacagtaataagtatttttaacaggaacttggcattgataggttgtggtttctgagagattgaagtgtgaagctgtgtgtgacgtgcctaagcaggccaagcctctgcatacctcttccatccacttctctcatttgtgaagcctggccatttatttccctgtcagttctttttttttttttttttttttcccgtcagttctctttggtggccttagaagttgtgtctgtaggctgggcgcagtggctcacgcctgtaatcccagcactttgggaggccaagatgggaggatcactaggtcaggagattgagaccatcctggctaacacagtgaaaccccgtctctactaaaaaaaaaaaaaaaatacaaaaaaattagccaagcgtggtgtcgaatgcctgtagtcccagctactcgggaggctgaggcaggagaatggcgtgaacccgggaggtggagctggcagtaagcgaatgtcgcgccactgcactccagcctgggtgacggagcgagactctgtctaaaaaaaaaaaaaaaaaaaaaaaaaaaaaagttgtgtctgttagccacgccaccttacccagaagagacagacactgtctcctgggtccctgttgagcagatagagtgagcgactggaaaatagaggagaggatatgtgacacctctcctctgttgcaattcctgctgagcttgggtcccttcaccaacacctccttccagctctgtgctagtgtttacaccctgtgtgtggttgcctggtatccaatggattctatgtggatgggcccaatgatgagctgttgtcatggc

SEQ ID NO: 29618 - DNA, 2300 bp, Homo sapien
ctgccgatatgtatatgcacacacacacacaaactataacaacatattatgatgatacaaaatgctcaccccagcactgacacagagcaagggctcagtgtggattcactgctgcaataacaattttttttgtatgattattcagccctctcgaattgcttaggaaggaattggcattccaccccatgtagccaggctcaattctagctctttgccctcttcctggcccccttccctggtctccctgccattgaaggcctctgtgtgctgggcctattctgtgtgtctgagtggagcttcatgaacagatcagttgagcctctttccttcccaacccagtacactggagtctctggcaagtcctgacagctcttccgtggtaaccagcatgatgctaatgatgctggagatagtgatagaagtggccaggctataaggagaccatggaggctgtgagaggatggaagggatggtgttggaagccatagagatggtggcttaagctgtattggtgatggtggtgcagtggtggtgacctcaggggtgaccctcatacagatgagtggggatgaggagagatggattgtcacagtgttttcaatgaggcgtgacaaaggggagaggtgcaggtgctgtcacagcagctccataactccaggatggtgtttgctcacctcaaatgccctgcctgtgcttggagcatgaggcagcactctaagtcctgagtcaggagaccctcagcaggatccctagtgcccagctccaccttgcacttggagtcaaccagtcaatgggtcagagggagagaggtcttttcctggaggtcttgctagccagggagagaagtgggaggaggaagaaggcggagaggaggagtgagaagaaaaagagaaaggaggaagagggtaaagagcaggaagaaggaggaggaagaagagaaggaaatgcatggggtggaggaagagaagggagaggaggagagggcagagaaggaaaaatccaggagaagagaggagaaggaggaaaaggagggagatggaaaagagggagaagaggagagaggaagagggagaagagaggggagaaggaaggagaggcagagggagaagaggagaaaggaaagaggagaaagaggagggcacagaagacagaacaggaagaggatgaaggagaggacaaagggccaacgcccctgggagcctccgcagggtgcccggggcagggctgagaagtggtcctggtggtgaggccatgaccttggaaagttgggttgggcagagggtcccttcctggggtcacggtaggcccttctcagttgctgagccattggctcatcaccaggccatttgaaagcaaatgtccccttgaggagagaaggtgctagctgatctggcctctctaaggtatggaactataaggagagtctgtgggagctgctggcctgaaataagggctggcgattgaggcgatcacggggagtcgttgaatggctggagagagctgtgtggctgggctgcccccgacctggcctaggctggaggctgagcccgcgggaaggtccggcggtgccagccgtcccaggggctgcaccgccacctgctgagcagcccgggcagtcaggggtcctgcgccgcggggcccacgcacgggaccaggggcacggccggcggcgagtgggaatgagggacgcggaagggggtgctcaggtgagcgcaggctcgttgctccctggcgctgcagcccttctcgccagggagttgaatgcccgggtaaacaccaggcgcgatgtgtgcggtgtattcacagagagacaaagccagggcggggcgggggcgccgcccgcgaagcgggggcgggggcgaggggtgcagactagtctcccccggcgcggggtgcccaccgcctgggaaccctgagcccggcccacggacaggtggagcgggggcggggcggtggctgggcgggtcccgccccgggggtggggctgggcgggccgggcggggcggggctgcgctatgcaaatgtcgcccacgggcggccaattgccggcgctccccgcgcggctctgagcgccccgtcccgccggcggccgcgagaccagagcgagcgaacgaaccgcggcggtccggagagccccgagcgcagcgcaggacctgggtacgccgcgaggaaccgtgcagcccagcgcggccgcccggcccgggtccagcagccaggagagcgcagcgcttcgaagccgagtgcgcgccaccgcccgcgccccgcgctggggaatgcgccctcggcgcgccggccagggg

SEQ ID NO: 29619 - DNA, 2300 bp, Homo sapien
tccttcccaacccagtacactggagtctctggcaagtcctgacagctcttccgtggtaaccagcatgatgctaatgatgctggagatagtgatagaagtggccaggctataaggagaccatggaggctgtgagaggatggaagggatggtgttggaagccatagagatggtggcttaagctgtattggtgatggtggtgcagtggtggtgacctcaggggtgaccctcatacagatgagtggggatgaggagagatggattgtcacagtgttttcaatgaggcgtgacaaaggggagaggtgcaggtgctgtcacagcagctccataactccaggatggtgtttgctcacctcaaatgccctgcctgtgcttggagcatgaggcagcactctaagtcctgagtcaggagaccctcagcaggatccctagtgcccagctccaccttgcacttggagtcaaccagtcaatgggtcagagggagagaggtcttttcctggaggtcttgctagccagggagagaagtgggaggaggaagaaggcggagaggaggagtgagaagaaaaagagaaaggaggaagagggtaaagagcaggaagaaggaggaggaagaagagaaggaaatgcatggggtggaggaagagaagggagaggaggagagggcagagaaggaaaaatccaggagaagagaggagaaggaggaaaaggagggagatggaaaagagggagaagaggagagaggaagagggagaagagaggggagaaggaaggagaggcagagggagaagaggagaaaggaaagaggagaaagaggagggcacagaagacagaacaggaagaggatgaaggagaggacaaagggccaacgcccctgggagcctccgcagggtgcccggggcagggctgagaagtggtcctggtggtgaggccatgaccttggaaagttgggttgggcagagggtcccttcctggggtcacggtaggcccttctcagttgctgagccattggctcatcaccaggccatttgaaagcaaatgtccccttgaggagagaaggtgctagctgatctggcctctctaaggtatggaactataaggagagtctgtgggagctgctggcctgaaataagggctggcgattgaggcgatcacggggagtcgttgaatggctggagagagctgtgtggctgggctgcccccgacctggcctaggctggaggctgagcccgcgggaaggtccggcggtgccagccgtcccaggggctgcaccgccacctgctgagcagcccgggcagtcaggggtcctgcgccgcggggcccacgcacgggaccaggggcacggccggcggcgagtgggaatgagggacgcggaagggggtgctcaggtgagcgcaggctcgttgctccctggcgctgcagcccttctcgccagggagttgaatgcccgggtaaacaccaggcgcgatgtgtgcggtgtattcacagagagacaaagccagggcggggcgggggcgccgcccgcgaagcgggggcgggggcgaggggtgcagactagtctcccccggcgcggggtgcccaccgcctgggaaccctgagcccggcccacggacaggtggagcgggggcggggcggtggctgggcgggtcccgccccgggggtggggctgggcgggccgggcggggcggggctgcgctatgcaaatgtcgcccacgggcggccaattgccggcgctccccgcgcggctctgagcgccccgtcccgccggcggccgcgagaccagagcgagcgaacgaaccgcggcggtccggagagccccgagcgcagcgcaggacctgggtacgccgcgaggaaccgtgcagcccagcgcggccgcccggcccgggtccagcagccaggagagcgcagcgcttcgaagccgagtgcgcgccaccgcccgcgccccgcgctggggaatgcgccctcggcgcgccggccagggggcgcccgcagcccaccccaggggaggcggccccgagcgcccctgagccttcccatggcccgggctggggcccgggccctcggctgctgacgcgcccgaagcccgcggaaccggttaagccgcggccgcggcgccgatcccggctgaggcgcagcggcgagaggtcgcgggcagggccatggccccggggggccgctagcgcggaccggcccaacgggagccgctccgtgccgccgccgccgcccgggcgcccaggccccgccgctgcggaagaggtgagtgcagcgggaaccgggagggagcgggcaggcggccgggccacccc

SEQ ID NO: 29620 - DNA, 2300 bp, Homo sapien
tgggaggcacaaagctagtgctgactgaatggcaggctctgagaagtgggggcaggtgggagaaatggctgtgcagccaccgtcaccctcaaggtgcacctgggaggcccctgataacagctgtggatatgcacacgttcacacttgcaggcccacacacgtccttacaagcatgagtttgctcaagaacttgacctgctagtggggtggggctcaggggagctgggagatactgtcctggcgcaagatgccgtctgagtccctcagagagcttcgatactatgtaacgggggctcctgtcaacctgcctcccgcctcccccctccccatgacctcattttttccttcatccatgttcatggtgacaaagtcagtgtcaccaaggacagggttggagtcacccaatgtgtccagagaggtggggagtctttctactgggtccctacagggacttcccatccaaatgctttggccttttaaagaggtgaatggggaggggctcaagtttgctggggcctcagtctcaagtccaggtcccctcttggacagcctggcaggtgggggaaagaaggagagggaaggaagaaaaggagaagaaggacagagagggaaagaaagggcaaacccacagtgccttcccctctgccagtcccgagatgcctgtcacccagccccagccccagaaaagcccccaagtcacaccaagcccaggtcagtggacagaggaagaacagccaccgccacctgggagcccaccaggaagaaagcagagaaggagggaaggaaggctggtgggagggagcaagggagggaggcaggcgggagggaggaggagagagggaggagagagggagggacggaggagagacgcttgaacaaagaaacgaggagccggggctggcaaggggtgcagggaagaggcggccagaggaaggagtccggaggcacctgggatgggacagggggccaggtggccaaactgtacagccggatccagaccgcccaggcttggagttgggggtgggggtggacagcctgtctccaggaagggaggttggctcctccgagctgaggactgcctggatggaagggaggcaggaacaggggccgtaggggaacatggggagattatcaacagcaccccacccgctacccagcccctcagattccctcccccacttcaacaagagctctgtctccttcttggctcctcagcttccccatcccccaacacctcaaggaccaggaagcagagccaccccagcatagctgggactgaaaccccccttttgtggccagggtttcccagtcaaggtcacctgagcctggctccatcctccccccaaggtatgctgagcagcgaggggctgaggctgggtgggctgccgccttctctctggcccctgctttctctccggcccccacctccccacttccgggcctggctccttcggagctgaagggggagcagcaggagtaggcatgcctgtgccccccgcctgcctagacactataccctacggggtcctggcacaccccttgggtagcctgggaagaggcctcagctccatccaactccctgggctgagatggggctcccaacccctgggtgcagttttcccttctctgcaactaggataactactgggagactatctgggtgaattcaggaggacagaggtccccaacctggcccagcttcagggtggacatactggtgtctttggttggcgtctcccttacctctcccaagcagtaatgttctggtggcaaaacacagctatctcaaaaattaggagttatttatccagtggggcccccagccccagctccagccaactcccgccagcactgcctcattcctaggccaactttgataccctcctgtcccatctgctgggggcaaccccgccaagcccccgctgtcccctgcccacttcaccactgggacccctggttcaaactagggattgaccgcaggctctccaagctcacctacacactacatacagccgtgcccctaatccaggcaggactctgctgtaaaagcaaacccaaggtggcagctgggggtcaaggggctggcacaatgctgggagaaatgcctcaggactggaggtcctcccactctgctgatgtgggagaccccccacgtggggactgccagtataccgcttcccttcgggctggccagtcctcaagtagagacactgaggtagggcaagcgcatctacggggaagagcgctgcctcgggcgttaatgggagagagagctgaggcagaagggggatcggaactcc

SEQ ID NO: 29621 - DNA, 2300 bp, Homo sapien
atgctggggtggctctgcttcctggtccttgaggtgttgggggatggggaagctgaggagccaagaaggagacagagctcttgttgaagtgggggagggaatctgaggggctgggtagcgggtggggtgctgttgataatctccccatgttcccctacggcccctgttcctgcctcccttccatccaggcagtcctcagctcggaggagccaacctcccttcctggagacaggctgtccacccccacccccaactccaagcctgggcggtctggatccggctgtacagtttggccacctggccccctgtcccatcccaggtgcctccggactccttcctctggccgcctcttccctgcaccccttgccagccccggctcctcgtttctttgttcaagcgtctctcctccgtccctccctctctcctccctctctcctcctccctcccgcctgcctccctcccttgctccctcccaccagccttccttccctccttctctgctttcttcctggtgggctcccaggtggcggtggctgttcttcctctgtccactgacctgggcttggtgtgacttgggggcttttctggggctggggctgggtgacaggcatctcgggactggcagaggggaaggcactgtgggtttgccctttctttccctctctgtccttcttctccttttcttccttccctctccttctttcccccacctgccaggctgtccaagaggggacctggacttgagactgaggccccagcaaacttgagcccctccccattcacctctttaaaaggccaaagcatttggatgggaagtccctgtagggacccagtagaaagactccccacctctctggacacattgggtgactccaaccctgtccttggtgacactgactttgtcaccatgaacatggatgaaggaaaaaatgaggtcatggggaggggggaggcgggaggcaggttgacaggagcccccgttacatagtatcgaagctctctgagggactcagacggcatcttgcgccaggacagtatctcccagctcccctgagccccaccccactagcaggtcaagttcttgagcaaactcatgcttgtaaggacgtgtgtgggcctgcaagtgtgaacgtgtgcatatccacagctgttatcaggggcctcccaggtgcaccttgagggtgacggtggctgcacagccatttctcccacctgcccccacttctcagagcctgccattcagtcagcactagctttgtgcctcccagacctgaggaggggctggttctgattcccccatcccccagctagcctccccaggaggcagcatctatgacaggggatctggaaggaccatgagcggtgtgccaggccctcgggagagaacattcacacagagggtaccgcgtaaggagtgggccaagaggctgaagctgcacttcctgtctgaggagccatgagtggtttgccttggcaggagaggccagggctgggggaggtgggtctagggatgtcatcagggtctaatgagtggggcctaagagtcagactggagcctgggctttgcctcagcattgagcagctatggcaggggagtcccaggccatagtactgccaactcccatcccagcatcctagagatgggcctggggtcctgcctgccacggaagaagggagtacacagggcagatctgggggatggggctcacattttcagtctcgatgcccccacccgcagtgcatccggttgggggtggtggtaggagttggcgctggtttgtgccgggagggagcaatatgttctgacaactggtgctgggctgcgtttacccaacagccagcctgcctggggagacaatatttgaaaaacacagtattgaaacttggacctgctggggctatgggggattctgaaggtggcaatgccgctggcccagatccagccccaggcccactggccatcctagcttcccttctttgccctctagaggcggagctggaagttttccctggcaggaagtccttctgcctgtctgacctgggtctctcctgctttgattttagtacaagtggactctgccattctctgcctttccttttctgactggtgctccctctcttccatcttgggctgtctgcatgtgtctcattcccccactctctcctgtgcctcccctctaccgtaataatcaggtccaggtttctctgtactgggagaagacctgtggctggagcaggcagggatgcaccctatctgttccccattcctccaggtgggagggagaaggagtaacccactt

SEQ ID NO: 29622 - DNA, 2300 bp, Homo sapien
agagttgagtgctgaaaggcagccaggttccagggaagagtccagccaggaggctcagggtgcctggaggagcctttgagagcccaagatttgggttttcctatggaagttgagggtgggaagtctctagaacctgggagctcaacctgaacaatttctgcccggcagtgagccctgcacctgaacagagcaccagaccccctaagctgaggcaggcaggccctggagataatcttaggcaggcctcagagcacccacagcagacagagcaggagcaggataggtgagccccattcctccataccccagggaacactacacctgctctgggatgcaatttctccacctggcaacaggcctgcaaaacattctctggaagagcctggccacttctgcagattagagactttgttgcacccaaattcaagtgtacatataggcacaggcgcctgcaagcatgcatgcacacacacagtcatacacaggcagagatggacatgcacaggcacacatatgctcaggtacaaacaggcatgtttacacccctgcgtataagcaagtgcacacatgcaaacctacacaaactgcaaaacacacaagcctatgtgtgcatgaagagaatacacaaagcatattcacacatgcatacacatgtgtatacatgtgcacacatacataagcatgcgcacaggcacgtgattcctataagagcacatgcactcacaaaggcataaacatgcaggcacacatgtacacacaggtattcatgcacaaatgtgtcaagttattgctcgcttggtgccagcaaaagacacacccatggccgggcgaggtggctcacacctgaatcccagcactttgggaggccgaggtgggtggatcacaaggtcaggagatcgagaccatcctgaccaacatggtgaaaccccgtctctactaaaaatacacaaaaaattagctgggtatggtggcacatgcccgtaatcccagctacttgggaggctgaggtgggagaagcttaaaccagggagttgaaggttgcagtgagccaagatcgtgtcacagcactcaagcctggcaacagagtgaaactctgtctcaaaaaaaaaaaaaaaaaaaaaaaaaaaaggccaggcacggtggctcatgcctgtaatcccagcactttgggaggccgaggcgggcagatcacgaggtcaggagactgagaccatcctggctaacacggtgaaaccctgtctttactaaaatacaaaaaaagtagcccgacgtagtggcgggcacctgttgtcccagctactcaggaggctgaggcaggagaatggcgtgaacctgggaggtggagcttgcagtgagctgagattgcgccactgcactccagcctgagcaacagagcgagactccatctcagaaaaaaaaaaaaaaaagacacatacaccgaggcacacagagcagatatgcatgcccaccacagtccgctggaagcagaggacctccttggggcagctccagcctgtgatatgggatgaatgcaatgcccactgtttccctctctctggattccctgcaggtcataaaatcccagtccagagtcaccagcccttcttaaccacttcctactgtgtgaccctttcagcctttacttcctcatcagtaaaatgaggctgatgatatgggcatccatactccagggccagtgtgagcttacaacaagataaggagtggtgctgagcctggtgccgggcaggcagcaggcatgtttctcccaattatgccctctcactgccagccccacctccattgtcctcacccccagggctcaaggttctgccttcccctttctcagccctgaccctactgaacatgtctccccactcccaggcagtgccagggcctctcctggagggttgcggggacagaaggacagccggagtgcagagtcagcggttgagggattggggctatgccagcccgattagaagggttgggggggctgagctggattcacctgtccttgtctctgattggctcttggacacccctagcccccaaatcccactaagcagccccaccagggattgcacaggtccgtagagagccagttgattgcaggtcctcctggggccagaagggtgcctgggaggccaggttctggggatcccctccatccagaagaaccacctgctcactctgtcccttcgcctgctgctgggaccatgggggctggggccagtgctgaggagaagcactccagggagctggaaaagaagctgaaagaggacgctgagaaggatgctcga

SEQ ID NO: 29623 - DNA, 2300 bp, Homo sapien
agctagaggctgagagttcatgactagaaaggaagaaggagagccaagggctattggggccctggaaggaggatctgagcggtcctggagccctgagctctgctgcatgggtctggcagtctttcaggcctgggtttacgttttcagagatggggcagtggaggcggaggctgggctgaagcttgggataaagcttcccccattctccatcccaaggggccgcctgcaactctgtggttgcttggatggacattccctctagcctctggaagaaggcgaccggcagctctcagagccacatcctagctgtccagctgtccggtcaccacaggctgggctgggagattcggcaggtggtgggaaaggcctccgagctgtgtttgccctggctggggcccaggcctagcaacaacaaacagtcagcccctcccccagcctggccacaactggtctgacccagggaccccacatcataccctcctctgggcctcccacagcagcccagcccagtcagcccctgcttcctccagtctagattgaggaccccaacacccatatcccaggtgaccttgagccagccctggcccctcaagaactgccagtgggagccaccagccctttgcagatagctcctgtgagcatccagggtgtctgcaagtgggaggttgaggggtgggaggcaggcctgagaccctcgtcagcacctcttctatatggctgtcccatggcagaaccatgcccatttggagggtgggagtcaaagtgagctctgatctaaggatgatatcagccccagaccaggagtgaaaggcagccctttcccattttccagccaccagcaaggcagaagttcgagtggcttgaggttttcaggggttgccaccatcccaatgcctttctctctagccctgccagccagagctgagtcccctgcccggtctcacagcttcccctccactcattcccctcaggagaaaagacagccatttccatgtcacagagggaaaccaaggtacgccagggcttggctgtggtggttctgtgagtcagcaggagaaaatcctggagtcctgactcccagcccagggcaggggagggtcgggtatgtcctctcagggcattccccccgcactgggaagtggggcaggcatgacacagagaagaccagcttgaataggaacagcagaggccatgagattaatcggatcagagccagtgactgagaagcaaggggcacagctgttctgagaacccccccacttcaccccgaaggtcagcatctcccccagcttcctactggtggaacctgggaccttaacacccaccacccgtctctgagcaccaagggcctgtgtggaaagcaggcaggggtgggataaggagcccccagccaagaacggggccatcctaaaacccctgtctgtccccaggacaccaagtcccagcccccttcttgtggacaggctgacagctgtctcctacaccttctaaataaggacgggggtcatggtcggggggccccaggtgaggctcaagcaagccaagccttactccttgcctgacctcactgcccctgccctctgtgttccagcctcagcctcctctgaatatctggggtggagacagaattgatataagaagccctcccaccctcgcccccaccccacccctggttgggaagggggaggcaggtagaagaggtattttgttgcctgagtgtcgcctgaaagtcccccattcaagcatctctcactgaggctatgcattgccagtcctcttggcggaagctccccttctggctttggggggtgtgggcaaagcatttcaggggttaatgtgacacccacagacctcagagagaatctgctttggactgaagcattccccccacaagactcaacggagtccctctggcagctctgctctcccacctaggggctccctaacgctcaggccgcccctttgctcccggcctgccccggcccccgccattcccccgaccagcccctcctcccgcgggccgccagggattggcgggcggggggcgggccgggggcggggccgggcgcccttcatcccgcgtcgctgttgtcgctgttgcagccgagttcagccgggagcagagcgaaccgcaccggcccgagcggagcgccgcacgttcccaaccgcgaggccaggtaccgcttcgggagttcatcccacccgcacaggggaatcgggtgggccgagccctactgtccaccctcctgtccgtagccgggctctgggcagctctcctctaccgtcctgacccgggcagg

SEQ ID NO: 29624 - DNA, 2300 bp, Homo sapien
aggcttcccggatggttccagtaggggaggagaggcagaagtaagtcaagggtgactccaaggttgtctagtgatagaggtgccactgcaggaggctggaggaggagcaggcttgggagagagataagttttgtccatgaagagtttaaaacattgactggacatcggcagggcatggtggctcacgcctgtaatcccagtactttgcgaggccgaggcgcgtgaatcacaaggtcaggagttcgagaccagcctggccaacatagtgaaaccccatctctactaaaaactacaaaaattagccaggtgtggcacgtgcctgcagtcccagctactcgggaagctgaggcaggagaatcgcttgaagccgggaggcggaggttgcagtgagccgagaccacaccattgcactccagcctgggtgacagagtgagactccgtctaaaaaaaaaaaaaaaaaaaacattgactggacatcaaagtgcaggtgccgagtcaactgctgggtgtatgcgttgagttcagtagagtggccagtgatgaagctttggatctgggaagcaaagcaagtggtgtttaaagccatgggatgggaagaagctaagttcagacagaggagggcggcagtaagcactgagccctggaagatgaggcagaaccagcaaaggagctgggcgggagtagccaggaggtgagaggaaaactgggagagcatgggcacctggagccaggtaagtgtcagatgctgccaaggagttgagggtagaggatggaccactgaattcggacacctgtggatccctaaggaccctgaccagggcacttttgtgagggagggacaggcctgcctggagtgggcagaggagaaagtgaggtagaactggaaagagccagtgtaaacaacttgtgtgaagtgagaggggcagagccaacagtggcttttaagaaagactggaaagttggccgggcacggtggctcacgcctgtaattccagcactttgggaggccgaggcgggtggatcatgaggtcaggagtttgagatcagcctggccaacatggtgaaaccccgtctctactaaaaatacaaaaattagccaggtgtgatggcgcacacctgtaatcccagctactcgggaggctgaagcagaattgcttaaacctgagaggcagaggctgcagtgaaccgagatcacaccactgcaatccagcctgggcaacagagtgagactccgtctgtgggtgggaggaagaaagactggaaagaagaaggtattgaggtgagagaatggaagcagctggtaggagggtaggtttgagctcagtgaaagacttccaggatgggggtgctggaaactgagctggaaaacagtagacagagattggatagtgggggtctggacatcagggagtgtgcagcttggccactgacctgcctggtcaagtgctggtggctagggacacagcgggtccaagacgcaggcaaggatggcaaggagccgtggagagacccaggggacaattcagatgtctgcctaggccaggtgtggtggctcatgcctgtagtcccagcactttgggattcacttaaggtcaggagttcaagaccagcctggcaacatggcaaaaccctgtctctactaaaaatacaaaaattagccggtcatggtggcacacacctgtagtcccagctactctggaggctgaggcacctccagagaatcgcttcaacccgggaggcggaggttgcagtgagccgagttcgccattgcattccagcctgggctacagagcaagaccctgtctccaaaaaaaaaagaaaagaaaaaagatgtctgcctggaccctagtttaaagtcacccagcaactgactttccaacaacgcggagcagtaataattgactgaaggttgcttagaaagaagagcagccctggaaaaatctgaaagcataaaactactttccaaccacacaagtctacaaaccgcctggctacacacacaggattagccagcgacctaatccgccaagctatgcaaaaggaggcctctgctgacccctggcggtcaccagccggagtctggctgcgcggtgacccaccacacgttgcccagccgtgtggctgggatggtcggtacccatggccgtgcggtcgagccttgatgctccaggacagtcctggaaggcttcctggcagatccgtgggaagaaagccgacagaagggcgggaggcgggaggggaaaggtcccccgggatgggtagggcctcaacgctgggcatcggcgcaggtgtgtactgca

SEQ ID NO: 29625 - DNA, 2300 bp, Homo sapien
tgggtgtatgcgttgagttcagtagagtggccagtgatgaagctttggatctgggaagcaaagcaagtggtgtttaaagccatgggatgggaagaagctaagttcagacagaggagggcggcagtaagcactgagccctggaagatgaggcagaaccagcaaaggagctgggcgggagtagccaggaggtgagaggaaaactgggagagcatgggcacctggagccaggtaagtgtcagatgctgccaaggagttgagggtagaggatggaccactgaattcggacacctgtggatccctaaggaccctgaccagggcacttttgtgagggagggacaggcctgcctggagtgggcagaggagaaagtgaggtagaactggaaagagccagtgtaaacaacttgtgtgaagtgagaggggcagagccaacagtggcttttaagaaagactggaaagttggccgggcacggtggctcacgcctgtaattccagcactttgggaggccgaggcgggtggatcatgaggtcaggagtttgagatcagcctggccaacatggtgaaaccccgtctctactaaaaatacaaaaattagccaggtgtgatggcgcacacctgtaatcccagctactcgggaggctgaagcagaattgcttaaacctgagaggcagaggctgcagtgaaccgagatcacaccactgcaatccagcctgggcaacagagtgagactccgtctgtgggtgggaggaagaaagactggaaagaagaaggtattgaggtgagagaatggaagcagctggtaggagggtaggtttgagctcagtgaaagacttccaggatgggggtgctggaaactgagctggaaaacagtagacagagattggatagtgggggtctggacatcagggagtgtgcagcttggccactgacctgcctggtcaagtgctggtggctagggacacagcgggtccaagacgcaggcaaggatggcaaggagccgtggagagacccaggggacaattcagatgtctgcctaggccaggtgtggtggctcatgcctgtagtcccagcactttgggattcacttaaggtcaggagttcaagaccagcctggcaacatggcaaaaccctgtctctactaaaaatacaaaaattagccggtcatggtggcacacacctgtagtcccagctactctggaggctgaggcacctccagagaatcgcttcaacccgggaggcggaggttgcagtgagccgagttcgccattgcattccagcctgggctacagagcaagaccctgtctccaaaaaaaaaagaaaagaaaaaagatgtctgcctggaccctagtttaaagtcacccagcaactgactttccaacaacgcggagcagtaataattgactgaaggttgcttagaaagaagagcagccctggaaaaatctgaaagcataaaactactttccaaccacacaagtctacaaaccgcctggctacacacacaggattagccagcgacctaatccgccaagctatgcaaaaggaggcctctgctgacccctggcggtcaccagccggagtctggctgcgcggtgacccaccacacgttgcccagccgtgtggctgggatggtcggtacccatggccgtgcggtcgagccttgatgctccaggacagtcctggaaggcttcctggcagatccgtgggaagaaagccgacagaagggcgggaggcgggaggggaaaggtcccccgggatgggtagggcctcaacgctgggcatcggcgcaggtgtgtactgcagggagccagccagaccccccacggactgcctgaccttgggggaagcccggagtagaggaagaggccggacccccagacccgccattgactatgtccgccattgactatgtgttctgagagaaatttttttttttttttttgagactgagtctcactctttcgcccaggccggagtgcagtggcgcgatctcggctcactgcaagctccgcctcccgggttcacgccattctcctgcctcagcctcccgagtagctgggactacaggcgcccgctaccgcgcccggctaattttttgtatttttaatagagacggggtttcaccgtgttagccaggatggtctcgatctcctgacctcgtgatccgcccgccttggcctcccagagtgctgggatgacaggcgtgagcctctgagagcaaattttacccagttcctctctatcctcccgatgactctgaaatcaaactcagcaagtcatccgagcccccacggcgcagcggccc

SEQ ID NO: 29626 - DNA, 2300 bp, Homo sapien
gtcatccgagcccccacggcgcagcggccctaggctggcatgggcgatgcggagctactccgccctcaggaagcaggcgaggtgcccagcgggagaatcacccacatcaccgtctaatctctgctgtgaagtggaagcgcgagaaggagggagcgtctcatgacggagggtgtgaagacgctaggctggacgaagcagaaaggcgggtgtcactggggacgttctgagggtaagccgatggcggctatcgcggaggagaccctggcgaggtggggccccgcgcggggcaagggggatggggtgccacagagggctagttgcaagaggacgcgtgacggctgcagctctgcggagaccgggcctcgacggccaaggagtggcaggtcggcggaggcgggggccaggcccggaggcagagcgagacaggagagcaggcaaggcgggggccaccgtgagtgggggccgcgaggcgggggctggggcgcggggaggtgctaggtcggcctcggctcccgcgccgcaccccaggcccgccaggaggcgccgctgccccgcgaagccgttccggcctctcccggccaccgaaatcccgcgctccggcctagagaggccccggaagaggcggtgcagcgcaccccgaggccgcttccggcttcggctctgcaggagaggccagaatcgggggaggacgccttgggcggggcgtgggtgagagaacctgggggaggtgaagaactaggaggttgcactgggagtggacaagggggaaaataagaattagggaggggctgcggtgggcagggccaagggcaggtagcaccctgcaaggttgcaccctgcgcagctctcggtccactgctgagcctcctggctttttacctcgcaaaatgccgtcctggtgaggtccctggggagcccaccgctggccaagacccaggacagggcaaggaaggcttcctagaggtagagaggtgcacaaaggcgggaaagcagatacggggacattgggagcccctttagaccgatctttaggtgtctgagccacgcccatttggagggaaggctgaatggggaccagcccgcccaaacctgctggaggaaacaaaaactcactcccgttataattgctccccgccccctcaccagctctcttctccccggagacgggacagccctgtctccacaggcttcactccatttccctcgaatggtgcccacctcctatcctcccatctctcttatcctcaggttctactactcatagcaaccagaaggaactttaaaaatcagatcatgttggccgggcacggtgcacggtagctcacgcctgtaatcctagcactctgggaggccgaggtgggcggatcacctgaggccaggagtttgagaccagcctggccaacatggcaaaaccccgtctctaccaaaaatacaaaaaaattagctgggcgtgggggcgcgccttgtaatcccagctactcagaggctgaggcaggggaatcgcttgagcctgggagacaggctgcagtgagccaagatcgcgccactgcactcaagcctgggtgacagagcaagactccgtctccaaaaaaaaaaaaaaaaaaaattcagatgatgtcattctgccttcaacaccctccagttgtttccttcatacttggaatgcaatttaaactttcttgccccatggccgggatgatctggcccctgctgacccctgccccctggtactagcccacagcctgtcctgttggcatggcatgccatgctggccctcacattagggcctttgcactggctgatagcttttcaaaagctttttctccaacagcctgaagtcactcctgacaaggcccacttccctaactctgtctgcttggccttgatcgcagtatttgctccatacggtacaggcagagcgatgcttgtgcgtccagaactcagtgaccagcttccctcccgcaacaggtccctcctcccctattactcccttgctcctagtcacaatctacaggaagcccctgagcccagctggcaaggtgcaccttgcttggctgtttgctgttgcatcaccttcattagggctgtttttgctccttcattaaattaaattccaggaagcagtgctaatgacagccctaacgagtcacgggagaggctaccagccccagcctttggaaagcatggcaaggaggactaggcaataacatgaacaaagcagtagctcctgggaatagaattgattatcatttcccaggccccccaaggaccctgggcttcccaggggaggtggcctttgg

SEQ ID NO: 29627 - DNA, 2300 bp, Homo sapien
tttttttttgagacggagtcttgctctgtcacccagggtggagtgcagagacagaatctcagctcactgcaagctccgcctcctgggttcacaccattctcctgcctcagcctcctgagtagctggtactacaggcgcccgccaccacgccggctaattttttgtatttttagtacaaaatacaccgtgttagccaggatggtctccatctcctgacctcgtgatctgccgcctcggcctcccagtactgggattacaggcgtgagccaccgtgcccggtctttttttttttttttgaaatggagtttcactcttgcccaggctagagtgcaatggcatgatctcagctcactgcaacctccgcctcctgggttcaagtgattctcctgcctcagtctcccaagtagctgggattacatgtgcccaccaccacaccccgctaattttttgtattttagtagagacagggtttctccatgttggtcaggctggtctcgaactcctgacctcaagagatctgcctgcttcagcctcccagagttgctgggattataggcatgagcaaccatgcccagccaaaatgtgtaccaaggttctaaggaaggggtttatgctaaacaccgggctgttggtggcaagcaccctgtcttgcttcaggggccttccctttgggctggggcctcctagcctcatggcactggggtcacacaaaatgccttcgtggttaatttttggcagacccttcaaatgtccaatcgagggtggggctctgggctgctcctggagcacaggatcagaaagacttgaaatgttcagctagaaacactgctgcttccaccccacctttgcctggccatagggttgcagccattgcccagtggggacaggccacaggagggtgggatgtgggatcatggccacctccagacgtggacaggccatggaagagacaggtcataagatcatggccacttttgtttctagaagtccagtggcaacttcttcctctttcttccctcccaaccccctcaccctgcctgcccgccctcctctcttcctccctctccaccctctcatcctctctccctttctcccttgggtcctgattgcctggtcccagattggagtccaggatggctgcctgccgaagaatgcctcccggtagattggggaaggatggatatgagaagccacccagctaaaggagacagcctaggcaaaggtgtaaagatggaaaccaatttttttttttttttttgagacggagtcttgctctgtcgcccaagctggagtgcaatgaatggcgcgatctcggctcactgcaacctccgccacccgggttgaagcagttctcccgcctcagcctcctgagcaggtgggattacaggcgcccacgaccacgcccgggtaatttttgtatttttagtagagatggggtttcaccatgttggccaggctggtctagaactcctgacctcaagtgatctgcccgcctcggcctcctaaagtgctgggattactggcgtgagccactgcgcccggcctttttttttcctttttcgactagctgcaacccagagggagaaggcggtaaacccgccttaagactgagaaaaccgcagtccagaaaggctcccgagttcgtagatcccaaaacaagtttactggactcattaactttaacaaatgacaaagacacgcctcctccacctaactcgcccaactcgcagaagctcagagggctggttcctgctctgccctcgagggcaccggatccccaccctcgggttaacagatccgccctcccggctgtccagcaacagagctcccggcgctccgcacccaatcacagcccggtcccgcctgcagcccgcccagtgccgggtcccggggtttggaaccacccctattgccttttctccgcgtggccccgcctgcagcccaggcccgagcctgggctgcgcctaacttcccccttcgctccgccctcgagccaatcaacagcctctaatctcctctggccccgcctgcaagcccgccccggcccagtcacaggcttggttcgcccaggccccacccccggcccgccccgccgtcggtgcgcggcggtagggaaggcgcctcccgcagtcgctcggaactgccgacccgagtgcttcccgcagagggctggtggtgggagcggagtgggtcgggcggggccgagccgggccgtgggccgtgtgggggccgggcggcggccgggccggcggacggcgggatgggctgcaccgtgagcgccgaggacaaggcggcggccg

SEQ ID NO: 29628 - DNA, 2300 bp, Homo sapien
actgctgccctccctgccccagtgggtgctttgagccccagggggatgggccttaagtgttcaggcatcgctgtgaggctttcctgggacctttccccatgtcctcattggcaggtggaggagtgttggtatgcagatcctggctgcccctttgccatgcacagcccaatggggagggagtggtgctggtatatatcccggtacacaccccagtgaagatactgggcccggcccctgtagtgcccaggggctaaagcaatagaggggattgctgccccagccacagcgccccagccttcccagggcctgcacatttgtatgtccacaagattgtgcaaccatcactgctatctaattccagaacataatcaccaccctcaaaaataaacttcatacccaactagctgtcactccccatctccccagatcccctcccctcatcctggaaagcaggcctgggacagtcagaagctcagtgattgcaggcgcctgatggcatttgtgaggagggctcaggcctttcccctcagggtggtctctggcgtagggggctgaaggtgggcaggggccttggcaaggcctgccaccatgtcccaatgcctgctgccgcttgttgagcactgcagacatggcccagagtctgcctggggagctagggagtgaacccagtgccaggtggactgtgtggctccgctgcagtaccaggtacttaggacagctctaggagggactgcacggtgggcaagtgtgctccctgcagaggggactctaaccctgtgacctcagcctccctggacctcagttccttcactggttagattggggtgagaatggaacctacctcccaggattgctgtggagatggcagttggtgggtgtcattgatgtagagcagcatctggcacatggtgggcgctgttttcatatagctttgctgtcgatattgccgatgttattgttactgcttgtgttcgtttgtgtgttagcaccttcatcctctgaggttgttttgaccagccccaagggatgctgttgagcttggccagagtacccaagtttgacctctgcacagaccttactacccacccagctaagctgcacagaggaacaaacgtgccacagtgatcagaattgggacactgtgaatggggcatggggcacgtattcccggcaaagagaacagcatgagcagggccctggagatagctagaggtagtgcctggcagctgcaggtgtgactggcagtgatggagcaggagcacagggtctgggaaggacagcagggcccagctgggggccattcaacctggagctcaagacaagccagcagcaagggagcaaggtcaaggtgaggccctgcctccactccctctggcccccagccagggagttgggtggcccccctggtccttctttacacagactccctgggtaatacaggctcctgggctgcactcctcaagatctggctctgttgtctgggatgggacctgggagtctgctttttttttttttttttagaccaagtttcgctcttgttgcccaggctggagcgcaatggcacaatctcggctcactgcaacctccacctcccaggttcaagcgattcttctgcctcagcctcccgagccgctgggattacaggcacctgccaccacgcctggctagtttttgttatttttagaagagatggggtttcaacatgttggccaggctggtctcgaactcctgacctcaggtgatccacctgcctcagcctcccaaagtgctgggattacaggcatgagccaccactcccggcggaatctgcttttttaaacacctccccaaggcattgtcccgcagggtctcagccacattttgagaatggcagggtggaccaggcatcatgggttccctccaccctcttgcccttctgagtcctggctacatgatcttagatcaatactttatttttctgagcctcaatgtcctcatctgtagaatgggaacagaaacagtatctgctgtgactaatacaggagagaatgcagcaaatctcagtaccagctaaagagaaatatgggccagggctgtaccaggccagggaaaagcttgagtcagtatgggcgtgtgtgggtgtgggtgtgtgagatacgccgcaggtctcccagattcatgagtcagtacgcgtgtgtgttacactgtaggtctcctagattctagccttctagcctccatctgctcagggcagacctgagcgcagtgagcagagggcggggcattgggccatgtccagaaagctgaagtgtgacgctgtg

SEQ ID NO: 29629 - DNA, 2300 bp, Homo sapien
ccctcccccacgtaacccagcaacagaaactggctcctgggcggcaactgtgtccctggtaacaaatgggtaggaaaaatagagaagggtcattgtctagggaggcgggagagaggcacgccctggctgcttcccgatccatgctctgctttcccccacctccagggccaccgccgactttgtaccccccaacccctgaggaagatgggggcaagaagatcacgctccccgcctgttcccccgccgcttttctcctctttcctctctttgttctcagctccccctgtcccctcagctccagacgtaggggaggggttgccacaggcctccctgtttgaagcctgcccttgtctgagatgctggtaatggccatggtacccccttctgggcatctgttctggtttttaaccattgtcttgttctgtgatgaggggaggggggcacatgctgagtctcccaaggctgcgtctggaggggcccctgcttctccagcctggacccccagctttgcccaacaccagcccctgccccagcccaagtccaaatgtttacagggagcctcctgcccagtcccccaaccccagccgctcggaggccccaaaggaaaaagcacaagaagcgtgagacgccaccattcctggaaaccacagtccacctgctcattctcgtagctttttaaaaaaatgaaagtaaaggaaaaaaaaaaaactgcaaatctagaaaactttttagagaaaaactatttaaaactgtcagatcctgaccagcaagcccccccccagccccccttccaagtgactccgtgccttgagtgtgtctgcgtgtttacacccgtccctctgctggccgcccccgtgcgagcggcacccctgccctgccctccacagaattgggttccaagggctgttccagacaactgccaacgtcactgagggccctgccccagcggccctggccccaggctctattaacctaaaatgtagctccctagcgctaacctaggaaccgccgctgcctgctggggggccacgcccctcatgcccttgtcccaggcccggggccttcagcgttgaacacttccttgcttttttcacatgttttatggaattgttcacctggtttgaaataataaaatgtagaaagaaaaaaaataccgagaactgatgggtattctctcccaggggcagaggcctgggctaaggtgtgccaaggtgatggtggtcctaacctcagtcctcaacctgagtcagggccctgactcagctttccgggccgtcctggagccccacgctctgagcttcatttctcccacctggactaggcagcatacatgtggggcccgtgtgtccccgcccttccagtactctgcagccttgggtctcgggcagctgggcaggcttctaagggagctgttgtaaggtgctcttccacacctggagcaggaggggtggccggcctctctagcgcggaaggagaaagtgacttccgacttaggtaccaaggcctgagagtgtccgttgccaaggccacacagccaggtgggccgcatgcagtcctggcttgactaaaaaggccagtaggggccttaagacatattcagaaagttccctgccccagagggccgccgccaaacctgaagggtagtgacaggtggccatactaccatgtgatggttgccccaggctgggcctggagagctgcagatcattgactctgaagatggaaggctccatgaggctgtgggaagggcccgcgcgtttctggggaagggaattgcagatggcaaggctggtgatgcttgtggggcgggccctgagtgccatcgaggcgcctggaccttctcccgggggcagccgcggcctgaacgtgtgggggcgggctcgcggaaaggctggcctcgactgggtggggctccggcgttggcgcatccgcctccggccgccagggggcgccgccgcccgtgctctgccctgcctggctggtcacagaggctgacgtcagcgggtcccgcggaggccgctggacacaaaggcagctttgtgaggcggcgacggctccgcggccgccccaggacagagcggcctgggcagagggcgggccggggtcggcgccgcggaggcggggagggagggagggttggagggttgagccagagacccgggaccccgtccccgcacacctgccagtgccccgtagcttcggccgccggcactggcaggagatgaaaggctgctgccgcccggtcggaaggacatcggcgccccccaggcccggtccccgccccagttcctcgggccttt

SEQ ID NO: 29630 - DNA, 2300 bp, Homo sapien
aggtttttccagaaggaaaagccaaggccgtggtaggccatgccactgacaggcagccccagagcaaggacccaggcaggtctctgcccatggaagctccctcaaaagagagaggtccagggtaggagtacaggcaggaaaagggaccccagctgccttgcctggtttgccccattctgttgagactcaggctcaggctgcctgattccagaatcctcgaggagttccagcccccagtgtgacccacaggcagtgaccttgctcctggagtgctgacctccatgggggcccctacccatggcctggcacactggacctggggctgaggaacagaaaggggaccatgtggaatcagggacaacttgacctcccatccctggagacctccattcctactcaagggagggtacacatctagaggacagaggacagggcacagcactcaatggggacagagacagtctagtccttttggctgggggttgactcccaggctattggaaagataatggcggtggcgggggggtttctgataccgtttcccagagtgaacacaggtggaggaaggtgcggggtgatgaaacagagacagggcccctgggcctggaaaaacataaggcagtgagggcctatgggggcacagtgggagtggatgggagcctctgaggcacttgctgatcctggctgcttgggtggaaagctgtaaacagccaaagaatgttgtctgcttgcatggagccaggagagcctgcccaggtcctctaaggctagaggcagctactcctggagtaggaaaaggccacatccaggaagcccacgagcccaggcagggatctgtccttccacttgccctcctgaagggccctgcggctcccactggcccctgttatttacctgccagctggccaggccaggccaggtataccaggtcctcaggctcaggaaggaggggcatagccccacttccacttccaggggacttggagatgtgccccccacctctgtccttgcttggctggaggcatccagggctgggcaacagaactgcaacacttgaaatgcccacactgccccatcagccttgggaggtggtaggaaaatgccttttgcggggatggaaggatcaaagcccattctcaagccctggtatattcactcaggtggacttcagggctccactctgccactgtcaacatacagtccctccagagaagtacccctcatgttacaaatggggcacgttcaccagactcagcttcaggacaagaccccaggtcattcccaactgaggctccgaggtgcaggagctccgtcctgtctgtaaaactccctcagttttcggctctgggtttggtgggggttgttcctcccacctccaacctagaaagagaagccagaggaagggaggtcacatggtctgccccccaacctctcagcagagatgcaaagctacctgtccaggatggcggactccagatgggccccgccctgtggtgcagaagtgagatttgctgctcctcctgcgtctgcccctctcctgccctcctctccctcccctatctggctgtcatggtagaagccactgctggccaggccactgaagtactaagtggcccaagtgttgaggaaggatggggactgggtcctgagggcccatccgacctccagttgagagcccctcccctgacctccagctgcccggccaccccagccggtccctgggaactgaggtggcagctgagctccccattatctttccccacagctccccacctgtggagggagaggttgagatattggagtccacgggtggtgcccccactcagtgattccctttgcctgctgagcccctggagctggggtttcttcctcccttgccttggctggccacctggcttctgggaccgccacctggggcacccttctgctttaaggcccaatatgggaggggtcgtccctaccagcccctcccttgtgcccattccactcccgcctggctgccgtctccagctggtcccggctgcctgcccggtcacccgatccgccctctaaactttacggcacggcgggcggtgcgtggggcggtggctggcctggtgggggcgggggctgcttcttaaaggagccgtcagagggtccccagcggccccagggtgggaaggggccagagtggagagatgctgctgcggaagtcctcggtggagtgtgagaaggcagccagtgttggcctggaagacctctagaacctgagaagaggcagcggcaagtgtcagcggagggaaggagggaggtgggggtcc

SEQ ID NO: 29631 - DNA, 2300 bp, Homo sapien
tggctgtcatggtagaagccactgctggccaggccactgaagtactaagtggcccaagtgttgaggaaggatggggactgggtcctgagggcccatccgacctccagttgagagcccctcccctgacctccagctgcccggccaccccagccggtccctgggaactgaggtggcagctgagctccccattatctttccccacagctccccacctgtggagggagaggttgagatattggagtccacgggtggtgcccccactcagtgattccctttgcctgctgagcccctggagctggggtttcttcctcccttgccttggctggccacctggcttctgggaccgccacctggggcacccttctgctttaaggcccaatatgggaggggtcgtccctaccagcccctcccttgtgcccattccactcccgcctggctgccgtctccagctggtcccggctgcctgcccggtcacccgatccgccctctaaactttacggcacggcgggcggtgcgtggggcggtggctggcctggtgggggcgggggctgcttcttaaaggagccgtcagagggtccccagcggccccagggtgggaaggggccagagtggagagatgctgctgcggaagtcctcggtggagtgtgagaaggcagccagtgttggcctggaagacctctagaacctgagaagaggcagcggcaagtgtcagcggagggaaggagggaggtgggggtcctggcctgggatggggccaggagctgggcaggagtgtgggtggaggggcctggaacctgcctcagcagctgctccacttgcttaatcccacctggaaccttgtcccactccctgggctcctgtgtccagcacctgcccagctgacccctgggaaggagggtgggcatagcagccaggtctttgccccagctgagggccagggggaggtgtctggctcctagagtgaaggggctcaaagatggggaagaactcaaggggtgagagaagtgaagggagaggctcagagaggctgtggaggcgttgagagggaaggccagctcagcgaggccaggaggctggggtgcaaatgaagggctgcctcaccttgcccctctttgattcctcaggggtgtggagagagagccctcaagctcaaatgcagaggctgcttcagctgggttgggagcagtccccaagtcagaggctgaggcttctgcccaggtcttgggtctcctgggtagcacttctccctctgaggaatggagtgattgatgctgcagttggatttgctcacttgcatgcccagagacatgtctattcttatgggtgcacacgtttgcacatgcacaaatgtgcaacacatctgtgtgcaaaatatgcacatatcacacatatgtactgcatggattgcacagtgccacatgtgtgtgcacaccaacccatatccacacatgtgcaatatgacacactatatatttgcacatagatgtgcacacacatgcacatacacactacacacatgcgcacatcacaaggggacactcggaaacacattcacaggcacccacacccttggctccagcctcaaaagtgtctctgtgtttttctgcgggactgtggggacactgccacctccagaggcctgaccccctcctgtcactctcactcttttgactggcttgttttgctcattgcacttggcaccctctgcatccatctgattccttgttggcactctgtcccctttcacatggggaccttgtctatgtctcccagtatccctcctcccaggtctaggctggcatgaagtgggtggcacattgtgaattaatgtctgtgagtgtgtatacaagagaggagattactgggaagggtgacgtggtgaggcgggcttgccagtgcagggtgaccctgagggtgtgcccagtggcgtgggtgtgtctgtgattgtggccaggcggggcaccctcggaggggagggttcggaagtggaatgcgaccccccagcctctttcccctaggggctgtaatctgatccctggggactccccccctagcctcccgccctcgccctcactgctgactcctcttccagatcctggggcagagtccagggcagctcaaggctcctccacacacacacccgctgaaccctgagcaccctgagctgctgagatggggcgggccggggctgccgccgtgatcccgggcctggccctgctctgggcagtggggctggggagtgccgcccccagcccccacgccttcggctctccttccaaggtaggtgcacctggcaggcg

SEQ ID NO: 29632 - DNA, 2300 bp, Homo sapien
tgtactgcatggattgcacagtgccacatgtgtgtgcacaccaacccatatccacacatgtgcaatatgacacactatatatttgcacatagatgtgcacacacatgcacatacacactacacacatgcgcacatcacaaggggacactcggaaacacattcacaggcacccacacccttggctccagcctcaaaagtgtctctgtgtttttctgcgggactgtggggacactgccacctccagaggcctgaccccctcctgtcactctcactcttttgactggcttgttttgctcattgcacttggcaccctctgcatccatctgattccttgttggcactctgtcccctttcacatggggaccttgtctatgtctcccagtatccctcctcccaggtctaggctggcatgaagtgggtggcacattgtgaattaatgtctgtgagtgtgtatacaagagaggagattactgggaagggtgacgtggtgaggcgggcttgccagtgcagggtgaccctgagggtgtgcccagtggcgtgggtgtgtctgtgattgtggccaggcggggcaccctcggaggggagggttcggaagtggaatgcgaccccccagcctctttcccctaggggctgtaatctgatccctggggactccccccctagcctcccgccctcgccctcactgctgactcctcttccagatcctggggcagagtccagggcagctcaaggctcctccacacacacacccgctgaaccctgagcaccctgagctgctgagatggggcgggccggggctgccgccgtgatcccgggcctggccctgctctgggcagtggggctggggagtgccgcccccagcccccacgccttcggctctccttccaaggtaggtgcacctggcaggcgggagggcccagcttgaggtgggcaggaaagggtccccgtatggccagggggctctgtgttggctgttgccccatgtgcgtgcctgtcaccagactctggtaggattagtgggcactctcaggccacctccagttaaccctgtccgggcctcagcccccagcctctgcccacattctcttcgtgctttctcaggaagacccctcctgtccccacagcaacagaccttgtctctgttccgttcagtacccccaacaaggcgatactccttcagcagagcaacagggaagtcagagcccccttctcatgcctcctgtataggagggtggcccctgggcagtggcagtgaataggcagttctgctgagctcaggctggtggtggagtggcaggaaaggaactctcagcctgacttttgggagttggggttctggccatccctgcatgccagtctcccccaggactctggtgtccataagccttgcctcccagtgcgcccgcctggagacaccacctgtctgagcatgcccaagttcaacctgccttcctcttcctggggggatgtaccacctaccctggcagctccacacgtgcacctgggtgggcttgggtttgcgtgtgtaaactcacacacatgtaaactcacatgtgtacaggccaggtcctaatggcaaccttggccgatagagtcaccaccaggcaggacctgggggaggcttccagcatggctggcgagtcatcagcagtgtcctgccctgcagagctccaggcctggcatggtctccagactttcagcctggagcgaacctgctgctaccaggccttgctggtggatgaggagcgtggacgcctgtttgtgggtgccgagaaccatgtggcctccctcaacctggacaacatcagcaagcgggccaagaaggtgccagggactcccaaccccagcactccccagggaaggagccctgggaccccactccagcctggagagacccagaggaatggctccctgaggtagagaatatcccaagttcctgacctgtgtcccctctcccccaacctcccgatagctggcctggccggcccctgtggaatggcgagaggagtgcaactgggcagggaaggacattggtgtgagtgccagctgcccgggccgggagtggggagggtcagcccctcaccccagagacagggcagggctaaaacagaggcctgcctgttctggctgggatgagggcagggaggtcgaggtggctgaggtctgggggtggtgagtcagggtgggggctcgtgtaattcttctggggtgcctctgagtcatgggaggctttgcaggcctgtgcttccccagacacccaccctcgtgaggcctgggctggtcagcaagggcccccaggt

SEQ ID NO: 29633 - DNA, 2300 bp, Homo sapien
cctggtagtcacaacttgccacacctcccaggagcccgtcctccggctggacccaggaaggatagaggatggcaaggggaagagtccttatgaccccaggcatcgggctgcctccgtgctggtgggtgagtccaagggctaaggccccaagagaaccccttagaaactctagaacctcacaaagtcccaagacccccaagagctccagggaatcccccataacctcactcactcccagagctccccaggccctcctgccccaagagccctccatttgcctgagtggcccttgctctgtctgcaggggaggagctatactcaggggtggcagcagacctcatgggacgagactttaccatctttcgcagcctagggcaacgtccaagtctccgaacagagccacacgactcccgctggctcaatggtgagaggctggtggggttggtgggtagaggtcgtcaccctcccacagggcaggtgccaagcaaggcccataaagtaagtgagcagtgggtgtggccaggtcttaccaaataccctccttaatcaggcactggcgtcacagagacagacaagacaggtatgaccgtgacctctttgagttcacagatcacatacatgataagatcaagtccaatggccttgaggccagagagagacaagggaggaagggaaaaggagactgggtggctggagggggttgggtaaaggaagccgctgtgctgaggggagtatgagctaattcccaagcacaagacagctagccagcaaaatttagggatgagcattccaggcagagggagcattccaggcagagggagcaactagtgcaaaggcctggatgcaagaacaagcaaaggaatagacttgcagagctagcaatgaaaagggggcctggactgtcaggggccagagtcatttattctaagagtcatgggggctgggcacaatggcttgcacctgtaatcccagcactttgggaggctgaggcagacagattgcttgaagacaggagtttcataccagcctgggctacaaagcaagacaaaaaataaaataaaattagctgggggcagtggcatgcacacacctgtagtcctggctagtcaggaggctgagatggaaggatcacttgagcccaggagttggaggctgcagtgagccatgatgctgccactgcaggacagagcagaccctgtctctaaatcaaataaaaattaaataagggctatgggctggtgggcacagtggctcacacctgtaatctcagcactttgggaggcggaggcaggcaaatcgcttgaggccaggagtttgagactagcctggccaacatggtgaaaccctgtctctactaaaaaatacaaaaattggccgggtgcagtggtgtgcacctgtaatcccagcactttgggaggctgaggcgggcggatcacctgagttcaggcatttgagaccagcctggccaacatggtgtaaccccgtctctactaaatatacaaaaattagtccggcatgatggtgtgcatctgtaatcccagctactcaggaggctgaggcaggagaatcgcttgaacctaggaggcggaggttgcagtgaatggagactgtgccactgcattccagcctgggcaatagagcgagacttcgtctcaaaaaaaaaaaaaaaagccaggtgtggtggtaggctctgactgtaatctcagctacttgggaggctgaggttgcagtgagccgagatcgagcactccagcctgggcgacagagcgagactgtctcaaaaaataaataaataaacaaataataataataataataataataaagagcaatgggacccagcagaaggatttgaagcaggagtggggagcatctggttatgctagagaggaagattcatgagtgaaggtgaaaccagattacctcatctccctcctaccccagcctaaggtgctgggcgacgtgtggggcgagatcggaggctagccgggcttcacgcctgcgcccccaggtagccacggtctctgctgccccctcgcggctgcttcttgcctcgcaggccctgatcctttggattcggtccgcgcagagcgccaactggacatggtgctagaggttgggtggtcagacactgtgatcccgggtgctgtgcccgcactacgggaaggggaagcagcgcgtgggtctcgcatcaggaggcaaggccaggacccgctgacccatgcctcctgccgcggtcagagcccaagtttgtcaaggtattttggatcccggagagcgagaacccagacgacgacaaa

SEQ ID NO: 29634 - DNA, 2300 bp, Homo sapien
cgaggaggtgcctggagtgcccaccctgggagacagaccccacctccttgggtagtgagcagtgagcagaaagctgtgaacaggctgggctgctggaggtggggcgaggcaggccgactgtactaaagtaacgcaataaacgcattatcagccaaagctggaatggccccagcagaaaaccccagtcctcggccttgctatgtggtcttgggcaccttactagcggtgtcagggcccgagtttctcctgtccaaggttgcctggtgaggattaaaggtggttccggccaggcgcggtggctcacgcctgtaatcccaacactttcggaggcccaggcggacggatcacgaggtcaggagatggaaaccatcccggctaacacggtgaaaccccgtctgtactaaaaatacaaaaaattagtcgggcgtggtggcgggcgcctgtaatcctagctactcaggaggctgaggcaggagaattgcttgaacctgggaggtggaggttgcaatgagcctagatctcgccgctgcactccagcctgggcgacagagcgagactccaaaaaaaaaaaaaaaaaaaaaaaaaaaggtggttccgcgtgactgaacaggttctgtagggcctttgggaatagtgacacgcagggtacattgtgcataatataacttcaggactaagtgctaggaagaaaataaaactggaccgggcgcagtggctcacgcctgtaatcccagcattttgggaggccgaagcagtcggatcatgaagtcaggagttcaagaccagcctgaccaacatggtgaaaccctgtctctactaaaaatacaaaacttaggtgggtgtgatggcacgcgcctttaatcccagctactcaggaggctgaggtaagataattgcttgaaccagggaggcagaggttgcagtgagccgagatcgccccactgcactccagcctgggcaacagagcgagactctgtctcaaagaaaagaaaactgggtgatgtggaaaagaatgtacacagaaggcctcactgaaggggtggcatttgagttcgctgacaagacggggctggccacagggctatctgggagcagagcattccaggagggaacagccaccaccaagcccctgaggtggtaacaagcttgttgactttgaggaacatcagggaggccagtgtgagacaacggagtgacaggtttgaggtgtgtaggaagtagagcccacagtcttgctttgcccccactgggaaggaagggcacagggatccaaccacagagggaaagctggaagctggaccacctcctcctttcaaggtaagcagtgatgcgcatccttacacaaccttatgggacctgtctgcccttgtggagatgggagcaggggaagaccaaaaccgtggattgtgctaaatgctccagatgttgttctcagtgtacactgccagggaggagccactgttattccgactttacacatgagcaaactgagttcagagaggggagaccctttacctaaggttgcaagcttagtaacaaatgaaccagcctccaacctaggtccacccactggccagcatgggtgctgttggtgtatctgcccacttgtgaagctatcagagccctcatggcattgggattcagttgtccatcaccctctataagacacacacaacaatagcattgtgtgctagcaggtcatgcagtggaggctgctgtgtttgctgggaggagagatgactgggctgtgggtaggagtctgcaggggtagaggggtggccaaatagagatgcacaggcttcctttgtctgtcttggctgccacatggggccttgctgagcctggagtggccattctggatgtatgggggaggtgtgcttccccttgaaggtccctgggcacctggactagtggaggcaggctcctggctggctccctcaccaggtagatagttcaggctggcccacgtggatcactctgccccttcccatggctgagggctgccccctctaaatatagcccagtgggctgagctcaggcctattttaggccaaggctgggaggcagccaggccttccctgggctcacaaaggagccactgctgcatttgtccagtcctgctactggatgccatcattggcccccgactgcccactgcttgccatgcctgaggagacccaagaaggtaggagagggtgaccatgagggagggcaaggcctcagtcctgtgaccttgtggaccatggagagacccaccctctgtcccactgacctcactgtcttgagtagttagttaccca

SEQ ID NO: 29635 - DNA, 2300 bp, Homo sapien
ctgtcctggagcatctgatgagggaggcatggctttgccctggaagatgttgaggggtagggaggcccagcctttggagtgctggcctgaggggagatattctgagtggaaggcctgagaagccactcagagactcgatacaaaggggccctacttgggctgggtgagtgtctcacacctataatcccagtactttgggagcctgagatggaaggattccttgaggccaagagttcgagaccagcctgggcaacatagtgagaccccaacctctaccaaaaaaacatttgagacagagtcttgctctgttgcccaggctggagtgcagtggcaccatctcagctcactgcggccttcacttcctggttctagtgatcctcccacctaagcctcctcccgaatagctggactacagatgcataccaccacacccagctaatttttatatttttgtagagatggggttttgtcatgttgcccaggctggtattgaactcctgggctcaagtgattctcccgcttttgcctcccaaagtgtgggattacaggtgtgagccactgtgcccagcctaaaaaattattagccaggtgttatgcacctgtagtcccagctgcttgggaggctgaggtgggaggattacttgatcccaggagttcaaggctgcagtgagctatgatcatgccactgcactccagcctggatgacagagtaaaaccccgcctctaaaaccaaaccaaactagagagtccctactgtagagttagaatcagattgtgacagtgaaccagaagagtttcttgaatgtggatgtgtgcccacatggatctggccagcccagcactggcttagcagctctctgcctccaggatgaccttgtgcagtccattggtgtgagtgcagcactaggggcagccggcgtggtgctctggggggacctgagcctctccagctctgaggtgatcattgcccctttgagcctgccatgtagcacatgctggggtcccagggtgggggacggccatgtcaagattatagagcaggcatattgacacatatcttcccttctcctcaggaggagtgctggcatctccatgactacctggtggacaccttgggcccctatgtgatcaatgtgaccagggcagcgatggcctgcagtcaccagcggtgccatggccacgggcgctgtgcccggcgagatccaggacagatggaagcctttctacacctgtggccagacggcagccttggagattggaagtccttcagctgccactgttactggggctgggctggccccacctgccaggagcccaggcctgggcctaaagaagcagtataaagccagggcccctgccactgcctcttcttttccctgctgccacttttccagtcctggaactactctgtcccactcttgctctattcagtttacagtcaaccctcccaagcacacaccccgcttcccttggaatccctgaggggtagaaggggccagaaaaaacgcttataaaaccagaggccctctgagatcatgtgagtcctccatggcaaggaagcagttccagggagagtcaggttccagctagttagggctgccagcctagggctttgtgcctacacctcactaagcccatggagaggtcacagatgggccgtgcacgggcagatgggccccaaaaaatcttggcgaaggtcggtaaagtgctaagctgttgtctgcactctttcatcataaagtcacttttttccactgcctgaggtttggctgttgctcctgttatcccaagctctaagcccttcccatggtccccagacccaggcaggggtaggtctcgtctggagtgtcccgctgccaagtgccctgagaagccagtcctgccttggtgctccactgagggacgcttcggagttaaccaccgtgcacttgttcccgacgcggggctggggcgcgcgcagggcattgtgggtgcatagttcagccagcgcgtcgtcggctggtgggccccaggcgtggactaccattcccatggtgctctacgcgcagctagccgccgtcgcctgcgcgctcaggcctctgggattagtagttttagcctcgtggatgtgggcctgaatcggatggcctggaactcgccttcccggcgacctgtttggcagggcggggcgcctcgcgaagatggtggcgcgcgtggcgtgtggctcccgtcgtctggccaagtctcagcgcagcgcaccggccggcgtctcgttggcctggagcccacacccaccgggtccctgaccccgcgccccccgc

SEQ ID NO: 29636 - DNA, 2300 bp, Homo sapien
ctccaaccccaccctccctcctggcacagcccagcatggctgttatctacaggaggagagccactgtggtctgaagagatgctactgcctggagactggggtcttaacctccagcctggcactgagccacctgcaacctagcagcaggtgaccttggctcccagcctgactcagctgaacctggatcctgtgcataggcaagagctgactctgagccctggcccagccaagctgacccctacactagaccctacacaccggatggagctgatcctgagtaccagcccagctgagctgactctggatcctgcgtgccagccaaagctgcccctggattccacatgccaaccagagatgaccttcaatcctggtccaactgagcttaccctggatcctgaacaccagccagaggagaccccagctcctagcctggctgagttgaccctggagcctgtgcaccgccgacccgagctcctggatgcttgtgctgacctcatcaatgatcagtggccccgcagccgcacctcccgcctgcactccctgggccagtcctcagatgccttccccctctgcctgatgctgctaagcccccaccccacacttgaagcagcacccgttgtggtgggccatgcccgcctgtcacgggtgctgaaccagccccagagcctcttagtggagacagtggtggtggcccgggccctgaggggccgtggctttggccgccgcctcatggagggcctggaggtctttgctcgggcccggggcttccgcaagctgcatctcaccacccatgaccaggtgcacttctatacccacctgggctaccagctgggtgagcctgtgcagggcctggtcttcaccagcagacggctgcctgccaccctgcttaatgccttccccacagccccctctccccggccacccaggaaggccccaaacctgactgcccaagctgccccaaggggtcccaagggacctccattgccaccaccccctcccctacctgagtgcctgaccatctcacccccagttccatcagggcccccttcaaaaagcctgctggagacacaatatcaaaatgtgagggggcgccccatattctggatggaaaaagacatctgaggccatccagggcaaggaactgtctttctggttcaatagactgccccgacagtctacaagcctcagcccactgaccatacctcagcccctagcccctggggggcagctttaacctgggcatgtttcctgggtaccagtggggccaggaggtggctctggctcagagccgtcagtgtggctgaataaaggctctcttgggtatggctgtgacagtttatttgttgatccccctaccctcacctctcacctcttctgcaggtcccttatccctgcagaagtctccagatccaccttggccctgaggccattgatgggaggatgcctgtcctttgcctttaccccccacctggctcaggagacagggtggctgttttcttccccattcactcattaccattcactgagcacctactgtgtgtcaagccctggacgggacataggcaatgggtaactagacaaacaggcatacagtagcaggatccatgtggcacaggggaggtacagaggctttgggaacccaagtgacttcactccacctggggatccaggagacctcccagggcagtgatgtcacagcagagacctgagtgctaggtaggaattaaaccaggcaggtgaggaggtgggagctgactgttcttggaagagggaacaaggtgggcagaggaaagaaggggacttgtgacagttgtgggaggacacagtggtgtattgacaaagacggaacatgggagggaatgtaccctcagctcactgtaaagcccgctttggtgtgcacctgccactcgatgcccggggcatcatagccagcttgcggtgtggctgctttaaaaggcccaagagacccctggggaaacatgctttccccagctcctcctgtaaggatggggaggagctgggggagctttcctggctttccctgccatgtggaaggtgtggccatagctgcggactctaagcttacacccccctctctcctgcaggtttccatccttggggaatgaccacgcaactgggcccagccctggtgctgggggtggccctgtgcctgggttgtggccagcccctaccacaggtccctgaacgccccttctctgtgctgtggaatgtaccctcagcacactgtgaggcccgctttggtgtgcacctgccactcaatgctctgggcatcatagcca

SEQ ID NO: 29637 - DNA, 2300 bp, Homo sapien
tctcagctcctgcaccctccaccttccggattcaagtgattctcctgcctcagcctcccaagtagttgggattacaggcatgccatcaacatgtctggctaatttttgtatttttagtagaaatggggtttcaccatgttggccaggctggtctcgaactcctgacttcaggtgatcctcccacctcagcctcccaaagtgctgggattacaggtatgagccaccgcgcctggcgcatgggcacatccattgagtgtgcacttggtgccaagttctgtgccaggcacaggcaattcaacatttattggaatgatgtagtccctgtctgcatggaattcataggctagaggaggaagcagtttgcctctggtcccatggccagagcagccccaggtgaaggttatgaattatttgtcccatctaatggtgttccagcagtctgccacatggtgggaaggaggccccacagagctgtgctgtctccttcccaggatgagctggagcacagcctgggggagagtgcggcccagggggcagctggagtggtgctctgggtgagctgggaaaatacaagaaccaaggtgagcttaggcctggcatgagggtgggggtgggggaggggtggggccattaagctgacggggtagaccctgacttaccctttctacctgcaaagtcctggctgaccagcaggtgagtgcctcagtgccctgggtgggtccatacatggccatggtgtccctgacgctatcctcccttcccacctaggaatcatgtcaggccatcaaggagtatatggacactacactggggcccttcatcctgaacgtgaccagtggggcccttctctgcagtcaagccctgtgctccggccatggccgctgtgtccgccgcaccagccaccccaaagccctcctcctccttaaccctgccagtttctccatccagctcacgcctggtggtgggcccctgagcctgcggggtgccctctcacttgaagatcaggcacagatggctgtggagttcaaatgtcgatgctaccctggctggcaggcaccgtggtgtgagcggaagagcatgtggtgattggccacacactgagttgcacatattgagaacctaatgcactctgggtctggccagggcttcctcaaatacatgcacagtcatacaagtcatggtcacagtaaagagtacactcagccactgtcacaggcatattccctgcacacacatgcatacttacagactggaatagtggcataaggagttagaaccacagcagacaccattcattccatgtccatatgcatctacttggcaaggtcatagacaattcctccagagacactgagccagtctttgaactgcagcaatcacaaaggctgacattcactgagtgcctactctttgccaatccccgtgctaagcgttttatgtggacttattcattcctcacaatgaggctatgaggaaactgagtcactcacattgagagtaagcacgttgcccaaggttgcacagcaagaaaagggagaagttgagattcaaacccaggctgtctagctccgggggtacagcccttgcactcctactgagtttgtggtaaccagccctgcacgacccctgaatctgctgagaggcaccagtccagcaaataaagcagtcatgatttacttagctgtttactgagcgcctaaaatgtccaggccccggtatccaaagggcacaggaaaggcttgtcactctcaccagatctgacgtcagtctaagggcggctgcttcccagggtggggcccaaatttcaagaggaagccccacctgatcggaccgtttccaagctgtcctggggcaggaggccggcgggaaccgaagctagacttgtcagagcctggggcggggctggcggaggcagagccagctggaggcggggcctgcgcctggctgaagtgacgtgctgggctggggcagggcctggaagaagccaaatcgaggcgggacctaagctgtgacgcaaggagaaggaggaggggcctgtatggggccgggtggggaggaggcggactcaaatggagatggggtggggctcagcaggggcggagccagggtagagactgagtcggcgcctggcgggtgttgtgacgcgcaaaccaggggcgggttctaagcggcgacgcgcgggtgctgggaggccttagaacgccgtggcgtgccgcaggacgcgacggctgcagaacatccgccgcaccgctgggggccaacgttgtcggaccgaggagtccgaggtggcgactgagtga

SEQ ID NO: 29638 - DNA, 2300 bp, Homo sapien
gtcccagctactctggaggctgaggcaggagaatcgcttgaacccgggagccagaggttgcagtgagccgagatcatgccattgcactccagcctgggcgacagagtgagacttcatctaaaaaaaaattaggccaggcgcggtggctcacacctgtaatcccagcactttgggaagctgaggcaggcagatcacaaggtcaggagatcgagaccatcctggctaacacggtgaaacctcgtctctactaaaaatacaaaaaattagccaggcgtggtggcgggcgcctgtagtcccagctactcgggaggctgaggcaggagaatggcatgaacccggggggcagagcttgcagtgagctgagatcgcaccactgcactccagcctgggcgacagagcgagactccgtctcaaaaaataaaaataaaaaaaaaacagaagtacataagctctgtccagagaggtggagacagctcaaagcacggccccccactgggggcttccaggtcacaggcaggtgacagacagatggttgcattcttttgagtttctggtagtctttccaaaagaggcaatggaggcaatcataatatgcatctatgtctgtaagcaaaaggatgacttgaatagaatgggaggcagatttgtcctgagcggttcccagcttgaaggggcccaagatattttcctttcacatattgaacaagtgaaaccacaaatgaatgaacaagcatgtgctcactgacagctcatatgcatggtcacacaaacacaggatctcatgctcacaagacagcagggctcacacacacccagtcccaggcactgggttccacactcacacctacttgccactggaatttgtgcagaggctcagatggtcactaaatggggcttcacaaagacacagtcactaacccagcacatatacaaagggtgatgacacagccctgacttcatgaacacagtgcctttcagaaacaggtccctacaacagggatgacttatccactaagcacaatagacccaaggcctagggccacagtactttcaggggcccacaaaatgtttttttaatcagaagaagaatataaatgtaaatatattaataattaatatataatagtgtaacccagacatgacctcctgggctcaagcactcctcctgcctcagtgtcccaagtagctgggactacaggtacataccaccatgcccagctaatttttaatttttttgtagagatggggtcttgctacattgcctaggctggtctcgaactcctgggctcaagcaattctcccacctcagcctcccaaagtgctaagactatagccatatatatatatatatatatatatatatatatatatatatatttttttttttttttttttttttgagatggagtcgctctctgtcacccaggctggagtatagtagcacagtggagcagtcttggctcactgcaacctctgcctcccgggttcaagggattgtcctgcctcagcctcccgagtagctgggattacaggcgcctgccaccacgcccggctaattttttgtatttttagtagagaaggggtttcaccatgttagccgggatggtctcgatctcctgacctcgtgatctgccacctcggcttcccaaagtgctaggattataggcgtgagcctccgcacctggcatgcctggccatattttaaaatattttttttaaggaggaaaagatccacgaaagtaaagtgcctagggcccatcaatgtcagatgcagccacgtggacaaagaacactccctgagcacaagacacgaaagaacccggtctccagtgtcacaaacaggcctgcccagcagggtctgcccctgcccacctcctccagcctaggtaaggccacaaagccctgccctagtgctgacagcgtgggaggggccactgttggcccagccccacccccaaccaagatccctttgccagggattcagaggtagccctgatgcctggctggcctggcctcctaatccaaggcccgccccttggcccgcccctggcctgggtggggtgaccccctacaaaagctcagaatttccagcagcggctccttcctccaggagtctctggtgcagctggggtggaatctggccaggccctgcttaggcccccatcctggggtcaggaaatttggaggataaggcccttcagccccaaggtcagcagggacgagcgggcagactggcgggtgtacaggagggctgggttgacctgtccttggtcactgaggccattggatcttcctccagt

SEQ ID NO: 29639 - DNA, 2300 bp, Homo sapien
acctagcaggtgtcaataaccagcttctgaatcagctgtgaacccagaaaatctgacaaaggtctcagttaacttagaaagtttattttgccgaggttgaggacttgctggtgacacagcctcaggaagtcctgaggacatgtgcccagggcggttggggcacagcttggttttatagattttagggagacatgagacattaatcaatatgtaagaagtacattagttccagaaagaaaggtggagactgctcaaatcaaggctcccaggctcaaagcactgggggcttccaggtcacagataggtgagagacagatggttgcattcttttgagtttctggtaagtctttccaaaggaggcaatcagaatatgcatctatctctgtgagcaaaaggatgacttgaatagaatgggaggcagatttgtcctgagcagttcccagcttgaagaggcccaagatactttcctttcacatttaccccattttctttttcaaaatcttttggagaaagcattttgcaagaaaatgagtatctggtctcaggtttcatctgatctctcattgctagataagtaggtccggaaagctcatttttagcaggttgtaaagtctcatgcagtgtgaagagaaaatagggagaaggaaggaagagaaaaaaaaaacagcaaaagaacaatcccagccctggcggggtggctcatgcctgtaatcccaacaatttgggaggctgaggcgggtggatcacctgcggttgggagttcgagaacagcctgaccaacatggagaaactctgtctctactgaaaatacaaaaaactagccaggcatggtggctcatgcctgtaatcccagctactcaggaggctgagacaggagaatcacttgaacccaggaggcggaggttgcagcaacctgacattgcgccattgcactccagcctgggcaacaagagtgaaactccatctcaaaaaaaaaaaaaaaaaaaatcctgggaaaatataggccacattactctgaagtccatacattggtaggcaggtatgaaagtggcttatgtatgtacataaacaggttactgttactttcttctgaagtgtaagttgtctgactttagttgacacgcttttaagaaaccacagctagggccgggcgcagtgactaacgcctgtaatcccagcacttcgagaggccgaggcggccggatcacaaggtcaggagttcgagaccagcctggtcaatatggtgaaaccctgtctctactaaaaatacaaaaattagccaggcatggtagcaagcgcctgtagtcccagctactcgggaggctgaggcaggagaattgcttgaacctgggaggcataagttgcagtgagctgagatcgcgccactgcactccagcctgggtgacagagcgagactccatctcaaaaaaaaaaaaaaaagaaaccacagtggccgattgcagtggctccccctccccctccccctcccctccccctccccctccccctctccctccacggtctccctctgatgccgagcggaagctggactgtactgctgccatctcggctcactgcaacctccctgcctgattctcctgcctcagcctgccgagtgcctgcgattgcaggcacgcgccgccacgcctgactggttttcgtattttttgggtggagacggggtttcgctgtgttggccgggctggtctccagctcctaaccgtgagtgatctgccagcctcggcctcccgaggtgctgggattgcagacggagtctctcaatggtgcccaggctggagtgcagtggcgtgatctcggctcgctacaacatccacctcccagcagcctgccttggcctcccaaagtgccgagattgcagcctctgcccggccgccaccccgtctgggaagtgaggagcgtctctgcctggccgcccatcgtctgggatgtgaggagcccctctgcctggctgcccagtctggaaagtgaggagcgtctctgcccagccgccatcccatctaggaagtgagcagcgcctcttcccggccgccatcccatctaggaagtgcggagcctctctgcccggccacccatcgtctgagatgtggggagcgcctctgccctgtcgccccgtccgggatgtgaggagcgtctctccctggccgccccgtctgagaagtgaggagcccctccgcccagcagccgccctgtctgagaagtgaggagcccctccgcccggcagccaccctgtctgggaagtgaggagggtctccgcccggcagccaccccgtccaggaggg

SEQ ID NO: 29640 - DNA, 2300 bp, Homo sapien
gccattgggttgttgaggggttggctctgggtgatttgagggtaggtagatttgcacccctggagaggtctgctggaaccttgctgcagtcctccctagggccagccacaggaacacccctcccagaggagtatacccctttcctcatccatgttgtaaggagccccctactctgtatagtggactctgaaatccatccaggaatgaactccagcaggaaagcactctgcagaaccctcccagtccatcccctcctccccaacccacacagtcacactcactaacacattgtcctgtcacacaggatgcggaagctctcagtggaaaaaaacggactcagctactggaagtccccccgaccctccccccaaggctagttcccttcttgggcacctgctctgggggaccatcagctgaacgacccccaagtattttgactcccaaaagcaccaccacctgaccccatcctctcacaccctactggatttgaggatgggccccaatcctagggaaggagtgaagaggttccctagtgttggaagctgtgggtgtgggggagattggcacctgatcctgagcccatagccttcctgtcacctggcgcagctggcggggccagatcctactcgggaagggtggggagggcagccagccagcagggcattctggagggaaacagggtcaaggcgatctcctcccccacgcctgttcctggccctttcctctcagggggcagcaggaagtgaggagaaagggctgggatgggaggcgggagcggatgggagggaatggggtttatcaagtcctcggcgagctgcccaacgggcagcagctggcgcaagtagcctagctggagaggctcaccccaggaaggagggaggccaccgacctactgggccgacggactcccacacaggtgagcccagagcagacggctggtctgcacccccacagatgcgctcgcagttgcactccctccctctcctggcgcccgggagggttaggggctggtggtgcagacgcgggcccttttgggagttgagtctcgcacaagggagcggacctaggaagagccgaggtggtttcgcacggggctcgccagggtctaagcctgccccccaccgggagaggcctgtggagcgtagggggcgctggatacgggatggaggccctgggagacccctcttgctggctttctcggaggtccagccagaaactgctgcaaggaatggaggcctcctcggggttgagagggagccgggctcccaaaggacctcagagactgggcagaaaaggacgggatctcagggatgactgtcccgccctgatgcgagtcagggagaggggcggccaacctcctagacccctctgagcttccctgaccccaaccctgcggccacgccgcgacccagagccgggctgccaggataacgactgcctcggcccttcctgggccggctaagaagcggtgcttggccccttccctcagtctggcagggggcggggcctccctttagacggcggaccagagaagggggcccctgattcgtgggaggcggggcactactctccaggagaccagaggtcgcctcaggtcaaagtccctttttccacacaaaggggacccacggctggcgtctacgttagggggtgcagagccagatctggtgctgccccctgccaacctcggagtaccacagcacctcctgatggccgaacggggcaacgcctcctcctattcccccccccccccttcccgtccccctgccttgtccctcacactgtctctttaaagggctggcggcgccgcggagctgggaggactgaaccaccggcctcgggctgcaggggaaacatttcaggctgactggcgctcgtggctgagactcccatagaaagcccggctcagaggggcattagggtcctaaatgggcggccacgtccctctgcagaggacctggggctcttcgagcccgaaacgaggcaccggcaccgagaaaggtggaccacaccttcccgccccgtccgcaagtccaatcccgggcccacctccgcactggagtcttaaagggccagcgtgcctgggggcggagccagcagaggcgctgagccgggccgcgcctgggcgaacggccggagcgggctgggctgggcccgggatggcggtggccctggcgccggtcccggtggcgccccgcgcgaggtgagggcgggcggtgcaaacctggcggctctctccccttgggctggggtctgaatccccgggggtgctcgcggagaggcgtcccagaaaccccacc

SEQ ID NO: 29641 - DNA, 2300 bp, Homo sapien
ctgacacccagtgtctagactaccacctgggttcaataggtaggcctggcacaggactctggcaggccccctatgaccagcaaagcccaagagtaagtctgagcccagcctgtggccatcccaactgtggccagcaggtggctgtgtgttcacacagacctcactgcaggccccctgcagggtgggagggcactcatttatctgttgtgatccatgtggtggtgacccttggaatcagaaggccctgggatacttcactaaggattggccccacctgcctgatctaaggtgagagagtgtgacccaagatagttctggaatatctgtcttagctgtagcatcgccagctgatcctaagtggggtcatggcctgacccccatggacctcaaaggcccagctttaatggacagcagccagataggtgtccccacgcctttggcctactgccaggctcagcaacccaaactcatgtgcctcctctgaggcctgcctgcggacaccatgggagaatgagctcaggctgctgtttcagcaagcaaggctcggcccactagtattgcccctgctgtctgttgcccccatcttctcatcacctgcagcctgcccactgtggtcattctgcctgcacttctcaggggctgctataaggcagattctctactaggcttaggctttgactatcagtccaactcccagttaaagaggggagatttcagggacaggcttctgagtgtagggagctggtctgccagtctttcggaggtttgaacttgtcaaggctagggcaggatcaccatatccagcctggacttgcagttctgtggggtgcctccccatacccccataagatgccaaacatgaggccctgtcatcctccatggtccccctctactggctgttcaaggcccagggctctcccatgccagatagcatcctgtctcctaccaccactgtcccagcctgagggaactccctgtgctgggcctacccagctgaccccatcgctggaaacaatgggggtcaggcaacacttccccactctctcccgccgggctgtgctcacttccttcctgctggctgcctgaggaagtgtccctgccctgggacagtctggcctagcctttgtttccccgggggtccccacccatggagctttcaaggcttctggcccctgtgaagccagcacagtggtacagggacactgcaccttcccctaccatgtcttggactccttggtcctcagggccagactcctgggtattcacctacccctcacacagccttctgttgggggagaggctcctgggcattgggccattgggttgttgaggggttggctctgggtgatttgagggtaggtagatttgcacccctggagaggtctgctggaaccttgctgcagtcctccctagggccagccacaggaacacccctcccagaggagtatacccctttcctcatccatgttgtaaggagccccctactctgtatagtggactctgaaatccatccaggaatgaactccagcaggaaagcactctgcagaaccctcccagtccatcccctcctccccaacccacacagtcacactcactaacacattgtcctgtcacacaggatgcggaagctctcagtggaaaaaaacggactcagctactggaagtccccccgaccctccccccaaggctagttcccttcttgggcacctgctctgggggaccatcagctgaacgacccccaagtattttgactcccaaaagcaccaccacctgaccccatcctctcacaccctactggatttgaggatgggccccaatcctagggaaggagtgaagaggttccctagtgttggaagctgtgggtgtgggggagattggcacctgatcctgagcccatagccttcctgtcacctggcgcagctggcggggccagatcctactcgggaagggtggggagggcagccagccagcagggcattctggagggaaacagggtcaaggcgatctcctcccccacgcctgttcctggccctttcctctcagggggcagcaggaagtgaggagaaagggctgggatgggaggcgggagcggatgggagggaatggggtttatcaagtcctcggcgagctgcccaacgggcagcagctggcgcaagtagcctagctggagaggctcaccccaggaaggagggaggccaccgacctactgggccgacggactcccacacaggtgagcccagagcagacggctggtctgcacccccacagatgcgctcgcagttgcactccctccctctcct

SEQ ID NO: 29642 - DNA, 2300 bp, Homo sapien
agctgctccaggcctgcagcaggagtggtgcagacagaagtctcctcaatttttgtctcagaagtgaaaatcttggagaccctgcaaacagaacagggtcatgtttgcaggggtgacggccctcatctatgaggaaaggttttggatcttgaatgtggtctcaggatatccttatcagagctaagggtgggtgctcagaataaggcaggcattgaggaagagtcttggtttctctctacagtgccaactcctcacacaccctgaggtcagggagtgctggctcacagtacagcatgtgccttaatgcttcatatgaggaggatgtccctgggccagggtctgtgtgaatgtgggcactggcccaggttcataccttatttgctaatcaaagccagggtctctccctcaggtgttttttatgaagtgcgtgaatgtatgtaatgtgtggtggcctcagctgaatgcctcctgtggggaaaggggttggggtgacagtcatcatcagggcctggggcctgagagaattggctcaataaagatttcaagatcctcctgctgttggaatcttttatacatataaagtttttgtagagacatgagtctctctgtgttgcccaggatcctcccaacttggcctcccaaagtgttgggattacaggtgtgagccaccctgcccagcctggactctttattattataggcgcagagctgcagttgcccctcatggtgccagaagttgccaagggtgatggacaggctcccaggtgtcttgcaaagtcaccatggaccaatttgtgaagatgtagtatgcatacatacttggtcatcactcagctccctggggctcaggttgtggtggagacaaaaatggactgcagttagaacttagggaaactggctgggcatagtggctcacacctgtaatcccaacactttggttgggctaggtgggcagatcacttgaggccaggagttcgaggccagcctggccagcatggcgaaaccccatctctaccaaaaatacaaaaaaaatttagctgggcgtggtggtgggcgcttgtagtcccagctactcagaaggctgaggcaggagaatcgcttgaacccggcaggcagaggttgcagtgagtggagatcacaccactgcactccgatagagcaagactccaactcaaaaaaaaaaaaaacggccgggcgcagtggctcaggcctgtaatcccagcactttgggaggccaaggcgggtggatcacctgaggtccggagttcaagactgcctgaccaacatggtgaaaccccgtctctactagaaatacaaaaaaattagccggcatggtggcagatgcctgtaatcccaagtactcgggaggctgaggcaggagaatcgcttgaaccctggaggcagaggctgcagtgagccgagatcgtgccactgcacattatcctgggcgacaagagtgaaactccatctcaaaaaaaaaaaaaaacaaaaccatcccttcaacacacacacaccacgctctgggagaaggtgtggcataactccttcaccaaatacagagctgccaccgtggaccagacactgctcgtgataccgagggtatagctgttaacaattcttgctttcattaagcatggactctgctgggtttgaaaacactgaattcgaagttcttcagaactgaatgtaactatgtgaatctggccagttccttaattttctttcaacttggttagttcacataagcgtggcaatcgcaaaaatacagctgtgaaaatagaagccagatgggcacccggcggtctggccttaggccctgaagtgcaggtttgaggattggtgcttgcgaagtcctgctaggcctgaactcaggtgttgggggacgtcagagccgccaaatacacccaaaagaccgggaggactcacggccaccactttcctcggtgggagctgtcccagctggtcagatcgcgcttgctgggacctgggatctcgcaacgcatgctgggatgcccagcatctaagggcgcccattggtcccgcccccacgacttgagcaacagccaatcagaggtggcagcgtgcggaagcggaagtgaggtttccgtggagacagccgagcctgcggaaggcggcggcggcggcacctgcgatcagcggctggggcaggttatggtagtgcggactgcggtgtgagcagagcggccacggggcccgccatgcgccggcggccctgacatgggcgccagcgggtccaaagctcggggcctgtggcccttcgcctcggcggccggaggcgg

SEQ ID NO: 29643 - DNA, 2300 bp, Homo sapien
cacatagctgggtacctgctcctccccacgcccccttcctgagcagtcaactcaccaagctcatgaagaggttgctgttgatctgggcattgtactccttgatcttctgctcaatctcagcttgagaaaggtcaggtgtctcccactccacaggctcgtcctgcaagatgggccagcatggacacagggcccttgaggaacccagggcttctctgaaaaatggcctctggggcagtctttggaaactgactgcctttggccccctgtccctgatgtacatatacatagctggtgcccaccctgaacccaccactgctcctggttttgcatgctctgggtggataagggaaagacagaatcatttggcttctctctgctgcctgcctagggcctcagcactgaatgtagccttaaggataccacagaagcaggggcaactgaaggcacatggccaggggccaggaacagctgagggactctgaagagggactctcatttaaagtaaaatcaggctgggtgtggtggctcacatctgcaatcccagcattttgggaggctaaggtaggaggatcacttgatcctcaggagtttgagaccagcttgggcaacatagcaagacctcatctctactaaaaaaagaaaaaaaaaaattagccaggtgtggtggtgtgcctgtagtcccaactgttcaggaggctgaggtgggaggatcgtttgagcccgggagattgcagctacagtaagctattatcgtgtcactgcactccagcctggggaactgagtgagaccctgcttcaaaacacaaaaaacaaaaacaggctgggcacgttggctcacgcctgtaattctagcactttgggaggccgaggcgggtggatcacctgaggtcaggagtttgagaccagcctgaccaacatggagaaaccccgtctctactaaaaatacaaaattagccaggcgtggtggcacatgcctgtaatcccagctacttaggaggctgaggcaggagaattgctcaaactcgggaggtggaggttgcagtgaactgagatcgtgccatcgcactccagcctgggcaacaagagcgaaactcggtctcaaaaaaaaaaaaaatcagtaaaatcacacctcaattgcacattctgatcacagcaccctagttgagttggagtgagggtttgtcctggagaaggcagcccatttttctcctctgccccggcacggggccatgacccactgcagggtgagaggagtggagagtggtgcacatcagtagtccagccaccagtggacagagtagtacttggagccagttctccatgtctcacacatagtgagaaaaatcactgtgacatgatgtttaaccttgacccaagctgcataaaaggcagctttaggccaggctccaatctgccagaggtacacaggcagcttcctggtgggtttctgcacctgcctgtgctgtctggagatttggcccaaagattttttttttttttgagacgaagcctcactctgtcgcccaggctgtagtgcagtggctggatcttggctcactgcaagttctgcctcctgggttcaagcgattctcctgcctcagactcccgagtagctgggactacaggcgcgtgccacaacaacacccggctaatttttgtatttttagtagagatgggatttcaccacattggccaggttggtcttgaactcctgacctcaagtgatccgcctgccttcacctcccaaagtgctgggattacaggcgtgaaccatcgtacccgacccagagatttttaactcgaccactcactccccacctcatctagggactggattcttgccggaagggtggagtgtgggacagggcagccagggctctgaaccgactttcttctcccagactcccttggccccactgcatcagccttacttcctgttgacgtcagataggccctagttagaatgcgagtgtcacagacacagctaagctcagcgctgaccaatactttgtcccagaagaattcccacaaggtttcctgtagaatgatcttgtgcctagcccaggagagccagggttctccctgactccgccctggagtccccttaagcacttaaaccatctgatggggacaaatggagaggacagatgagggagcagggtggagcgttttagcagaatgctccttacccagaacccgctgctattctgcagccagcaaggatgtggggctaagaactaaggccagggccttacaggaaaaaggtaaagggggaggggtgggaatttaagctcattttc

SEQ ID NO: 29644 - DNA, 2300 bp, Homo sapien
aaacctcatgtctactaaaaaataaaaaaaaatgagccaggcgtagtggcgggtgcctgtaatcccagctactcgggaggctgaggtgggagaattgcttgaacacaggaggcggaggttgcagtgagccgagatcgtgccactgccctccagccttggcgacagagtgagactctgtctcaaaaaaaaaaaaaaaaaaaaaaagaacaaggctgggacattgcagcgttctcaaagagaaataaagtagccatggagataagaagcaggatgatttgggcatgtttatcagaggtagagacaagggagaaatcaaagataagtttgggcttttgtctccagtaactgggagcctagtggccatttttgctgcaaagaggaagctgggcaagtgtagcagtgaggctgaagaaaagggaattaaattttggccatgttcacttgaaacgtcttttagacatcctagtgaaggtactggcacggaggatctagtctgagggtttaggtcagtgtttcagccgtggatctggggcagatgaatgtagacagaccaggccagtgatcaggactgagcccagacttcatcgtgagatatggaagttgagtcagaatctgcaaaggagctgagcaggagctgcagggggtaggaggaaaactgggagagtgtagcccctgggagtcaaagggagcaagcttcaaatgatgctgagggggtgagaatggagaatggaacactggattccatttggtagtacacagatcgctgaggaccctgtcccgggcagtttcctggaggaagaggcaagcctggctggagtgggtagaggggagagtgaaggcgaaggattagagtgtatagagaccagtgtcttggtctgaggggagtagagacaggtgacaaccacagggcagacgtaggttaaaggtgtttagtttttccttcaagtaaatgggcagatgtattccatatacgttcccagtgaagggccgggtgcggtggctcaagcctgtagtcccagcactttggaaggccgaggcgggtggatcacctgagatcaggagtttgagaccagcctggctaacatggtgaaaccccgtctctactaaaaatacaaaaattagctgggcatggtggcgggcgcctgtaatcctaggtactcaggaggctgaggcagaagaatcgcttgaacccaggaggcggaggttgcggtgagccgaaatcgcgccattgcactccagcctgggtgacaaaagcaagacgcagttttttgttgttgtttttttaattgccaatgaggaaaggggaagttctgtgctaggcgatagagatccaactgttgagcaggcctctctgcctgtggccttccggccggtttccagacgcccaggtggccaacattagagtccgcgtagcagtgtgaggtaacccactgagataggtcgggcctgcggagcctggcgagcagcggccctctccctggggcttcccttcaatctccgggacatttccccgacctggagctcctccgcctcaccgccaggcctctctgcagattgcaagttcacctgccactaccgctgccgcgcgctcgtctgcctggactgttgcgggccccgggacctgggctgggaacccgcggtggagcgggacacgaacgtggtgagcgcggggccgagggcgtatgggaagggcgaggatgggcaggccacagtgcaggcattctcgagggctgcctgggtgccgcgcgcaaggagcgttctaattgccgatttcccggcggcacagagaggctaattctgcgcgggggctgggaggggagcctggattgccggctccgcaagtactccacccgctgcaagcggacccgggcccaggctgacccaggctccgcgcacgcgcacttcccgcaccttcccgccctcgcctccggccagaggccactcttgtgcgcttgcccggacgctggcacccgcccccgttccctgtggtaggtggggtctgtgagtggagctccggagcgatgaggtcattcctgggggcgaagcgtgcgtgtccccgccccggcgttcctgccccaatgagacaagagctagatcccggcgatctacgtttcagtcttaacggttgcggcgcggctctggcccgggcgcacgcgcacactgacacgcgtacacgcacgcacgcgaccggggcggtggttggcggctacggacgcgcaggactgggggacgggcgggtacggctatgggcgaggcggaggcgccttctttcgaaatgacctggagcagcacgacgagca

SEQ ID NO: 29645 - DNA, 2300 bp, Homo sapien
aaaatacgctgattttaagtttcttatctttaaaatgccttggcccttcttgagaaagggtttgtgcctactgtcctcggagtccatcttcccaggcttgcctcttctcaaacactcatgaccccctccagaacctttagggtgaagggaaattaccacctatgggagggagcctggaaaaatttagaacctttggtgggccccctgcaagcaggagttttgttgagtctttatttagcaaacacccttttctgacccagtgaatcagatgctaaaatatgcacgcagccacacacccagcagtccttctgcacccctgggaatcgccagcaagcaaaggttgctctcccctgggtagacaccagctggaatcaccaggggtgcttttacagtcctccccgctagcctggatcccaccgcagacctgttgaatcaactgctgggagtggaccctaggcatcagtaaattttaaaaactccccaaattattgtaacatggagtctgggttgagcatcactgctctggcctatttaggaacttgtggatggatagtgtcccaggtctgtgtgtgcatggagaccctctcatccggtacaagaggacatcacaaattcagctggggggagcacaaagttgtgacagaatgcaaagaatgaacaaggggccgagcgcggtggctcatgcctgtaatcccagcacttcggaaggcggaggcgggtggatcacctgaggtcaggagttcaagaccagcctggccaacatggtgaaacctcatgtctactaaaaaataaaaaaaaatgagccaggcgtagtggcgggtgcctgtaatcccagctactcgggaggctgaggtgggagaattgcttgaacacaggaggcggaggttgcagtgagccgagatcgtgccactgccctccagccttggcgacagagtgagactctgtctcaaaaaaaaaaaaaaaaaaaaaaagaacaaggctgggacattgcagcgttctcaaagagaaataaagtagccatggagataagaagcaggatgatttgggcatgtttatcagaggtagagacaagggagaaatcaaagataagtttgggcttttgtctccagtaactgggagcctagtggccatttttgctgcaaagaggaagctgggcaagtgtagcagtgaggctgaagaaaagggaattaaattttggccatgttcacttgaaacgtcttttagacatcctagtgaaggtactggcacggaggatctagtctgagggtttaggtcagtgtttcagccgtggatctggggcagatgaatgtagacagaccaggccagtgatcaggactgagcccagacttcatcgtgagatatggaagttgagtcagaatctgcaaaggagctgagcaggagctgcagggggtaggaggaaaactgggagagtgtagcccctgggagtcaaagggagcaagcttcaaatgatgctgagggggtgagaatggagaatggaacactggattccatttggtagtacacagatcgctgaggaccctgtcccgggcagtttcctggaggaagaggcaagcctggctggagtgggtagaggggagagtgaaggcgaaggattagagtgtatagagaccagtgtcttggtctgaggggagtagagacaggtgacaaccacagggcagacgtaggttaaaggtgtttagtttttccttcaagtaaatgggcagatgtattccatatacgttcccagtgaagggccgggtgcggtggctcaagcctgtagtcccagcactttggaaggccgaggcgggtggatcacctgagatcaggagtttgagaccagcctggctaacatggtgaaaccccgtctctactaaaaatacaaaaattagctgggcatggtggcgggcgcctgtaatcctaggtactcaggaggctgaggcagaagaatcgcttgaacccaggaggcggaggttgcggtgagccgaaatcgcgccattgcactccagcctgggtgacaaaagcaagacgcagttttttgttgttgtttttttaattgccaatgaggaaaggggaagttctgtgctaggcgatagagatccaactgttgagcaggcctctctgcctgtggccttccggccggtttccagacgcccaggtggccaacattagagtccgcgtagcagtgtgaggtaacccactgagataggtcgggcctgcggagcctggcgagcagcggccctctccctggggcttcccttcaatctccgggacatttccccgacctggagctcctccgcctc

SEQ ID NO: 29646 - DNA, 2300 bp, Homo sapien
caacgtccctgcccctagcctctctctcagcaccttgagccgtatgcttagcacacacaacctgccctgcctcctggtggaactgctggagcatagtccctggagccggcgggaaggaggtagggtcctcccccaccagcctaagccccaggctactgcttcagggtatctttttgatagaggggggcagcttgcacacacgaagacaaaccctgtccccaagcccactgaggataccaggatgcctcagccaaggttggcctagacctgagctctgcagcaggccaggcccatgtgtccactactgaggctcaccctgctctggggtcagcagccctatagcctgggcaagtcctgcagcccaggttctcccattcccaggcagtggtcagtctcccagcccccacagctggctcacttgaagagaattcaacgtctgcacccagtgtgctggttcctctccccaggcaagctgcagcagttcgagggcagccgttggcatactgtggccccctcagagcagcaaaagctgagcaagttggacgggcaagtgtggatcgccctgtacaacctgctgctaagccctgaggctcaggcgcgctactgcctcacaagttttgccaagggacggctactcaaggtcagactccctccgcaccagcccccacagccccagtaccgccctccccatcctaccccgactgcgtccctgctgtttatctttgcccacccacctcaaccccagtgctcttttcagtccttgggcctcaggtgacacaccagctagtgggacatgggcccccacaggcattctcagcccaacccagccccttccttttccttggccccctggccagcacctgcatcacactggcctccactggacacccttgcagcttcgggccttcctcacagacacactgctggaccagctgcccaacctggcccacttgcagagtttcctggcccatctgaccctaactgaaacccagcctcctaagaaggacctggtgttggaacaggtaggcactggaaagttagctgctcaggaccactgtcccactttaccagcaccttcctgccactctccacttctctctcctagatcccagaaatctgggagcggctggagcgagaaaacagaggcaagtggcaggcaattgccaagcaccagctccagcatgtgttcagcccctcagagcaggacctgcggctgcaggcgcgaaggtaaggcctgtggaaatggcagggagggtggaggggatgcaggaggcatggatgtgggtggggtgcccccaccttccagggccagtcagaccttcctgactttcccccaggtgggctgagacctacaggctggatgtgctagaggcagtggctccagagcggccccgctgtgcttactgcagtgcagaggcttctaagcgctgctcacgatgccagaatgagtggtattgctgcaggtgagggtatcctagaaccttggacctctaagccctactcccacatcccccacatgcattgccatcctcaatacccacctgcctgcagggagtgccaagtcaagcactgggaaaagcatggaaagacttgtgtcctggcagcccagggtgacagagccaaatgagggctgcagttgctgagggccgaccacccatgccaagggaatccacccagaatgcacccctgaacctcaagatcacggtccagcctctgccggagccccagtctccgcagtggagagcagagcgggcggtaaagctgctgaccgatctccctcctcctcaccccaagtgaaggctcgagacttcctgccccacccagtgggtaggccaagtgtgttgcttcagcaaaccggaccaggagggccagggccggatgtggggaccctcttcctctagcacagtaaagctggcctccagaaacacgggtatctccgcgtggtgctttgcggtcgccgtcgttgtggccgtccggggtggggtgtgaggaggggacgaaggagggaaggaagggcaaggcggggggggctctgcgagagcgcgcccagccccgccttcgggccccacagtccctgcacccaggtttccattgcgcggctctcctcagctccttcccgccgcccagtctggatcctgggggaggcgctgaagtcggggcccgccctgtggccccgcccggcccgcgcttgctagcgcccaaagccagcgaagcacgggcccaaccgggccatgtcgggggagcctgagctcattgagctgcgggagctggcacccgctgggcgcgctgggaagggccgc

SEQ ID NO: 29647 - DNA, 2300 bp, Homo sapien
acacgtggacgcacatgcacttaccctctgaggcaggtggaaccagcagcatgagaacctggagaagctgaacatgcaagccatcctcgatgccacagtcagccagggcgagcccattcaggagctgctggtcacccatgggaaggtaccccgaggtcacaggcagggttcctgccttcccccatacctcacctactctacccctccggagtcccctgtgtgcccttcccctctggcctggtacacctgttctccctgaaggacaaagaggaatgtgttacatgtttcattttgtatccctattggacaggactctggcacaccaggctgggtgcagggcatgagttgattagggagaaagctgtaggtcctagaacagcttaggcttcaaggggaaggcccaaatgctaaaggcatctgtgaattgactgtaaggctggtggtggggaaggggtggggaggggttggggagggcgggagggaggggagataacctaactggaggtggaacttcggcatggaaggaagcagccttcccaacatgaaagggggaagttagaaaccagggagatgcctggctggaacatggaccagggagtgtcaccagcagatgacctgagatatcaattgaccaaaaaaaaaaaaaaaaaagccgggcatggtagctcatgcctgttatcccagcattttgggaggccaagacgggtggatcatctgaggtcaggagttcaaggccagcctggccaacatggtgaaaccccacctctactaaaaatacaaaaatttgcagagcatggtggtgcacacctgtaatcccagctactcgggaggctgaggcaggagaatcgcttgaacctgggaggcagaggttacagagagccaagatcatgccactgcactccagcctgggtgacaagagtgaaactccgtctcaaaaaaaaaaaaaaaaaaaagaaaggtcctttgcaaaagaaagatggaactcatactaggggataggataggaacagggcactgtgaagggtcctgagtaggagtgaggccaaggcacacaagagctttggaggaccacagacagggactagagggagggcatgaggagaagggctggcttgaaagggatgcctgaatgggcgggcagaggataagggtgcaggtgcaggcagggcaaggcagtctgggaactgggcaggagccagtcacataagcatgagggacatccacagaggtgttgggagcagctggtaatgaaggtccaaggtgcaagagagaagtcaggaaggatactcatgggtctggaatagtttaggggcccagcagtgtttggggatatcagggttgagctgagccggggatgggagggttgccaggcaaaggtaggcccatctcatccctgtcctttaccctacccttcaaaggtcccaacactggtggaggagctgatcgcagtggagatgtggaagcagaaggtgttccctgtgttctgcagggtggaggacttcaagccccagaacaccttccccatctacatggtggtgagctgggcccctggttcatacctcttctcactccttcagagggctctggaccggggaggagagctggtagcccctatcccttcctcaggccctgtccttctctttatctgacaggtgcaccacgaggcctccatcatcaacctcttggagacagtgttcttccacaaggtgagggactatctctgcccatgggccacagttccgggtcagggcctggcaggaagggagattgtgtctgtgtggggaaggcatcagacacagaaagtttccctcctccttttcccaggaggtgtgtgagtcagcagaagacactgtcttggacttggtagactattgccaccgcaaactgaccctgctggtggcccagagtggctgtggtggcccccctgagggggagggatcccaggacagcaaccccatgcaggtgggttgaggttacctagggttgtgaaagcctaggtctgggttccccaaggcctgcgcaggtgagggtggcccagcgtgaacactgtgtgacctcccaggagctgcagaagcaggcagagctgatggaatttgagattgcactgaaggccctctcagtactacgctacatcacagactgtgtggacaggtgagcagtccgactgggcctgggcctactgtggagggctggaagaccgggcctgtagcctgcctctactcacctccttcacaacgtccctgcccctagcctctctctcagcaccttgagccgtatgcttagcacacacaacctgccct

SEQ ID NO: 29648 - DNA, 2300 bp, Homo sapien
gagcagagccaccctgcccggctttatacaggctgccacagctatgacgagatctgctgcaagacaggtggaggcaggcgggcagtcagggtgggttcagggcagggtggccaggccaaggccactgacctctcctccaccaccccacccaggcatgagctaccatgagctggatgagcggcttgaaaatgaccccaacatcatcatctgctggaagtgaggctggtagtgactggatggacacattgctgtgggtagtccctcctactaggaggcttgtcatactgtctagaggttgactcttagttctgtaaataaagacatccatttcaaacagcctttattgagtgctgtttctgggccagccgtgggagacccagcagtgaatgaaatagccacgagccgtgggctagatcgccatctggtgggcaggaccgacaatcgacaaataaaagtgccggttaattacaaaaaaaaaaaaaaaaaaaaaaaaaaatcgtcctgatgcggtgactcacctgtagccccagctactcaggaggctgaagtggggggatcatttgaggccacgagttggaggctacatttagctgtgatcccatcactgcaccccagcctgggtgacagagcaagaccccatctcaataataataataataataaataaacctagaaagaagcagatgtagccaggcgcggtggctcatgcctataatcccagcactttgggaggctgaagcgggcagatcacctgaggtcagatgttcaaaaacagcctggccaacatagtgaaaccccatctccactaaaaaaaaatacaaaaaattagccaggtgtggtggtgcacacctgtaatcccagctactcaggaagctgaggcaggagaatcacttgaacctgggaggcagaggttgcagtgagccaagatcatgccactgcactccagcctaggtgacaggagactcaatttcaaaaaaagatgtgatcaagagtgagttgggttggaggcagggactgctctggattaaatggccaagaaaggccatgctgaggtgtaaactgagccctgaaggaaaagtattccaggcaaagtgcaaaactctgaggcaaaaacctctttggaatgtatgagggaggttcagggaagcaaggaggagaggaaagaatccaagtcccgaggtacaggagaggacaagaagtagatcttgcagagctgctagtaagcggcatcccacctaacattttgagggccagaagtagccacagagcccctctcacgcaagggagtaatgtctatatgctttttttttttttttgagacggtctccctttgttgtccaggctggagtgcggtggtgcaatcttgcctcactgcaaactccacctcctgtgctcaagcgattctcctgcctcagtctcccatgtagctgggactacaggtgtgtgctaccacacctgtctaatttttgtacttttagtagagacagggtttcaccatgttgcccaggctggtctcaaactcctgacctcaagtgatccgcctgcctcggcctcccaaagtgctgagattacaggtgtcagccaccgcgcccggcctgatatacacttttaaggctccgggctgtccatgaggatcaagcgtggaagtaggtctacagaaaaggctgccgcagttcacccatgacaggtgatgacagtctggacatagggaggatggagagaagtcgtgcgccctggcagtatttcaggagccaactagtggagccgggacgcgagaaatagaggaaccaagaagccataaggaggaggaagagcagcgggtaggtcaagatgccacagccgcaggaggggctgttggggtcggggttacccccatccctgtgcaggcggacttggcgtctgaggacagagtccagaccacaaggatctggagctcaggagagactcgtgggccacagcccgagaaagcgctgggaatccaaatactatggcgattggcagtcgcgtaggcgaggcgggctagagacccgcccggatttaggcgcgagccacctccaggggcggggcccaggccgcactgcgcaggcgcggctaacccgtttccatggctgcgagaactgacgctccccaaccgtcccgcaactgtcctgtcccagactttggcaccgtcggggtccgtcgtccccgaatgtgacagcatccccaccccggctgctgcccaggatccgccggaccccggcctcgatatgggagacctggaactgctgctgcccggggaagctgaagtgctggtgcggggt

SEQ ID NO: 29649 - DNA, 2300 bp, Homo sapien
ccaggagtatgatgtacctgtctttaccaaagacaaggaggatttcttcaactcacagtgggacctcactacacaacaagtatgccatccctccctgggtatcatcacctggggctggccacagccctggcctcatcctgtttcttctgaccttgtcccactctgcccagatcctgccctacattgatgggttccgccacatccagaagatttcagcagaggcagatgtggagctcaacctggtgcgcattgctatccagaacctgctgtgagtgggcctacagtcatacctgggacaaggtcaccagccagggaagacctcaggggccctgggtgtgagggttgggaaggcatggtcctcagaagctgagcacagctctctctctcaggtactacggcgttgtgacactggtgtccatcctccaggtaggtgagttgggtttggttaagtggagagtggatcatgtggctggaccagaccagggctgtgtcagcttcccaagcccctcactcaggcccctatgccttctgctaccctctagtactccaatgtatactgcccaacgcccaaggtccaggacctggtagatgacaagtccctgcaagaggcatgtctatcctacgtgaccaagcaaggtagtggtgggttctgggggaagccatcttggggagggcagggccacatgatgagctgatccctggcacccacagggcacaagagggccagtctccgggatgtgttccagctatactgcagcctgagccctggcactaccgtgcgagacctcattggccgccacccccagcagctgcagcatgttgatgaacggtcagaggagaatttgctggggcatttgggagttacctgagggaagctagaccctttatgtctctcaggagccctggatcatggggcactgccaatccaagcaggcttcctggagatgatgggctacagagacaaaattgaagggagactacaggaaagggttggcctgcctgaaagaaggcctggccagggcgtcaccccgtcctctgatcctcaccctaggaagctgatccagttcgggcttatgaagaacctcatcaggcgactacagaagtatcctgtgcgggtgactcgggaagagcagagccaccctgcccggctttatacaggctgccacagctatgacgagatctgctgcaagacaggtggaggcaggcgggcagtcagggtgggttcagggcagggtggccaggccaaggccactgacctctcctccaccaccccacccaggcatgagctaccatgagctggatgagcggcttgaaaatgaccccaacatcatcatctgctggaagtgaggctggtagtgactggatggacacattgctgtgggtagtccctcctactaggaggcttgtcatactgtctagaggttgactcttagttctgtaaataaagacatccatttcaaacagcctttattgagtgctgtttctgggccagccgtgggagacccagcagtgaatgaaatagccacgagccgtgggctagatcgccatctggtgggcaggaccgacaatcgacaaataaaagtgccggttaattacaaaaaaaaaaaaaaaaaaaaaaaaaaatcgtcctgatgcggtgactcacctgtagccccagctactcaggaggctgaagtggggggatcatttgaggccacgagttggaggctacatttagctgtgatcccatcactgcaccccagcctgggtgacagagcaagaccccatctcaataataataataataataaataaacctagaaagaagcagatgtagccaggcgcggtggctcatgcctataatcccagcactttgggaggctgaagcgggcagatcacctgaggtcagatgttcaaaaacagcctggccaacatagtgaaaccccatctccactaaaaaaaaatacaaaaaattagccaggtgtggtggtgcacacctgtaatcccagctactcaggaagctgaggcaggagaatcacttgaacctgggaggcagaggttgcagtgagccaagatcatgccactgcactccagcctaggtgacaggagactcaatttcaaaaaaagatgtgatcaagagtgagttgggttggaggcagggactgctctggattaaatggccaagaaaggccatgctgaggtgtaaactgagccctgaaggaaaagtattccaggcaaagtgcaaaactctgaggcaaaaacctctttggaatgtatgagggaggttcagggaagcaaggaggagaggaaagaatccaagt

SEQ ID NO: 29650 - DNA, 2300 bp, Homo sapien
ttctggatgtggcggaacccatcaatgtagggcaggatctgggcagagtgggacaaggtcagaagaaacaggatgaggccagggctgtggccagccccaggtgatgatacccagggagggatggcatacttgttgtgtagtgaggtcccactgtgagttgaagaaatcctccttgtctttggtaaagacaggtacatcatactcctgggccaccggagggtctggccgctgctcaatcaccttcaagtggatggtgttggactcatctgcagggggccccatccatatcctcagtgccacttcttccaagaggtcctcaattaccatccaggcctcccagcatcccttggggcaagcaggtgcctctgggtagggctaatctttctctttttatggagtgagaaacggaggcccacaaaggggaaggaattgcccaaggggcagagctggagagctctgctttccccctacccccagtcccagctccatcatgcattggaccctggacatgggcacctcagcccatggctatttcctgcccaccaatgtgttcatgagtcttgcccttctccctgactagctgggttcactttcccatctctcctctacccctctgctgtccttgcagaggctggccataccaatgggcagagtgcaccggcctgaggcatttagctcctccagcaagatggtcatgatgggcaccaacttctgcttgctctcctccatggacacgaagctgctctctagctagacagagcatggaaagcatggtgggcacatcccaggacccctggctggttggctgccctgagtcctgagctggtttgcagggtcccaggtttgggggactttggagacatgggaacaccttccccaactctgcctgtcggtaaacccaagcccatctcattgcagacctctagtgtggtcagatagccagccagctttttaacaatgggctcgagggcgcaggtcttggcctgggcatcacacacgaagcccaggttgaagaggagagcattgcggctgtacttcttgtgttcgatgcacacaggacagccgatcagcttcttttccatagctgtgctggataattggaacacagtcaggcccccaagcctgtcccttcctcctcctgggacaacccctgccacccaccgctcaccccgagctagggtctcacacagtgataagcttgttctgcagctctggcttggtgatgatgtacacttggactgtgtcaaacagctctcgggagatgaagtcttcagggacctggggaggggagtggcaatgggcccctcagtggacatctgtactgggtgtagtacaaatggtgacctcctcatgccccccaagcccaagtcctcttctccagcgttcccctctctcccatccactcaggcctattacttctttctgtttccaaacatacgctatgatctcacctccttcctggcttctgcatatgctgttccctctacctggaacactttctcctgccttacctaaacttcctatgcatcatttactcttcactcagttcagggatactcatgggtcacccaactcaccttctgtgggacctggaaccccccaaccggatccctacagcccgatatcctacaaacactgccaatgtgacgtatgtcttccctgccacattgggagccgggggcctgggtctgactatcctctagcctcacagttgtctgcgaatgaagcagcatgcctgcgtgcagcacgggaaactactgccttcaggcagccagttgagctctcgagaacgtccctcttcccgcccagtcccgcgagcccgggtggcacctgataggtgatcttgggtcccagcgtggggtggaactcgctgaagaatatgcattcgatgcggcagccgctgcccatggcaataaccgggcccaggcccgtagctcctcgttcctcgcgcagaggcgtccccacctcctgtgaacacttgtcagagacagcctcgaggcctgtgtcgctggggcacgcaagcttgccaatccctctgcccaatggcgcctgcgcagcgcgactcagaggcgtggctggggcgggggacggctcgtcccaggaagtcctgggtgggtagacgtcgcacccggaagtaaagcggctccgtgacggagcggcggtgcgcgcggcagggcccggagtatcccgctttctttggaggaaaccaccgcatcagatctgcgctgcggcagaggcaggcaagtccctagcgtggaggggcagcatgctggcagcacttggggaggcggtgcgctaag

SEQ ID NO: 29651 - DNA, 2300 bp, Homo sapien
gcctaggttagaggttagagtgcagtggcgcaatcttggctcactgcaacctccgtctcctgggttcatgcgattctcctgcctcagcctcccgagtagctgggactacaggcgcgtgccaccatgcccggctaattttttgtatttttagtagagacggggtttcaccatgttggccaagatggtctcgatctcctgacctcaggtgatgtgcccgcctcggcctctaagtgctgggattacaggcatgagccaccgtgcccagcctcaagtctgaaatatataccatgggcaggagtagttggagcatgcaactcttccaaacagatattaaatgtggacaaagattcagaggctgccagggccaccaaccatgcccatgctcccacccctaagaactgcccaggcccactacttacagccaaagacataagcaccgggtgccaggagaacaggcctggaatgagaagaggaggcctcatggggctgaggcaagaagaaaccagccataccaatccttaagggttgaggaataccagcagcccatcacccaaggaggtgctgccaaactgtgagccccttcttgctctgcaacaagctgaccccacacctatcctctcttcctggcctcttcctggatcagaggccatgctttgccactcctctggcagtcctccctccttcccttacacctcctgagaggcagccaaatggagcacccagagaaggaaagacaaaccaggaattctgtgtgccctggccatacctacctgctccacctcactcatcgctccagcacagaattccctcaaccagccaggcctgttcccggaagtcccactgcccttcctccccaggaacagtggcccttcccttcccagaagtcagctatgaattctacttactggagccaggcctggcaagcacagccacaaagatggtaaagcccagggccacaaggtgggcggcagcgccagaagcagtacgcagagctcggtagatgtgtgactcggtctccgcagaaagggccatcgtcagccgtgctagtggttgtagcctgaaagcatagtagcgtgggccaggatctcaggtgcccactgttcactcctcactggagaaaaggctgcaaggcaggaatgccaccctcttccaataagttatggtaggaaagaacagtaccaagaccagcaccaggaatggtcacaacatgccagtcgacggccggcggcctgtcaacgtgtacccatgtctgaactggtaccaatcgctggcccgccttccaggtaggaggcgcaaagccatgtaagactacaaatcccagcgtgtaccacgccgtcgccggcagtagagccagctgggagggcgcggagcactatggaaattgtagttccctgctgcggtcccagttacagcgtgaatcccttagcgcaccgcctccccaagtgctgccagcatgctgcccctccacgctagggacttgcctgcctctgccgcagcgcagatctgatgcggtggtttcctccaaagaaagcgggatactccgggccctgccgcgcgcaccgccgctccgtcacggagccgctttacttccgggtgcgacgtctacccacccaggacttcctgggacgagccgtcccccgccccagccacgcctctgagtcgcgctgcgcaggcgccattgggcagagggattggcaagcttgcgtgccccagcgacacaggcctcgaggctgtctctgacaagtgttcacaggaggtggggacgcctctgcgcgaggaacgaggagctacgggcctgggcccggttattgccatgggcagcggctgccgcatcgaatgcatattcttcagcgagttccaccccacgctgggacccaagatcacctatcaggtgccacccgggctcgcgggactgggcgggaagagggacgttctcgagagctcaactggctgcctgaaggcagtagtttcccgtgctgcacgcaggcatgctgcttcattcgcagacaactgtgaggctagaggatagtcagacccaggcccccggctcccaatgtggcagggaagacatacgtcacattggcagtgtttgtaggatatcgggctgtagggatccggttggggggttccaggtcccacagaaggtgagttgggtgacccatgagtatccctgaactgagtgaagagtaaatgatgcataggaagtttaggtaaggcaggagaaagtgttccaggtagagggaacagcatatgcagaagccaggaaggaggtgagatcatagcgtatgtttggaaacaga

SEQ ID NO: 29652 - DNA, 2300 bp, Homo sapien
tgagtctgggctgattcccctttttctttctctccccactgacaagactatccatttggtggggcaagagtggaaaaccccatctgggatgatatatgtgccctgaataatctccacacttcctcctaggtgccagtctgaaatgtcatctgtcgtatgttaccaagcaaacacagggtttgagatgtggcagttataaatgattcacaagctttgtttccctaacgtggggctggatacaatttcttggcaagagctggccacatgggtgcactgtttcagggaaagttaggtgcatcaccagaaattaaagtaaaaagggacagaggtacatccaaatgcaatgtctcagctttctgcctagaggtgggtgaagcctcattgtgcttagacaaatcttacccatttgacctgggtcctgggtcttcattactctgattcaagtctctttttttttttttttttttttttggagatagtctctctctgtcacccaggctggagtgcagtggcctgatctcggctcactgcaatctccgccttccgggttcaagcaattctcctgcctcaggctcctgagtaactgggattacaggcacctgccaccacacccagctaatttttggttttttggggggtttttttgtttttgggtttttttttttttttgggacagagcctcgctctgtcgcctaggttagaggttagagtgcagtggcgcaatcttggctcactgcaacctccgtctcctgggttcatgcgattctcctgcctcagcctcccgagtagctgggactacaggcgcgtgccaccatgcccggctaattttttgtatttttagtagagacggggtttcaccatgttggccaagatggtctcgatctcctgacctcaggtgatgtgcccgcctcggcctctaagtgctgggattacaggcatgagccaccgtgcccagcctcaagtctgaaatatataccatgggcaggagtagttggagcatgcaactcttccaaacagatattaaatgtggacaaagattcagaggctgccagggccaccaaccatgcccatgctcccacccctaagaactgcccaggcccactacttacagccaaagacataagcaccgggtgccaggagaacaggcctggaatgagaagaggaggcctcatggggctgaggcaagaagaaaccagccataccaatccttaagggttgaggaataccagcagcccatcacccaaggaggtgctgccaaactgtgagccccttcttgctctgcaacaagctgaccccacacctatcctctcttcctggcctcttcctggatcagaggccatgctttgccactcctctggcagtcctccctccttcccttacacctcctgagaggcagccaaatggagcacccagagaaggaaagacaaaccaggaattctgtgtgccctggccatacctacctgctccacctcactcatcgctccagcacagaattccctcaaccagccaggcctgttcccggaagtcccactgcccttcctccccaggaacagtggcccttcccttcccagaagtcagctatgaattctacttactggagccaggcctggcaagcacagccacaaagatggtaaagcccagggccacaaggtgggcggcagcgccagaagcagtacgcagagctcggtagatgtgtgactcggtctccgcagaaagggccatcgtcagccgtgctagtggttgtagcctgaaagcatagtagcgtgggccaggatctcaggtgcccactgttcactcctcactggagaaaaggctgcaaggcaggaatgccaccctcttccaataagttatggtaggaaagaacagtaccaagaccagcaccaggaatggtcacaacatgccagtcgacggccggcggcctgtcaacgtgtacccatgtctgaactggtaccaatcgctggcccgccttccaggtaggaggcgcaaagccatgtaagactacaaatcccagcgtgtaccacgccgtcgccggcagtagagccagctgggagggcgcggagcactatggaaattgtagttccctgctgcggtcccagttacagcgtgaatcccttagcgcaccgcctccccaagtgctgccagcatgctgcccctccacgctagggacttgcctgcctctgccgcagcgcagatctgatgcggtggtttcctccaaagaaagcgggatactccgggccctgccgcgcgcaccgccgctccgtcacggagccgctttacttccgggtgcgacgtctacccac

SEQ ID NO: 29653 - DNA, 2300 bp, Homo sapien
gcctcagccaagatggagactttttctgtctcctctgcagggttcggctgcagagcaatgcctaatccacaacccccaagacagctcccatggcctgcaagagaccgtgcaatcttggatagggttgtaagataaaatacagaacaccctattttgaatttcagatcatgaacgagtttttagtatggaagtgtttcaactattgtgtgggacatacctatactgaaaaactgggggctgggcacagtggctaacgcctgtaatcccaacactttgggaggctgatgcaggaggatcgcttgagctcacgagttcgagatcagcctgggtaggatggccaccccgcccctgcccatgtctctacaaaataaaaaaattttaaaaattagctgggcacagtagtgtgtgcctgtagtcgcagctaatcaggaggctgaggctggaggatcccttcagcccaggagttagaggtggcagtgagctatgattgtgccactgcactccagccttggacaaagctagaccctgtctcaaaaaaaaaaaaaaaaaaaaaagggggcagggggacatgattatactcgaagattactcattgtttatctggaattcaaatttgactgagcatccttattttgatttgctaaaactggcaaccttacccagatgtggcaaccagtgggaacccagaccccagaaaaaaagcatcagcaccctttttaacctgtaggccatgcacacatcagcacacactgaaatcagtggctgaaaggaagggatcctgtgttttataaaagcactttgtcatagaattattttaattatatggacagctttttgttttgttttgagacaaagtttcgctcttgttgcccaggctgtagtgcaatggcatgatcttggctcaccgcaacctccgcctcccgggttcaagcgattctcctgcctcagcatcccgagtagatgggattacaggcatgtgccaccacacctggctaattttgtatttttagtagagatgaggtttatccatgttggtcaggctggtctcaaactcccgacctcaggtgatctgcccgcctcagcctcccaaagtgctgggattacaggcgtgagccaccgtgcccagcctatatgtacagttttttaaaagtaactccatatacaaaaaaaaaaaaaagacacagaacacaacctgtcagaagtcactgtggcgtgaagtgggaccagaacaggcctagcccaggcttgtggagagacctggcttgtagagagacctctcatcctccgcagttatcagaagtccctggtggggaggagggtcactgagggctgcccagcctcgtccctatgcgggagggagccctaggttcgtgctccaggtccacctcacttggaaaaagggcaacgtgaaataacaaacaaaaaacttttccaagtgggagaaaacaaacaaaaaaaggcaacatgtgcagcactcgctgagcacccagggtggactggcattttacacccctttcccctttgattattaggacaggaagatcatgtcatcagctacattttatggcccatgaaactgagtttcaaaaaggttcaggaacttaaccaaccaatgccacacagcctccgaggcagagcaagggttccagcctgggtcaggtcccattcaccagaccacggaggttctgtttctcacacagtgacacctacccacacgccagccaacaaggacacactcgctcagaggtacacgcacaaatagagctactcttcctagggaattcagcaagtgtgggggctagagctgtgttgcttcccgaaccctcaccgccgctttcaggggttagagatgctaattcatcccttcccacctcctgagaaccgacggaaacggtccctgagaactacaactcccagcacaccccgcgctcaccacaacgggaccggtccgtgctcatggcctcctgggacttgtagttctagccagaaccctgttcaactcttccccggctgcaaccaaggactccgtatcccagcatgcagaggagccggaagacaggcgcttagaggacagcccgctgccgccggggacgcgcaggcgcagcacccctgtttgtcggccccccgagagaagaggtacggtcgaagccaggagccaggccgagcgggagctgaccaggcttgactcgggtacagaacgaggcaccagtccccttgcgaaccgaagggcctcgcagtggatggaggaggcccagccctgaggtcaacgccaaccaggctagcctggcacggggcctaca

SEQ ID NO: 29654 - DNA, 2300 bp, Homo sapien
cagggcagctggctctgggcagtgcccaggcagcatggggccagcccagaggaacccagaggccgggcaggtgtggaaataagcaggcacaagctaagggctgggcctgggccagggccaggtcatggaggaggctcctggtggagccttaagggtgggggtgagggtgggcaaggagctgcaagaagatgcccccacccccacccctcccctcctgttccaggcaacaacttccttctgcacaacctgatcttggacacgggcatcacgcagcagctggtagagcgtgtgtggagggaccaggatctcaacacgtaggcatcacccagcctgtgggggcagaaggctaggatgggcccagaggccctggacctgcccagcagaaggcaggcctgtgaccccacccccctgctacccccaggtacagcctactggccgtgttcgctgccacagacggtggcatcacccgagtcttccccaacaagtaagtgacctatcccactacccaaaccctgcccctgccagggaacctgcatctgttctgcccagaggcctccttgcatctgtggagaccactgtccccgacaagccaccccttacctaccagtctgcctcttgggtgctccagggcagctgaggactggacagagaaccctgagcccttcaatgccagcttctaccgccgcagcctggataaccacggttatgtcttcaagcccccacaccaggatggtgagtgtccccgcagtgtgcccagcagcaggcagggagcctcagcttccctgtctgctcagccagaactgggctctgctgtctgaggcccctctccaacacaaggctggctgaggccagggcagacgtgaaaagagggatagactgtgccaaacactgtcctgagtgctgggtgcttgggctggagtcatcccgggattggactgctgggtttgtaggacccagcatagagtggtcagtgtggccgccagaccccactcctgacttccccacccaacccccagccctgttaaggccgctggagctggagaatgacactgtgggcatcctcgtcagcacagctgtggagctcagcctaggcaggcgcacactgaggccagcaggtgaatgtttgggacagaggtggggaaacaggcaatggacagggtactgcctgggcaggtagcactgatggtcccttgctctcccccaaagtggtgggcgtcaagctggacctagaggcttgggctgagaagttcaaggtgctagccagcaaccgtacccaccaagaccagcctcagaaggtatttgggcaggggcgggggcagtaacccagcagtgcccttcctggagtcccctggaacccccaccaaccctccactcagtggctccaacacctacatggaggcagggccagctgcagatggcctggggaaccggatgtatgaaaggtgatgggagggaggaaaactggtgggtggcttacggtcctcactctctgcccagcagtgcggccccaacagccactgtgagatggactgcgaggttaacaatgaggtgtgtgtgccctgaacctaccctggaccctagcttaccccacttccagacttcctagtcccagccgcgactcccagcacatcccttggcctgtgggtctcaacatccccaccctgacttcacagccttcccaggactgggggagtgatgccccccaactctgaaccactggactgcctgcggtggaaggtccggggcccagcccctctccattttcctccccattcccttcctcctaggacttactctgtgtcctcattgatgatggaggattcctggtgctgtcaaaccagaaccatcagtgggaccaggtgaggatcaggaagagagtgaaagaagagagtagggatttgagccttctaggggtgtagcactgccagccctgtgaccatggctttctcctgacatcctcaggtgggcaggttcttcagtgaggtggatgccaacctgatgctggcactctacaataactccttctacacccgcaaggagtcctatgactatcaggcagcctgtgcccctcagccccctggcaacctgggtgctgcaccccggggtgtctttgtggtgagtccccagagatgcctggactggagatgggggggactgggagacctgcccacagatgaccccctacctctgacatttgataaagctgggggtgacctagggcgaggggcagcagtggcagtccacgcccctctctccactgcagcccaccgttgcagatttccttaacctggcctggtgga

SEQ ID NO: 29655 - DNA, 2300 bp, Homo sapien
ccccctccttatttgtcttcctttaacggcctgtcaaccaaaatctcccgcctttcccttggtgccagcagcctcaattagatgcacatctgtggaggctagaactgaaatacccaactgccaaaacccacccactgtacctagactgacttcatgtgcctgacggcctgggcactttggggatagcgttgctaccctggtgttggagggcagggaggctggccctcacatttctcaggccactgcagagtctgccttgggaaggcgcccacccccgacagggcacccaagaggaatgatgtcctttatgatggtcccctggggccatgggcacaggtattatatgtccagcaaacaggtaagagaggatatcacaggccagccctaccttgggcatgaggaagacagagatgctgggaacaggtctcagcaggcagggctgggaaggcagctgttgagctcacgcttgtcgactcctgagcaggacccctgcccccctgccctcccattgtgtccagaggtggcaggggggcaactggctcagtgaggaccctgcttgtccccccaaagagctggactatcgtctcccatagtccatcaggtcccacctgtccaccaggcccctggcccctgcgttgccttcctctgatactttttttggggtctcatggtttgggatctgctggcaaacctgtctggcccctgaaggctcattcaggtcaagggaggaggacacttcaagaaatgaaggaaactgttccctgtcaagccctggtttgctgggattggagaagccaaggcaggactaggcagcaagggaaggctgtcctaggccctatttccagcccctacccctacccttttcagtccaggggctactattccctttcaactgcaagccctccttgggctgacttgtgagtgggtgataggagagccactgataccatgaggtggggcatctggacatttccgaaccatcctgcccagctggttactatccctcattcctcgtgataggccaggtctgtgggcagttattgctgagggggtcctgccctgtgtcaagttggtggggagcattctctcatcctatctgcaccagaggcagagctgggttccagggtaacttcagtagaatcctagggatggtctcccctcattgtgaatgcttcagtttaccaagagattctccccattctcacttcatcctggaaatgggagtgggcacccacacaagcattcacaagcgaggacactgaggctctgaaagggccacaagctgtggagtcaaggttgacaccagccccagtcttctgcccacagcagggaagagccaggggcctccaggacagaaaggactgggttgtgcagagatgagcttcctggctctggaagaatctaaacagaggctgtgcaaactccgggaactggggcttgggacaggcctgcacacagtgcctgttcagcccagggaagcgaagcgagtggctgcagagggctgcatcctgccgtccccagccccccacaaccgtacagccgtgcccaggtttccgcttagggaaccaggaggtccaggccctttctgccagcagccgggcgtgcaagcccccgacagagagaaatcttaaagatagctagagccacgggggctgtaagttcagcatgcctccttttctggtctccgctgaagctgtcactccaccattaaacctgtgactctaggccttaagcctgttgaaggtcgagcccccaaaagggtcacatatgctcctgccttgggccgcggggcccgggactcttcccgcgggtggggtggggaggagcggcagggtctgaggtgtgggggcgggggcgcacccggggcgctcgggtagcagctggggcgcaggacgcccgagccagtagggcaggattcgggctgcgcggggacgagaggcgcgcgggcacgggtgggcgcgtggccgcggcgggggcgcgcgggggcgggccagcccgggaagagagagggagggagggagagaagagggcggtgccggcaggttggcggcggctgctatttgagcgcaggtcccgggccgggcgctcagagcgcttggagccagcgctgcagggagatagcagcgcgcagcccgcagaggcgctgcggcccgtgcagccccggaggcccctcgcggagaaggcggcggcggaggagaggccgagttaccgcccgccgcccgcgcccccccaaccccgccgccgccgccgccgccgccactgccccccctccccgcggcgccgcatcttgaatggaaaca

SEQ ID NO: 29656 - DNA, 2300 bp, Homo sapien
gcgcggggcaggctagggtgaaaatcttgccaccacaggcgtcctggatgttcctgatgggcttcctctgaaagggccacaagctgtggagtcaaggttgacaccagccccagtattctccccacagcagggaagagccaggggcctccaggacagaaaggactagggtgtgcagagatgaccttcctggctctggaagaatctaaatagaggctgtgcaaaccccgggagctggggcttgggacgggcctcgagtggcacaactgagcccatggcctgcttggcacatagtagtttctccctatggctctatcagtctcttctgacctgctgagctgacctcccatgcagaactggcacctaccaggccccctgtcagggtagcttcacctgcccctgccaccctacgtcttccagcacaggcaacttgggccaggtgggcagccccacatttaccaatgtgcctgccatggaagtccccctattccttgggaaggctcaaatttttctcccaagatcttaacgtgtggctgtagccagccaccaagagggctgaggatgttgtaagcctcaaaagttataattcgtaaacacttaccacttgtttactcttaattaccccccccctccttatttgtcttcctttaacggcctgtcaaccaaaatctcccgcctttcccttggtgccagcagcctcaattagatgcacatctgtggaggctagaactgaaatacccaactgccaaaacccacccactgtacctagactgacttcatgtgcctgacggcctgggcactttggggatagcgttgctaccctggtgttggagggcagggaggctggccctcacatttctcaggccactgcagagtctgccttgggaaggcgcccacccccgacagggcacccaagaggaatgatgtcctttatgatggtcccctggggccatgggcacaggtattatatgtccagcaaacaggtaagagaggatatcacaggccagccctaccttgggcatgaggaagacagagatgctgggaacaggtctcagcaggcagggctgggaaggcagctgttgagctcacgcttgtcgactcctgagcaggacccctgcccccctgccctcccattgtgtccagaggtggcaggggggcaactggctcagtgaggaccctgcttgtccccccaaagagctggactatcgtctcccatagtccatcaggtcccacctgtccaccaggcccctggcccctgcgttgccttcctctgatactttttttggggtctcatggtttgggatctgctggcaaacctgtctggcccctgaaggctcattcaggtcaagggaggaggacacttcaagaaatgaaggaaactgttccctgtcaagccctggtttgctgggattggagaagccaaggcaggactaggcagcaagggaaggctgtcctaggccctatttccagcccctacccctacccttttcagtccaggggctactattccctttcaactgcaagccctccttgggctgacttgtgagtgggtgataggagagccactgataccatgaggtggggcatctggacatttccgaaccatcctgcccagctggttactatccctcattcctcgtgataggccaggtctgtgggcagttattgctgagggggtcctgccctgtgtcaagttggtggggagcattctctcatcctatctgcaccagaggcagagctgggttccagggtaacttcagtagaatcctagggatggtctcccctcattgtgaatgcttcagtttaccaagagattctccccattctcacttcatcctggaaatgggagtgggcacccacacaagcattcacaagcgaggacactgaggctctgaaagggccacaagctgtggagtcaaggttgacaccagccccagtcttctgcccacagcagggaagagccaggggcctccaggacagaaaggactgggttgtgcagagatgagcttcctggctctggaagaatctaaacagaggctgtgcaaactccgggaactggggcttgggacaggcctgcacacagtgcctgttcagcccagggaagcgaagcgagtggctgcagagggctgcatcctgccgtccccagccccccacaaccgtacagccgtgcccaggtttccgcttagggaaccaggaggtccaggccctttctgccagcagccgggcgtgcaagcccccgacagagagaaatcttaaagatagctagagccacgggggctgtaagttcagcatgcctccttttc

SEQ ID NO: 29657 - DNA, 2300 bp, Homo sapien
ccccagccaggagacaagattgtggccctggcccagctcatcctggtgtggcctgggacctacctcacccattcccaacctcagtttgcccatcagtatcaggagtgagacgggctggaggcagaggcttttaggatcagagagctgctccggcctggcgcttgactagatgtccatgtcaaacacatcgtactgggtatgtctgggtctggaactgcctcctctctcagactgggactcccagggggcaaggcagggtggaatcattgctgaatccatggtgccctcagcggccagtgcaaggtccctcatggaaggggcagagatttttgctgatggagccaaggctacttccacgacatctataaggagcatccaagggtggactccgttggccacgtccctgagcaccccacccccaacagactgcacccggcgcacatcactggcacatggcaactccatattgtgctcatcaagtttcaggaaaacaccatctgatgccttgtatagttgcccagcacaacacccagcttcccagaaggagcctgcattgtgcacagtgaggggctgctcatctaaggctaatgaagaggacatgaggctggcatatctggaaaagccctgccctgatgccatgcggtactgctctggaaggctcgcccaggtcaggcagacagggcagagatcagtggacaattagccagctccagcagaggtaattaatcaatgtttggggccttccatctgggaatgctgtgatcactgccgtgcctgtgccctggtggaagtcaggacctgggctaggctgacaggcagggactcaattgctgtcagcaccctcactgccagcacaaacaccatcaccaacactgcctccagcagttcagtgctgctgtccccatcatggtcacattgctgtcacccttatagtagcagcgactccctcaccctgccctgccccactgggactcactatcaccatccccatccacagtcacctgtgctcactcttccccgactcaagacacttttacactgttcccacagtcccaaaagatatacaggcagcttagtggtagggagaccaaggcacagagagagaaagggccatgccatctaaacaagagagagaagccagccccctggcatatagactatggtcgcttccatccctcccctcccctgttccaataccagctgctcacagcgaagatccttcctcctcgtaccagtcaggatgggctcagttaggttgcaatgacaacaaccctaaaatcttactggtttaaaataatgaagatttatctctttttcctgctccctgctcttcatgggtcagctgaggctctgttctgtgtcattctcatactgagccccggctggccagatagccaaattctggaaaactgactgttgtcatggtggagggagatccggcccctaaaaggtctcacaccagcaattaaaagccctgtcctgaaagtgctgcctctgctcaccactcatcgccggaaccaggcacgcacccctgcatgaccaccagggggcaggaaggtgcaatcctacctttagccaggaagcaaggggatcaggtggatttggcacccaccaacagtggagatccgatttctcttcctctccctgccttcactccttgccccacctatccatgtcctccagccccctggtccagcaggattgtgagggttcaggtggggcttcctcagtcttcctgggatcacaggctgtgcttcctgtgtggggaaaagcaagagagatcagattgtcactgtgtctgtgtagaaagaagtagacataggagactccattttgttatgtactaagaaaaattcttctgccttgagattctgtgaccttacccccaaccccgtgctctctgaaacatgtgttgtcaactcagagttgaatggattaagggcagtgcaagatgtgctttgttaaacagatgcttgaaggcagcatgctccttaagagtcatcaccactccctaatctcaagtacccagggacacaaaaactgcggaaggccgcagggacctctgcctaggaaagccaggtattgtcccaggtttctccccatgtgatagtctgaaatatggcctcgtgggaagggaaagacctgactgtcccccagcccgacacccgtaaagggtctgtgctgaggaggattagtaaaagaggaaggaatgcctcttgcagttgagacaagaggaaggcatctgtctcctgcctgtccctgggcaatggaatgtctcggtataaaacccgattgtatgc

SEQ ID NO: 29658 - DNA, 2300 bp, Homo sapien
gcaaggctggcagagggttatggggtagaaaggctcatccctctttgccttctccctccagctaggctgggcacatctgggcacataggaagtcccgggttcttttcttggctttgcaactgatcccgggcgtgaccttgggccaaacccttaactcgtgccctggggctctgttaacatcgcctcccaaaggagagaagaggccctactgaccactttccaggcctgcctcagggtccaaaggggaagggaaggaaaccggggtaaaaggggtcggcaccgcgaccttcgagaacccgcatgctgttctccaccaggtctctcagtcctccctgccccaatccccatgcccgcctccgcgaccctgtgatgcctcccttcttgcacaggagcagtgacctcagcacttacttaatcctctcccggcgccgagctcagttggagaggctaggggtggtagtgactggcaggaggccggggcggggggaacccccaagcccggcgtctggggctgcgggtccgacccgagatccgccctccctgcaagccccgagccgctggccaggcccgctactgcgcaccagccgcatccgcgagcgctggctctgccggcctgagctagggtgggtagggccgggacccacggcggaggtggggccgggccgagcagcctcgggggatccccgaagctacagcgccttgcctccctgcacgctccgcgcccccggcctccgattggctgtcgggcctagagcccgcccagaattggaccgttcgcttgtcgctcgggtctggctccacccccagagggagcctagaacctggtcgcagtttttagagactaccctcaccccgtggcctgcgccgaagttgggcggaggacagtgggtggccaggcccttccgggccagaactcgggacccctgccagctacccgtgccaggacagactcaagcccccaaaacgcggatggatgtacagaggagacttggggagagcactggactgggagtccttgggcctgcactgaactctggctgactttgtgaccttgaagaaactgcttttcccttcctgaaccttggctttctactcagacgggtcctctggtgtgagggttctagacgaagatggggaatcttcgtctacagaagttgagagtggggtggatttattattgggcaccccgacccaggcaagtctacatataccctcacaatagcttccatccacggcatgatcagctcagggaaggagccctcagatactcctgatccgccggttttcaaagtagtttatgggagtcaccgggtagcctggtacaaatgcaaacgcccctgtgtctcccggtctgggaaggaggcagggaaacagcatgtttaatagcagtttaaggccgggcgtggtggctcactcctgtaatcccagcactttgagaggccgaggcgatggatcacctgaagtcaggagttcgagaccagcctgaccaacatggtgaaaccctgtctctattaaaaatacagaattagccggtcgtgttggctcacgcctgtaatcccagctacttgggaggctgaggcaggagaatggcttgaacccggaggccgaggttgcagtgagcagagatcgcgccattgtacttcagcctgcgcaacaagagcaaaactccgtctcaaaaaaaaaaaaaaaaaaaaagaaaaaaagaaaaaaaaagtagttaacagtgttctagttaacagtactttctggtggggagatgttgacaagacacactttgcgagacgctgccgagtattttatagaaggcgcaactgaggtccagaggtcccaacacctggaggagttgccaatagagtcaagattcgaatcggtaaaagagcggcccctggggtctggccgccagtcggccgaccccctggtgggctcgggccactgacctcggtagggtcacgacactgggactggaccccaaagttggaccagccttcaacactggaacccgcccatgcacagctccacccggcccccaggctaagatagaccacgcccccggacatctggtccccgccggaacacccgggccctctggtgacacgccccctttccggcaggctactgggctccgcccacacacctcccggcctggttcctaaacgccagctcggagcaatccccttgggctggagccaaatccctgctgtgattttaaggaagaccggcaggtccgggcccccaagggtcaaccccacacacatccccgcactttcctgtatgcaggcctgcgagcgtagagggagtgg

SEQ ID NO: 29659 - DNA, 2300 bp, Homo sapien
tcctccctgccccaatccccatgcccgcctccgcgaccctgtgatgcctcccttcttgcacaggagcagtgacctcagcacttacttaatcctctcccggcgccgagctcagttggagaggctaggggtggtagtgactggcaggaggccggggcggggggaacccccaagcccggcgtctggggctgcgggtccgacccgagatccgccctccctgcaagccccgagccgctggccaggcccgctactgcgcaccagccgcatccgcgagcgctggctctgccggcctgagctagggtgggtagggccgggacccacggcggaggtggggccgggccgagcagcctcgggggatccccgaagctacagcgccttgcctccctgcacgctccgcgcccccggcctccgattggctgtcgggcctagagcccgcccagaattggaccgttcgcttgtcgctcgggtctggctccacccccagagggagcctagaacctggtcgcagtttttagagactaccctcaccccgtggcctgcgccgaagttgggcggaggacagtgggtggccaggcccttccgggccagaactcgggacccctgccagctacccgtgccaggacagactcaagcccccaaaacgcggatggatgtacagaggagacttggggagagcactggactgggagtccttgggcctgcactgaactctggctgactttgtgaccttgaagaaactgcttttcccttcctgaaccttggctttctactcagacgggtcctctggtgtgagggttctagacgaagatggggaatcttcgtctacagaagttgagagtggggtggatttattattgggcaccccgacccaggcaagtctacatataccctcacaatagcttccatccacggcatgatcagctcagggaaggagccctcagatactcctgatccgccggttttcaaagtagtttatgggagtcaccgggtagcctggtacaaatgcaaacgcccctgtgtctcccggtctgggaaggaggcagggaaacagcatgtttaatagcagtttaaggccgggcgtggtggctcactcctgtaatcccagcactttgagaggccgaggcgatggatcacctgaagtcaggagttcgagaccagcctgaccaacatggtgaaaccctgtctctattaaaaatacagaattagccggtcgtgttggctcacgcctgtaatcccagctacttgggaggctgaggcaggagaatggcttgaacccggaggccgaggttgcagtgagcagagatcgcgccattgtacttcagcctgcgcaacaagagcaaaactccgtctcaaaaaaaaaaaaaaaaaaaaagaaaaaaagaaaaaaaaagtagttaacagtgttctagttaacagtactttctggtggggagatgttgacaagacacactttgcgagacgctgccgagtattttatagaaggcgcaactgaggtccagaggtcccaacacctggaggagttgccaatagagtcaagattcgaatcggtaaaagagcggcccctggggtctggccgccagtcggccgaccccctggtgggctcgggccactgacctcggtagggtcacgacactgggactggaccccaaagttggaccagccttcaacactggaacccgcccatgcacagctccacccggcccccaggctaagatagaccacgcccccggacatctggtccccgccggaacacccgggccctctggtgacacgccccctttccggcaggctactgggctccgcccacacacctcccggcctggttcctaaacgccagctcggagcaatccccttgggctggagccaaatccctgctgtgattttaaggaagaccggcaggtccgggcccccaagggtcaaccccacacacatccccgcactttcctgtatgcaggcctgcgagcgtagagggagtggaattcacagcctccccacccatccgcaggggtctcctgggaggaacccaccagcgataggaacactgaagctgggctacggcgtccgcccgagccttttcttaaaggcgccgaccccggaagcggggcgtccgagggagcgcgcgacgggccacgcacgtccgggcgtccagttcggggcagcttctccggctggtgggtgggtggggcagcctttcaggcaggtatgcatgggaggtggggatcggaacggggtgtttcgactgcaaccgcctggagacctggccggtaccattctccatagtgcagatggggaaacagggttgg

SEQ ID NO: 29660 - DNA, 2300 bp, Homo sapien
actgcactccagcctgggtgccagagagagactccgtctcaaaaaaaagaaaaaaaagactgtcccaggcaagacacgaacccgagtccaccagactccagaagcggctcttgcaccagtgcgccgtcccaggagccaaggcccgaagtcagaagtgtaaactccctcacagctacgcaccgcattgttaacgacccagatgaggccccctctctccaaccctgtttccccatctgcactatggagaatggtaccggccaggtctccaggcggttgcagtcgaaacaccccgttccgatccccacctcccatgcatacctgcctgaaaggctgccccacccacccaccagccggagaagctgccccgaactggacgcccggacgtgcgtggcccgtcgcgcgctccctcggacgccccgcttccggggtcggcgcctttaagaaaaggctcgggcggacgccgtagcccagcttcagtgttcctatcgctggtgggttcctcccaggagacccctgcggatgggtggggaggctgtgaattccactccctctacgctcgcaggcctgcatacaggaaagtgcggggatgtgtgtggggttgacccttgggggcccggacctgccggtcttccttaaaatcacagcagggatttggctccagcccaaggggattgctccgagctggcgtttaggaaccaggccgggaggtgtgtgggcggagcccagtagcctgccggaaagggggcgtgtcaccagagggcccgggtgttccggcggggaccagatgtccgggggcgtggtctatcttagcctgggggccgggtggagctgtgcatgggcgggttccagtgttgaaggctggtccaactttggggtccagtcccagtgtcgtgaccctaccgaggtcagtggcccgagcccaccagggggtcggccgactggcggccagaccccaggggccgctcttttaccgattcgaatcttgactctattggcaactcctccaggtgttgggacctctggacctcagttgcgccttctataaaatactcggcagcgtctcgcaaagtgtgtcttgtcaacatctccccaccagaaagtactgttaactagaacactgttaactactttttttttctttttttctttttttttttttttttttttgagacggagttttgctcttgttgcgcaggctgaagtacaatggcgcgatctctgctcactgcaacctcggcctccgggttcaagccattctcctgcctcagcctcccaagtagctgggattacaggcgtgagccaacacgaccggctaattctgtatttttaatagagacagggtttcaccatgttggtcaggctggtctcgaactcctgacttcaggtgatccatcgcctcggcctctcaaagtgctgggattacaggagtgagccaccacgcccggccttaaactgctattaaacatgctgtttccctgcctccttcccagaccgggagacacaggggcgtttgcatttgtaccaggctacccggtgactcccataaactactttgaaaaccggcggatcaggagtatctgagggctccttccctgagctgatcatgccgtggatggaagctattgtgagggtatatgtagacttgcctgggtcggggtgcccaataataaatccaccccactctcaacttctgtagacgaagattccccatcttcgtctagaaccctcacaccagaggacccgtctgagtagaaagccaaggttcaggaagggaaaagcagtttcttcaaggtcacaaagtcagccagagttcagtgcaggcccaaggactcccagtccagtgctctccccaagtctcctctgtacatccatccgcgttttgggggcttgagtctgtcctggcacgggtagctggcaggggtcccgagttctggcccggaagggcctggccacccactgtcctccgcccaacttcggcgcaggccacggggtgagggtagtctctaaaaactgcgaccaggttctaggctccctctgggggtggagccagacccgagcgacaagcgaacggtccaattctgggcgggctctaggcccgacagccaatcggaggccgggggcgcggagcgtgcagggaggcaaggcgctgtagcttcggggatcccccgaggctgctcggcccggccccacctccgccgtgggtcccggccctacccaccctagctcaggccggcagagccagcgctcgcggatgcggctggtgcgcagtagcgggcctggccagcggctcggggcttgca

SEQ ID NO: 29661 - DNA, 2300 bp, Homo sapien
cgagtattttatagaaggcgcaactgaggtccagaggtcccaacacctggaggagttgccaatagagtcaagattcgaatcggtaaaagagcggcccctggggtctggccgccagtcggccgaccccctggtgggctcgggccactgacctcggtagggtcacgacactgggactggaccccaaagttggaccagccttcaacactggaacccgcccatgcacagctccacccggcccccaggctaagatagaccacgcccccggacatctggtccccgccggaacacccgggccctctggtgacacgccccctttccggcaggctactgggctccgcccacacacctcccggcctggttcctaaacgccagctcggagcaatccccttgggctggagccaaatccctgctgtgattttaaggaagaccggcaggtccgggcccccaagggtcaaccccacacacatccccgcactttcctgtatgcaggcctgcgagcgtagagggagtggaattcacagcctccccacccatccgcaggggtctcctgggaggaacccaccagcgataggaacactgaagctgggctacggcgtccgcccgagccttttcttaaaggcgccgaccccggaagcggggcgtccgagggagcgcgcgacgggccacgcacgtccgggcgtccagttcggggcagcttctccggctggtgggtgggtggggcagcctttcaggcaggtatgcatgggaggtggggatcggaacggggtgtttcgactgcaaccgcctggagacctggccggtaccattctccatagtgcagatggggaaacagggttggagagagggggcctcatctgggtcgttaacaatgcggtgcgtagctgtgagggagtttacacttctgacttcgggccttggctcctgggacggcgcactggtgcaagagccgcttctggagtctggtggactcgggttcgtgtcttgcctgggacagtcttttttttcttttttttgagacggagtctctctctggcacccaggctggagtgcagtggcatgaccgcggctcgctgcaacttccgcctgcttgaactgggttcaagcagttctcctgcctcagcctcccaagtagctgggactacaggtgcgcgtcagtatgcccggccaattttttgtatttttagtagagacagggtttcaccatgctggccaggctggtctcgaactcctgacctcgtgatccgcccacctcggcctcccagagtgctgggattacaggcgtgagccaccgtgcccagcttgcctgggacagtttctacctgagtgacgctgggcaagtcgcttcccttctctgaccctacttgtatctgaagatgtggcacttagcaggtgcttaataaacgctagtttggacttttatctggaagcaaaggggaccgctgattttaaaccttcagttaaacttgcttgtgacctctttaaatatacaattgtaaattttttagttggtggtttacgctgatgtcccggattataggttaaattaggaggaaattttcagcatgtacatccatgacagtacacacacaatgtcagattcaaagctcccaattaaaggcaatcatctgcctcttgtaacatcagttaagatcatgtaacatctggtccctgctgtgtgttgagctgcctcccaggccttggatattcatagactaatgcattgcttgccatgggtttggtgtgattttcccccatcttatggattaagaaagtgaaaatcagaaataatgacttgctcaagatcacacacgctaggttagacacagatctgtcctgtccccacatatgtgccctaacctaccaccaacccgtttattagcagagactgagctatgggctcagcccactccagctaaaaatgtgaagaaaacgtaagtggccaagacaagaatgatcaaataggtgggtaaggctctaaatggagtcaagggggtgtcagagcaagagcacaactattctcaggcaatgtattggtagaagggggggtgtcatacaaggctcacctgctttcctggttcctctcactcccagggtggcaaccaactatatctgaggaccagagccattttggggcaccagagcttgtgacctctccatctccacccagctgggtccaggggccactctcagcactcacctcagcagctgacatcataaagcagacttgggaacctggaagcactctggagaacctttccctgagacatggagctttggggccgaatgctgtgggccctcct

SEQ ID NO: 29662 - DNA, 2300 bp, Homo sapien
gagtttcttggctaggggacagaagctgagaaagtgaaagaagggtttggggccccctggccacagcaggggaatgggaactaacctttcccagaaatgtttgtgtgcctaggtctttctagaaacactccttctcagaacctggcgccctctggcttgcccaccagctctcacccagctctactccctggtctgcgccctctggctcccagctctgtcatctacaaggtcagaggggagtccaagaagggccatataaagcgtctcttccaggaccagggtgccttaccaagggataacacacttgcgccacacatccctagtcctagtaatttgagggacaacacaggtgattaccagaccagtcagtagacctaagagggccaccagattctctgggctggagggctaaccctctcatcatctgggcccagagatggcaggagggcagtgacctgcccaaggttgcacagctgataccaggtctccaggtgtccggctggagccctctccacttcctccatgcctcctgagaagctgctggaagacatttgttccctgtgggttgggtgagccatgggatggctcccagagaaatggcagaacaggctaagtacttgggcagcactatttgaggcactctgggccattgccagacctagaggctgggttgatagcttggaacataacagtcaaggggaccaacaggaatcctctgtcctctgggctctgccaacacagtcagagaggaaatacatgtctagaaaggcactgtccctgaagtcatggggccccagtgccccctggaggaagcctggggtaagactggtgccctgaactccaccatcatcctgatcctgccttgccctggtggcacacctacctctgtttctggccgaggaataaacactgggggcaccatccttaggctgagcccctggaagtcccactctccaaggatgtactgcaccggcatcctgcagagggggcagctgggtggtcatcagggacagagctaggaccaacaggaccatgcctgggttgagataccacttgtggccaaaggtatcaggcaagaccatgtctccagggccttgggactcctgaggcaaaaccctccctccctcccttcttcctattcagtaccccggccccactcttgccactcctgcaccccaacacctccctagtccttggacattctcctcctccctgaacttggtggggataggggaggctggactgctgctccctgaacacatccttcaggtctgatccatgggtgctcacctctgcaatcgacggctactcagctcccggatacactgtagttgctgagaggtcaagggctgggtccaaagtgccggcctcaggctctgaaactgtccccacagagaatataagtggctggctcactgggcccaaggcccccaacccaggtgtcttatgtggataatgcctgcccagcactggtctggaggcccaaccctctcatcatctgggcccagagggggcagcatcctgcctaaggttacacagctaacaccaggcttccaggtgtctatcccagaacacttaggcagagatatattcattcatccaacaaactgttacagtgtgtgccaggcgctaagacgttccttcagaaaaatcccatcagtctcagctaagcactcttagtgaacagaaaacctggatatcccttccccaagtcctccctcctccctcttcctgtcctcttgacaacactaaacttaactgttttggctccaaggacatgagccacgatgtactcactggattcccgggcctcagggatacccctcttctcaaagaccccagtccagtggctgaccagttctatggcactggataacccagccagaggtggttggggttgccatgagctgaaggcccagccccgggtacttcccctcctccctgggccagacaggagggcccacagcattcggccccaaagctccatgtctcagggaaaggttctccagagtgcttccaggttcccaagtctgctttatgatgtcagctgctgaggtgagtgctgagagtggcccctggacccagctgggtggagatggagaggtcacaagctctggtgccccaaaatggctctggtcctcagatatagttggttgccaccctgggagtgagaggaaccaggaaagcaggtgagccttgtatgacacccccccttctaccaatacattgcctgagaatagttgtgctcttgctctgacacccccttgactccatttagagccttacccacctatttgatc

SEQ ID NO: 29663 - DNA, 2300 bp, Homo sapien
tgtcacgggggagtcagggtctgcttgctcctgagctgtgtcttccaggccaaaggaaggagctgggggaagggaccccaggtagagaggacagcatgggcaaacagcgccagtattgcttgtgaggcaggaaggcgcaggcaggagctggtggcaggagccagacctgactcctgtgtaggttataggtgaccctctaggttctaacaaatcatggccctatgaccactcacagtgagaaagggccacacaactctggcacaccacagcctgacaaaaacttttccacacctaccctggctgtactgtgggatcttggaaatccctcttggagagctggaggccaaattttgagatgacctgcttgctggggcccagagctaccttcccaggagcatggttggtggctagccagtcaggctggaacctctgtgggtggccacgtccagatagcttagccggtcctcagatcccacatgtaggtgtgggcacctttggggctgatgtggtagctgggtgtatgaatagctgtgttgatcaccacaagctcctggtgagtgtgtacctgggcaggggtgtgtccatggctgtgtcatcatcatggtggggacagtggctggtgtgttctaggtacatgtgtgtgcccgctttggagcgcagcagtctaaaactttgttccctgacacccaacagtagccctgagcttacaagggggtgctcacctagggtaaaaagtgaaagaggctatgggaccccggaatgcagggggaggctcctggggtggaaggcagtggtggggcaggtattcaggagtcccagaatgcagacaggaggaaggaacttgctggagacagcaagggagaagtagtcttcccagcacctccatgtcctcttccttggcctcaccttccaccctccctcacttggcaccaggccagttgcgataagcacagccacccagtcctccctgagtgcagaacacccatttataccttcttcctctctccttggagcttcctgagctcctgtcacatcaccatggccagcatcagaccctttggttgaaggggttgctgaggttcaggacagagtggatggccaggaatgctcagctcaggtcaagactctgtcttatcagcatcccctctccactgtcccttacctcaagtctgggaaatttgaagatgagaggcaggagccaaggtccttctcacattgggatcccagactgggctgagacagggttgtgagacgattgtgggggtaccccaagcaggaccaggccaaacccagggcctcccgagagttgcagaccatcaggtgccagcctgaggaaaggcaaggatctgcggctggcttcccaagaagagcctacttgctagcctggggcaggagaggggacaccaggacagagggggccaggggctggtccaaggttactagcaggcagggcagcaggcaggctagcgtagagtgctctgggcccagaagaatatctgggattgttggccacatcttgggggacgccgtgccgttagcatccatctgctccaatgagaacccaggctgagcccaccctgtgagttcctcctttagccggccagcccccggtttcccaatccacagtgggaattgaggtaagtgtgtgggggcggggagtgggagtgtcacagccccacacagagccttgctcctgaggtccgtctgcgctcagtcacctctggcccgtcaagccctcccaatgcccggcagctagcacgaagcccctgttctcccgtgcgcccctcgtggtggccgggaagggggcagagagccgcgcttacccctgaacgcagaggaccatgtccccgcggcagcggcgactccggagtggggactcggctggacggcggcggctggagggaaccagtgggcgcggagcgcgtgctgggtaggctcccggggcgcgcgggcgcaggacagggactgagaggcagtggcgcggaccgcctgcgagggcgaggggggcgggccagacgagcggggcggggcgagctgctgcctaatcctttgtctgccgcgttccagcccttcccggaagcagcgtcttcctagaaccgcgggctgagcggtggggcccgggcggggtgcgcgggccccgtcgccgggtctggggccctgagcagtgaaaggaaatactttgacagatttccaagaactttccaggaaaacggggcggggccccgcgagctgaccaatcgcgacgctgaaggtggagccgagcggtcggggagggccaatagcagcgcgtggacccgggg

SEQ ID NO: 29664 - DNA, 2300 bp, Homo sapien
taggctcctggcttaaaccattacttgccagctgggagatctaagttatattgtaacctctccatgcctcagttttctcacctgtaaagaggagataatatgtggtagttgtgacaatgacatgaggctgcaaattgctgagagtgcttgacacatagtaagtgttcagttgaatagtcatggtgagggggaagaagtatagttttggtagagagcttgggatttggccccataagagacccaagttcaaaattgtaactctgttgcctggcagcggcaaagtccttttgtcttcatagtaatgagacagtggacagttcctactggcaagtcagtggtccacacaggggccgcatatcaggctatccaggtatcccagccctcaaagtgggttataaggtatccatcccccctacccccattccaagaaagtggcttctggccaactcaggagggggctggcagagttgcactcatgaagcccggcttcccttcaggaaagctacagagaagtgactgccctgaaatctgaaacttaacgttttttccccagtttcacagggttttgctttcaggtttcttttgccctctgccattctgggcagagcaaactgagccctgtcttccctggatgctatcgttcaggcccttcaacaaggccaggggtctgtcatccctgcccaggatctcagagctagactcctttctggggaccctgggggcacacactgggagggggatgggggtggggagtggaccctgcaacctctccaaatcccacagttcttctggcccaagggtttggaggagattcacagaccctacagtccttcaagatgctccatagtgaatccagtgaactgaaaaaaggtggagagggtcctggtaggagcgtgggcttctgattcagagctgggaccaagctcttaccctgccatttcctagcatttgttccctggggctgtcttctgtccgcataacgggagcaacaccagttgtagaggatcaaatgcagcaagtactccctgtagataagagcgagtgttactactctgcccccgccatcccgccccaacctctatcaccctactcccagattatctccctatgttttgagttgcaggactctctctcagcattttttttctggcggggggtgggggtggtaccaacccagagtccgggccatctggggctgtctctgcttgctttctcaaatctgtagtctcttctcccctgactggcagggccggccagaaaccagtgccagccaagactggatggtctgcctgattcgaaaagttggggcgtgctttctccttcaactctttcaaagaaaacgttcttgtctggatctttctggctgtggtgaccgccggcttgacctcagtggacccactcatttctggaactgtcctctgcaccccgccctgccctaagtcccgctccagatctcaccccatgccacccaatccgacacccgacacacagagtcctagggtccaggagcggccgtcccaacacggggcgcttgcacacgccgacagacctccttggaggagccgctcgcagggaggacaagcccgggactccgccccccgccctgccacgagttccaccgcgagataagagggcccttccccaacgacgcagaatgccagaaggcaatctgggcgcgggttgctgagcccgggcccctccttaacttccccgacccggtctttccccactgatctctccgacctgcccctctgggtagcttcagccccgggtccacgcgctgctattggccctccccgaccgctcggctccaccttcagcgtcgcgattggtcagctcgcggggccccgccccgttttcctggaaagttcttggaaatctgtcaaagtatttcctttcactgctcagggccccagacccggcgacggggcccgcgcaccccgcccgggccccaccgctcagcccgcggttctaggaagacgctgcttccgggaagggctggaacgcggcagacaaaggattaggcagcagctcgccccgccccgctcgtctggcccgcccccctcgccctcgcaggcggtccgcgccactgcctctcagtccctgtcctgcgcccgcgcgccccgggagcctacccagcacgcgctccgcgcccactggttccctccagccgccgccgtccagccgagtccccactccggagtcgccgctgccgcggggacatggtcctctgcgttcaggggtaagcgcggctctctgcccccttcccggccaccacgaggggcgcacgggagaacagg

SEQ ID NO: 29665 - DNA, 2300 bp, Homo sapien
ggcaaggagccagcctccaccctcagctgcctagccttctgctcaccagaatgacatcttgctcagcctcaggttcaccaggctcaaactagttgccttcagagagcagagagccttctttggctccccccagcagtagaagattccagatcatagggctttcaaagaggctctgagatcttgaatcagattctcaggttgggctcagggacatcaatcctgggtccagctgggcataaatgcatgtgtgtgtgcacatgtgcatgtgtatctgtgtgcatgtgtgttatatgcatgtgtgtttatacgtgttatatgcatgtgtgtgcacatgtgtaaaggtgtgactgcatgtgtacatgtgtgagagtatgtttgcacatgtggctgtgtgaggagccagaaaggactaggagaggaggccatggtttgaggataagagcccagccctgaggttgtgctttggagttggaatgggggctctgtcatgacagctgctgacctcagacaggtcacttaacctctctgggcttttctgtcctgtgtgtctgtagtgtggggcagaagggatagtgtgacctcctctaggctctgtaaggtcagggggttgcagggagagcacattcccagcatctggtctgcaagaagtgttcactatggccagctgaggctattgtctggagcctcctgcttcactgaacactgctagcttgaaggttgcctgaaagaaataggggcagagccccaaccccatctccactcaacatctgcacacagtgggtacccactaataagttgtagcaccctttcagtcactcattcactcattcattgacagaagatcatctttccaagagctacttctctgatgagcctgcacatgcagcccaggggtccgtgagtgtgcgtgtgttaaccagaggggctgagggggaggcgctcactgggcctaaattccggagccaagagtaggatggctggaagacgcctctgagtggaaccgaggtcctggtacctgcagtcctgtagatggcctgtagatgacagcagaggcccatgcagagcccctgcgctgagccgcaccttcccagttccaagtgagccagctcgctcaggtccctcagcttccggattgggggagtgatgtgatgtgcgcaagtagttcagatctgtcccagaagacagccacagccaccctccctatggctctagacaagttgttttctccccaggggtcccagtttcctcatctgtgaaatgagagttgcttaacagccggtgttgggaaaactggctcaaaatacgtaaggtagtctaagatgggcttaacagagacttatatgtgcaaggcaaaactagaaagctaatggagaatatctgtcactcggatgggagacagagactttttaaacacgacgccaaaagcccaaaccataaggtgaaatgttggcggatctgatcaaatggcaactcgggatttctggtccccaggatgctgtatataccaaagggaagcagcgagtcaagggcataagcgggagctgcaaaaagggggcagtcgccagtgctggagactcccagagccaccagagactaaagagtggcgaattcaacaacgacaagatgccacctccctcggcatgtttaaaaagttgagtacgctgagggttggccaacactaggcaagtcggaagcctagcaagccatactggagggccacctggcagcgtgcagagcaaacacccgactcaaggagagctttcaagagaaataagacgtcctgcgctgtcacgttctaggttgcgagtaaaacccgggacccgcacagtagcggactgccagtacaggggcctccctgggtgtccctggaaaccgaggaagtaaccgccccctcgggaagccacgcctcctattttgttccggctcgggggcgggacccagccggggcccgcctggccctttaaggctgacctagcggggccccaagttgggatgacgcgcagggagcggggggtggagtgggggagtgggggaggggggggtggggaggggggggaggtcacgtgggcgccggcagcgcgactctcggccctgggatttctgcggccgccagctcccgcgaccgcctctcctgcccctcgccggtacctcagcaaggtgcgttgccgccaggtacgccctcgctgggccccctctgcggcctcctccggggacctcgcggccattaggcgcccggccccttcccttcttgacacgtgcccgggcggtgctcgcttgtaccccgccgcgcgaccaccgcc

SEQ ID NO: 29666 - DNA, 2300 bp, Homo sapien
tataaattctgatccatcaccctcaatgctaattggagaacagaatagtccccatttcttagagttgctcttcttcagtggtgacagagtgagtactattcctgctgctccctgggtcagggccctgcatgttccgagtacaagtcctaaggtgtgatcttgtgagagaattctctaaagatttctcttttttggcatcctgtattaaatgttcctcaaggaagagattagcagtaatccttgatcagattcagggccaattgcttgttggtgcccctggcaacattctttccctggacccttagcatgggcaggggtgtgagggacaagcaaggtgttgagaccacagctaaagcagtgggtcacagaacctggagagtgggctgtgtagggaggtaagctgtgcttcccctccaaacccgggagatgagcgctggagcctggcacagatgtgccatcttgagaacaaaggaaagattggctcaaggaggagaaagaagcctggagtggtcctgtgtgagcagtggtcctagatgcttctgcacagactttgttggtgctcagagaattggggaatgtgcagtggtgcctctgagcccaggactcaagaggataggccttttcctaggctgttccctcaacaagcccaggatctccttgaggggagatcatgttcttattcatgtctcttatctctgcttctgacccaaggtctgtcaatggctggttccctaatgtcatgggacgtggcaaggccccagcggctgcccctatcttccactctagtccgcacatttctccccactccccacttgctcgctcacacatcatgtcctggtcacactggcctttccattccttggatacgttaagctccttcttcaccagattcacctttcccaaatgctgcttgctctgtctagaacacttttctcttctttacttggctaatttgtatgtattgtcagcctccagtttaaatatcatttcctccaggaagtcttccctatttgcaaactaggtcagaatccctggctgaggctccctctgtacatgtaccctttctctttctcttctttcctagtacttgtatctctcttcgtttttttttttttttttttttttttttgatggtgttttgctctgtcactcacgctggagtgcagtggtggtgcagtctttgctcactgcaacctctgcctctgtctcccgggttcaagtgattctactgcttcagtctaccgagtagctgggactacaggcacccaccaccacacctggctaatttttgtatttttagtagagacagggtttcgccatgttggccaggctggtctcgacctcttggcctcaaatgatctgcccgcctcagcctcccaaagtgctgggatttacaggcgtgagccactgcacctgtccttgtgtctctcattagatatttgcttgtgtgattattggttcagtgtctcttctcccaactagatgctaaactccatgaagagaggctgggtgcagtggctcgctgttttttttttttttttttttttttgctctggacctggcccataataggtgctcaataaatttttggtaaataaatgattcaaactttttacacttcaagataaaaagtatgaaaagctggtggggataaagtctcggttcttttcctagccccagtcccatagcatttcagagatggggtaggtggtgctacactactcaacaggcttttgttttttaactcatttaactcaagtgagttggtgaaggcattcaattggtggttttttatgtatagagaaattacctctgtcctgatttggaatatctgtgctattttgggctgtttttctcttttgggcctgtttgtattgtagcaataatttcaccatttggctatgcagaggcccaattaatattacaaatgtggtcctataaaatgtgctttttgacatcagaacgttttgttgctaattactctccaaggtttttaatttcaagccctccttggtgacttagtgcagaaatttaaggacataattatttccccccaagggaaaagagatctaggtaatgccaagtttctatctatttgcccttccttccagggggtatcttgtttttgattctatctccgccctttttcctggacagaaaataaacatgcaaacaaaaaccctattggaacaaaaatataaatttctggaaaacattaaaagcactcatttactaatgtattaattaaaacaatatttactgagcacctactatgtgtcagatgctgcatgctaggcact

SEQ ID NO: 29667 - DNA, 2300 bp, Homo sapien
actttggtcccttcttttcccttccctggttgggtttaatgcccttccaccctggagctgaggtgtgcaatcatggagaattttcttcatctgggaaagccataatctaagatggattcagactgggaacaagagtataaactttggaaaaactggcccttaggctctgtgactgtcatcacatacagcagacaagggagtgaacttagaggatgaaataagagctttaaggttgttccctgaaggcctgcgtagctcagccccacttgttgaatagctacctggagagttttgtaagaatgtggcttcattccatagaatacttccatggtggccaccggggaggggtctatcttcttggaacagttagctctttcgttatgttcttggacacccctgctacccctaaaaagaagtgtacctggctattgagaaattctatcattcacagaacagacatttttctgggcgggagtgggcagctatgattagtgagaggaggagcctaaaggtccgaaggtgggaaggggtggccataacccaggggagcacagtcaggcctgggaggagttaccaatcatgacactttgaacgaagaatcaacaagatctgttgattgcaagatattcttctattagtctggcttcccatgcaacaactatacaacaggtgctgggttggtggtgagggtttagaaagttgattttagcctggagcttgccttctgggagctgacagtcttataagggaaataagacaaaccgaacatagctccaattccagacaaagaaggaaaggagactatgggtcagggcaggcttcctggaggtgaggggctgagctgggctttgaagagtggtggtgtctgagagtgctagtgaaggatgacaccagggttttgacttagtagtgctagtgacagagatgggcaaatctgctgggattagagcatgtggtccaaatgtaggtggaaaggagaagtcctgcagttcctgttctttggtaagtggttgacttgggggtcacaaggtgacatttacaggcatcagaatgaatggattcttagggaggagagagaggaggaaagtttccggtaggagccagttcttagggctccaagggaggcagacacccaggagcagcagatgccgtgtcctgggtaggaacacgaagggcccaatgaagctcttccttactagcaaggcggctgttgattgttctggccccaaacattcaccactcaggccatctcagagaagcaagaacccaggaggtgtcagcggcctcagcccacaggggatccaggagagaggggcacgagtgcaccccacctggttccctcgtggcgactccatcctgcgggccctgggaatgcacagggtggctccggggacctttccgacagcactgtgggtgacactgggatgggtctgaaaatggtgtcgtgtcctccttttctggatctcccctctccgaccaggaggcctgtggccatctcggggcgcaggcaggaggcactggaagcggaagcgagtggggagtccgggtagagggagtcgcccacctgaccggcttcgccccctccggggtttgctgcagctgagggccccggaccagcgattctagaagccggtccggggccgggcagtccaatagcttctcgcggatttccctccgctggcgcgcagcagcggcgcgtggattcgcgcgcgggctcgggacggcgcgagcccgggcagcgcgagcccctgcgcggcagggagtggcgcatgcgcgggcgtcctgcgagcccgctggggcgagccgagccgcggcggcgccgggagccgggcggcggagctgtgaagaagcaagcggcggcacgggagcagcggcgacggacaggtggcgagccttcgcccgcgccgccaggggctgctgggccacccgcggagcctcgcggtccagacgtggcgggggtggcggcggcatcccggacggcctgtgagggatgcgccgcccactgccccgcgccgcctgaccgtccccgcctcgactcgcggtgcgccacagccgggcccgcggccgtccccgccgcgttgtcgcccggtcgccgcgcccgcggggccgcgcccggcacggccatgtggacccccacggaggaggagaaatacggcgtaggtaggtgaggctcaggcctggccgtggcgggggttctgggggacgcgcccagctcccggccccgcctggattcgcatcctcgtgcccccgccactgcccgcaggctgcgcggcctcggcgcggggcgagcgcggggtggg

SEQ ID NO: 29668 - DNA, 2300 bp, Homo sapien
tcagaaagctccaacaaccctgagacactaatgtgtcctgtgacatgagcatgaaagggtgggaaacaggttggactacgatggagcattcctgcttggcagaacagaaacaggggataccagggcctgattctgtaatatccaaaataatgatgttttatagtgaaatttcatttttgatgtacaaattgtggatctatacaggaagaagaaaatgacaagaaagcataatttgaaaagataaaatgagaaaaaggcaagttacaagaccagaatcattagtttgtcaaaggactttctggaaatgcttttggtttctagttcttgtacaattgcttctacttcttttgctgacttccaccacttccattattcttatatgatctatgctgatggggctagcaaatatgccacttctaaaatgcctgggctggatggtcactagagatgaaggaggcccagtcctcttaagaaagtctctccactcattcctggctgggcgcattggctcacgcctgtaatcccagcactttgggaggccgaggcgggcggatcacataaggtcaggagttcgagaccagcctgaccaacatggagaaacctcgtctcaactaaaaaatacaaaattagccaggcatggtggcgcatgcctgtaatcccagccactcgggaggctgaggtagaagaatcgcttgaacctgggaggtggaggttgcggtgagccaagatcgtgccattgtactccagcctgggcaacaagagtgaaactctgtctcaaaaaaaaaaaaaaaaaaaaaagtctctctactcattcccattctgctactagaaacactcctgtggaatagagttagagccttcctggggatcacaattaggcagtgagcttgctgtccctgtcatattgccagtgctcacacagatcgtttttccttctagcctagaatgattactgcccaagaaaagtgcaagttgacctgccttacttctgcaatgtggttagcctggactctgccgctagcagactagctttttttaaaggagctattaagcccggttgacctttgatgtgataacaagcttgttattgctcattggctaacccaatttctccaagaagacaggatcccaaacatatcaaagggaattttcccagctacttgctgaggcttgtggacagtgaactttagttaaagatattggaactgggggtgatcagcgattagcaattaggtctcaactgctccagggcccacacatcagggcagcttcatttagatcatctgagaacacatctctatgggattcagcctatagtgtatgttgactactcctagagcctctgagttgtgctgaataaataagaaaatcacaactggtgtcagtagatctatgctcagtcatcctttccactctttttatattccagttcagcctgccagggaacggtagggagaaaaggctgttgtcatcctgggtcagagaactggctgcctagaagaggctttctacagccaaacccagtgcttggcagctccctcaggatcctaggagccacatgctgtgttcttcaggttctctcataccaacagttctccatcctggctgcacaggctacagtgcagccaggaggaaaaaccatcatcttagatgacaaaccctaagaggccagtctactgttaaagtcagtgctttactggtgccctatatggctgagaagagtcacaatggaggttccaggcactggaggcagaagttggaaggcacctatggcacactcttagaccctggtcacttcctgaagaaactccattgatttagtaagaaagccaccctcacacattcctggtagctacagaataacagagcagactaaaacagagtctgaagttggcagccagtccagtcaaataaaaccaaatgcctgttgttaactggtttatcctctgtaaagaagtattcagtagaaaaggcaaaaaggggaagaaaagaatatcggttttaagtgaattatgcgtaaaatatataagttcttgtgaccatctgaatggactcacccgaagaaagaaaggaaacttcctgccatagaagccgacccgaaagaactcaggctccaggcgttgctgctccataatgttgtcatagtagctggcctccattttctgtgaatgagaaaggtcttcaggttggcttgactgctgttggtatccaaaggaagttctcccaggcccaactggacactgtcttctggaaagggatcatggcaactcaatctagataagaagtaagtgagcctctag

SEQ ID NO: 29669 - DNA, 2300 bp, Homo sapien
ttaaaaaaagcctacaaaatattttttttcttttatttgctcgagttcacattaatgatggtcacaaggctgccttgttgggcaggcgtattgcccccagttcctcttctgctggcctgtatgacctccacagccaggccctgggcccaagccccttgtcccttctccactgcccctctttccagacagtaaaggccatggtcagtgtgtttttctcttgtaaacaaaccccagcttgtttaacagaaatgctaataacctactgggaaagatggaggtctaaattacctccagggtttttctgggggtttatcaccagtgtgggtcccttctgataccaccaggttcactccaggcagagtggggcggaaggctgctgaggatatgggtcagttacagcagccctcacctcaaagggctggcctgcttctcagcctacattcatttgcaagcttcaatctctggaccatctggtgttcacaggtgttagagggttaggggttaggggctagttttggatttgattcataggtaggagggcttagattttaaggcacttctgaaagtcaatccctggacaaggcagtcatcacataagaacagctaccttctccacttggtggcacaagaggtagggaggggagtatgggttcatttggcttcgcattatgcaaggtgaaaccgtttgttttccctctccattttccctaactaaatgaaaaggacacattctgaaatcccttttgttggagaataagtcagtctgaggggaaatgggaggccagagatgagaaccctttgaaaagattgtaaaatactgattttcattctttcaagcttatttgtaaatacctatttgaatgctgtgtatttgtacaggaatttgagcaaaaaatgtatagagtgtgatgtccaattggtattcagcactataaatgtgtttttaacctcccgcattctgtgcttatttaaaacaaggaaacttctaaccatttcttttgtgtattcatgtttaaagaaaaaaagtgatttaaaaatgatcttacctgtaccagaaaagcaaagttaaaggaaacaaaatttgtaccattgtcccaagaggtattttactgtatatattgtggtagcatgttcaaaatccaacaagtaatgtgaattttagatgtaaatatctgccacttgattttttttccccctttccccacttccttgactgctgtgatgtgaattaaagataaatacgtgatactgatccactgaattcactgaatgggagcagaggatgtgcccctctccaacccttgtcgccgggctccaagccctttttagccctatagacatgtcctttttgcactgagtagagccaacggttcccgcatcctgccttgaaggcaggcagccaggagggcacttgaaaggagggcagtcgaaaaggaaacatcctccagtgcttctctggtgattcccgggaccccactcaggaggtcccacggcagcgggggaccccgagggcctagccggggaggcaggaggaggctggccagccaccaagccacgattcagagcttgtaagggcacctcccgagcccctcaccttcccactctgaggcgaccccatgtcctcgaccgatgatctggcccgggcgcttccctccacggtctagagtggcggcccagctttgagcttggcgcgccttgagcccttccttcagatgtcccgcagtccgtccaccccgcacgtctcctatcagcctatgcacggcgggctccggtcaggtggaggatcagcaggtgggctttcaaaggttggatccgttgcccacgcgaatgaaagaagaaaaaagaaacctctttgagccttgcctgcggccgcccgcccttcctgcctaacctgttgtcttggctgaccccagaactcctgcaccacgagtcggagtccgggcgaggagatcagcaggggttttcgagggagcctggggcccagggcaggggtacgcgggtcaactcaacagatgtaaggcgtggccgaaccccattcagctagcagtacccagcctcagccacagtcgctgcccttacccaagatggcggcccacaccgcttccgtcgctgctgtagtcgcttcctgcggccagcccgggttcaatcagcggccgacaactgtctagggctcagacaccaccagccaatgagggagggcagcgtggagccgcccgtctgggctcgcggctcctggaccaatggggaagtggcatgtgggagggcgccggggggccccccgccaatggggagctacggcg

SEQ ID NO: 29670 - DNA, 2300 bp, Homo sapien
agatgtgaagcctggagctttcctgatgatgctggccctacagtacccccatgaggggattcccttccttctgttgctggtgtactctaggacttcaaagtgtgtctgggatttttttattaaagaaaaaaaatttctagctgtccttgcagaattatagtgaataccaaaatggggttttgccccaggaggctcctaccagtttctgctttccagttgcagagtttggggggttattcattcccatttatctctcaacccaccagtgctgaaaataccagagcaggacataggggctggggccagctgatgtgtgtgggtgtgtaccactagagggcagcaggcactcagcagaaaggaggtggcgggggcggggggtgctgcgcttgataccctgccccttgatacagtatctgtcttacccgcccaagagagctggaggccacagctctaggaggagtgagtctgggatacattggagggccttatattgtggctcagtacaagcaagacagggtgtctggagtgtggtttttccacaaggatatcttcaatcagtgcacgtcagcactgacatctctataaagatgctgttggcctggccacctacttgctcttttgtccattccaagcctctgatgtctgttccagtttttgcaagtctggcaggagtcagcttatacaaagagggagtgggaagctgccttttgcctttgtttaccctagattagtctaacagttgaggtccagggttttgctggagtctgcttcttaagccactctctgtggcactggtgcttaggaaacccagttgttagtgtgagctgtggctcaatgaagacacctgtagaaaccacctgaaaggacggactaagaaccagtgctttccaagtaattggtcttgcctcagatcacttcacttgtgtctcctaagctcagtttgcctgtaggaggccttgctgctgtggaacccattgctttcttccaagacctttccccctgcacctgcctgagctactccaggagctgctttctctttgtgcgaagagggcatgacttggtctgctcttccccatcgcaaggattctgtgccagaaattgggtcaggttctaccatggctccagcaactgtccttggagaatgaaagcttcctcaatgggcttgagcacctgggcaccctttccctcacctcacctggggagaagaggtcgtcctgaaggtgatgaacaggagggtactggccagcgaggggtcagcgtggcaaggtgtgataactgctggcactatctgtgcatatggcctcttcatccttggctcttacggccctacctttccagcctgctatctgcccacagaagagggtgggacccaagagtggcgttaaagagtctattccaactccatcaactgcaactgcaggcttgtctctgctttcggttattacctgcgtgacagcaattgtcctcacggccttttcggggactgctgcaggtgaacctgcacgtggagaatgcgcagaatgtgggccttgggtcctgggcagggtctaaggataggcatgcattagtccttggcgccgtcaacgccggatcccaggcaggagatgccaacgagggtgatgtggggtttgctcaagcctagtcctaggactgaggggatactacataaagagaccactgactgggtcaatgccccagatcccaacggccatggaagctgccactcctgctccaatcagcgcgggctccagtgcctgcaagaggagatagctggacccagagcggcaaagcacggctgggagcacaaagcgttaggtcgtctcgccggcctctcagggttcactacactccgcgtagcctcaagcatcggccatgcgggccgcgcggtggcgccagagcgcgcggccggtcccactcacccagcactcacagggtcacctggcactgggcgacgcagcgcgatgaggcaggcccggcgcgggtcttgctccgcccgccgcagagtcacgtggcaggacggcgcaccttgataacgcaatgcccggcccctcggcgccgctcccgccccgccccgccgccaccgccgcgccgagtccttttgtccaagatggcggcgccgggggcgctgcctcctcggccgccgcctccgccgccgccgctgtgagaaacctacgggccgcccgcccgccgcgccagcgccatgaagcggcagagcgagcgagactctagcccgagcgggcgcggctcgtcatcgtccgccaagcgtccgcgggagcgcgaacgggaggcggaggcgggcg

SEQ ID NO: 29671 - DNA, 2300 bp, Homo sapien
ctctgttgcccagactggagtgcagtggtgtaatcacggctcaccacagcctcaacttcctgggcataggtgatcctcccacctcagcctcctgagaagctgggactacaggcacgtgctaccacacccggctaatatcttatattttttttttatagaaaaagataaaaccatgttgcccattctggtctcaaactcctgggttcaagtgatcctcccaccttggcctcctaaagtgttgggattataggcttgagccaccgtgcctggcctccagattactttctggaaagagtgtactaatttctactctcaccaaaactttgagagtacgtgtctctatatgttttcactaggatgaaaggattcaggattattctatgttttttatcatagaagtttaataggtaaaaattccattgctatattttttggaagtaatgtcatggtgactataaaatcctctcttgatgcgacagcttgagatagagccacactggtagtgcttctgatttattgtctctgtgtgtatgtgtctatctgtctgtgtgtctctctctctgtctctcttgattcttgtggctatactctaatttccctttgactaattcttcctgtccaggaatgacactgtgcgctttgctttggatgtcctggctattcttactgtggtgccaaaaatccagctccagttggcagaatcagtggacgtgttggatgaggctggatctacagtctctactgtaggtaggttgtactttgccatttttgttgtttcttggtctggatttgttttttctttgccactctggtcttggttacttacctgacctaattttggattttagaacagaagtagtagaggggggctccttgtctgtcctttataaggagtaccattcagcagatcaggaactaatttaaaaaaaaaaaccaaaaaacaaaaatacaaatgtaggaccagatagtttgatgtaagggagtcatgctagtaaactcaggttttctgagtggtactggcatttctgctataatggtatattatagctttcctgaaaagctcacactctgaagagtcttgcactaaaaataaagttcatgggaaaaatgggttgaggcagatagtaaaaaacttaagcatcacagctttccaggagttaaagggaaaaaaaaacaaagtaagcagttttgtaacctgagtcagtaattggcaggtagctcaaaatgggtagaaaccgtcatacatatataaaaaaaggaaaatatactttgataatatactttattaagagcaaggctgatcagggcactgctggggtgagcatgggaagtcgtgtgatgggacaagatgcaggataggactaagacacaggcacttggtttttaattttcttaaaatagagtggaaagggttctgcttccacagtagcagcccaaccgagggctttctccgttcctaaggttttagtgtattaaaattaataaaccagaaaaggtcgagcacagtggctcacacctgtaatcccaaaactttgggaggccgaggcgggtggatcacctgaggtcaggagttccagaccagactggccaacatggtgaaaccccacctctactaaaaatacaaaaattagctgggcgtggtgacaggcgcctgtaatcccagctctttgcagggatgaggcaggagaatcacttgaactcgggaggcggaggttgcagtgagccaagatcacgccactgcactccagcttgggcgacagagcgagactctgcctcaaaaaaataataaaaccagaaaaaattgcacatgaaccttgattacttttccataattatgacatgatttccctatttaataactgcatatgagataccataaaaatacattgtagtagaactgtctgcactttatacaaacccttgcagtttttacaaaagtaatatagttttttaaagtaaaagtgagtagaacaccaaattttgactctggaacaactattgaagttggccattagttttatggtgaataatacataattttttttcccattaggtatcagcattattttgggagtggctgagggtgagttcttcatccatgatgctgaaattcagaagtcagcacttcagattatcatcaattgtgtgtgtggcccagataaccgaatatccagtattggtaaatttatctctggtactcctcggagaaagctgcctcagaaccctaaaagcagtgagcacaccctggccaagatgtggaatgtggttcagtccaacaacggcatcaaggtgctcctgtc

SEQ ID NO: 29672 - DNA, 2300 bp, Homo sapien
gcttaaatgtcccatcctcatacattttaggttcatggcccagggaggcatggcaggaaagtcacctgaaggagtgctggaggaatggcatgtgggttccattccttgttctacctctctgggtccagatttctcatctgtaaaggtgattaaccatatcttccctgtgtgtgtggcagggtagtgagggttaaatgagagagtgtggctggaacacttggctcagggcccagcatgctctgaagttgaaagaaatggtactggccattactgacagaggtagagttccagaagcacagagaagggacctgtgtgttgtggcaggagaaagaagtgaagaaaggtgacatgtctgtggcgctcccagcacatattagagaatctctgcttggagcagtagctccaagttacacatttaagagaaggaggatggtcccttttctggaaagagggaaatgggatctagtggggaatgaaaccaagggacccaggattcaggatccttactagctgtcgagcctgagcatagcagcaggcttgctgtgtcttgtattcatgtgacagtattgccgtgaagactcatggagatgcacggagacttgctcagcattcccggagagataatgagctgcataaggccttgaacgctgggtaggatcttgtcaggtcgagattctgctcaactgtgggtcatgtttatcttctatgccccacaagagggactgctggtcagagtaaggagtcctctggttctgctgttaattggttgtgtgatgctgggcaagtcgctcactccctctgggcctcatttttcccaacaacatgaagaaattgaattaagtgacctgtgaggtcagtcctgccttaatctatgagcttttgatttttcacttctctgcctcacgtataataacctggcaataagtatctattgattcttacaggctaggtcttgaacaaaaagacagaggctgggtgcagtggctcatgcctgtaatcccaacacttcggggggccgaggcaggagaatcgtttgagcctagaaattcaagaccaacctggacaacacagtgggacttcgtctctacaaaaatttttaaaaattagccgggtgtggtggtgcacacctgtagccccggctacttgggaggctgaggtgagaagatagcttgagcccaggaggttgattgaggctgtagtgagctgtgatcgcgccactgcactccagcgtggatgacagagcgagaccctgtcaaaaaaaaaaaaaaaaaaagacagagaaaaaagaggctgggagaactcagcccaggagttcgagaacagcctggccaacacggcaaaaccatgtctctaccaaacacgcacatacaaaacagaaacaaaaattggctgggtgtggtggcatgcgcctgtagtctcagctggaggctgaggtgggaggactgtttgagcccgggaggcggaggtcatagtgagctgagatcgtcactgcactccagcctgggcaacagagcgagactctgtctcaaaaaaacaaaacaaaacaaacaaaaaacaaccagtgccttctgatttaatgagtgctgtgatttctgatatgtttatgagaaatattttcttagatcacggtatgttctaggtaagataaggcaaatggccaaataaaacagaggctctttgcgcacacaggtcagaacaagacactgaaaaagtatcaggcgattacagtactgtcttagaaggattggctccctcacttttcacttccgccttccgaagcagccaatgagtactcagcagttcgcatttatccaaaaaaactacaaatccagaagtcaatgcgccaggcgaagagctcatgcgtcaattgggactggtgggcccgcccctagacgcggaacttcatttcccaggcgtccccggggctcttcgattttttttttttttttttttttttttttttttttttccccgatcgtgcaggcgttctcttcccgccccttgctcgcggtcctcgcgccaagtaggcgcgagcgcgcgcgcgcggtgcacgtagcgcgcgagtgacgcataatatgtgggccgctgtggagccgtggtcgcgctgtgtgtgtgtgtgagtggagagtgagtgcgggacctgaggctgtgtgtgtgtgaactgtggccactggcggggtcgggggggggcagcggcggagccgcctcggacggtgagtgggaaatggagggaggcgactctacgggaggggcgcgaggaagcaggtcgcgcggctggccgggcggcagagtgggcgccg

SEQ ID NO: 29673 - DNA, 2300 bp, Homo sapien
cagagagctggatcctccggggccctgatgcaccctgacgaggagtggttttcaggcaaggaacttatcacaggagtgagtagtggcacacggtgagtagtgctagctgtcttgtcgttagggtgaggccggtgggagttgtggtttggggagtgtagaggagggttgataggctactgagattggagaatcagctttatgtgggtcatggtggtggcagcctgggagatgaacaaggaaactttgcagagtgggcttcctgatggagagtgacctcttactgcgtgggagtgggtgactcagatctgttaggattcctgttgcttgctagggattgtggctgactatattggtggctgaacattgaggtggatgcaactggaagggttatgtggggctggatgagtttgttcccacgtagaggacagtgtggacctttcttactccaagtcagagtggtgactgtcattgacaacattttaagtaaggaatttctttgtggtatttggatccaaagcttttctctgttcatttttttctttcctccgttgtttttgaattgtgactcatactttcttttcagcactgtggctatttgaaatgatagacaaacttagacttcatcatacatgtaagttccaggcgttttcagtccaattcttataaatctaaatttaaaagcttcttttcactaatttgtgtaccattgtttaatgtgtgcaacactaaagaaggataagaaaactctaacatttatgttgttaaatggtctttccatccttaaatccatgaaatttcatcttctcttactgccatgaagtgagttcgttgaatctattaaatcttagtgactctcatttcagcatccttgtttactctcacaggacattgtcttcactagaagtattatccatcttcaatgaatttggcctgtacactgtctccctgtgacaatctatatcattgaaagacagtacgcaaactccaactctgaggcctgcagctgtgggccggagctctgtatgtattattcaggcaaaagttggtgtgttgtctgtaggtgaggtttaaagggaaccctacatgaacaaaaacagtatcagaatcattgtaccttctgagtttagagtggtaggaaatatagcctaactggagtctagtataaactttcaagtgcaatgttaggtaattctgtttgtagttgtactgatagttctcattattgtaaacattatctttttccttaagctttaaataattatttttcttcaatggtattctttctttcttggctgggtgtggtggctaacgcctgtaatcccaacactttgggaggtcgaggcgggcatatcacatgaggtcaggagattgagcctgcatggcgaaaccctgtctctactaaaactacaaaaattagccggtggggtggcatgtgcctgtagtcccagctactctggaggcagagggacaagaatcacttgaatctgggaggcagaggttacaatgagccgagatcgtgccactgcactccagcctcagcgacaaagcgagactctgactcaaaaaaaaaaaaaaaaaaaaaaagtagtattctttctctttctccattcattctttcataaacgaacatttattgcattttgccaggcactgctttgggcacctcaaaaatgctgatgatattttttaacattttgttagtggtagttcctggtttagaggtggttataggtctatgaagaaagaagtgattcaggtatatcaagcttttaatcagtaaagacattgaataaagtttttataatgtattaattttgactggtgacagttaattatcttaacatctccatggaaaaagtttagctatcactgtgagttcatgctggtatgggattatttttgcactattttatacacctgttaattttaagtactcctgtagacaaaccacaggtaaaacattttgttttggtgtatgtctcaacgagcagtgatttacaaatactatatgtgttcagattccccaggaagccatcacactccttcccactgtggttttgggagcatgaaggcgttgcttatcccctatgtctggttcactgtatgtaggctgggagtgtctgctgatcacttggagtgctgtcccttggaacaggaggagtaagattgaggtaaggctcagtctgtttgaaagtcatttgcttcttaatttttactgcataaaatataatgtaaatctgaatgttttttgctttgttactcttcattctgatctattaaaatgaaattctgccttttgc

SEQ ID NO: 29674 - DNA, 2300 bp, Homo sapien
atactccaagcacattgggaatgtgaggcagaaggatcacttgaggccaggagtttgaaaccagcctggccaacatatcgagaccttgtctctacaaaaaagaaaaaaaaaattagctgggtgtgatggcatgcacctgtagtcccagctacctgagaggctgaggctgggagatcgtttgagtccaggagtttgaggctacagtgaggtatgattgtgccactgtactgcagcctgggcatcagagcaagaccctatctcttacaaaaaaaaaatagtgttaaaggtcatgagagaccagaatagactgagaagctgccatagtttagaggagactaaggtgacatgacagctaaatgcaacatagtatcctggatggggtcctgtaacagaaaaaaggatattaatggaaaactggtgaaatcccaataaagtctatagttaaaagcaaacaataagccaccagccctccaaccccgccgaccccaccaaaaaaaaacaaccaaaaaaaccccacaaagttcctgggtccttcctgcctgagatccaaatggcattgtctagagcacctcagttctggcatttatattctagttctgaattcttgttacctttgggaaagaccttttggttgtgtagtgcctgtgtctgggaggctctgatgaatttggggacaggcttgtggtctatgtgactctcaaagcctgcctacccagtgaacagaatgctactcagcaggctgaggacaggggtatgcacatggatccgcctactccaaccccagtccttgctggtattggatgttacaaatgacatcccctggacccccaacgatcttttttttttttttttttttttttttaagagggagtctcattatgtcgcccaggctggagtgcaatggtgtgatcttggctcactgcaacctccgcctcctgggttcaattgatgctcctgccttagcctcccgagtagctgggattacaggcgcccgccaccatgcctggctaatttttgtatttttagtagagactgggttttgccgtgtttgccaggctggtctcgaactcctgacctcaggtgatcctcccgcctcagcctatcaaagagttgggattacaggcatgagccaccgcgcccagcccccaactatcttttaaggcattacctttagacattctgcttatctttcaaggcctgactcacattttacctcccatatagttccttcatgatcattacatgtattagtatctttcaaattcctgtgatgtcttcaaccttaaagttctttatatctgttgatctgcccttcctgtgatatatagcacaccttgccatgttgagtctgtgtttgtacatgccctgtctccctaagcagaacacaaacttcttgaagggaaggagtcttacaaaaccttctaaacttcatgaggggaaggaatcttacaaatatcccttgaagcgtctaggatattgcttgccataagccctcatgaaatgattggcaagtttgagtgagtgaatgctttaagacagatgagaggtgaatggacttgcttagagtcataccactgggtatgagctatatttggagcctagctgctcagtttgtccctttctgagcattctgaggccatgaaacttactaactctgatcatagcactaaactacagtaatagtgatggctatcatttgttgtgggcttactctgggccaggcttggttctaggcatgcacgctatgcagtcctcacaatagctctgaggtatgggcctcactatcctcattttgtagatacatccactgatgttcagagagatataaagaatttgccttagattaccagctaataagttgctgagttgagatttgaacccaggtgtgtctgtcatccagactcattccccctcacccctataaagcaatgtctttccccttgttttttcagacccatccctggaaggcatgtgtggcactgagcatgcccagttgggagaagatgggcagcagccgccgcggtgcacttcaactacctcatctcagtctgagccttcagagcagcttaggcgccaccaaggcaagaacctagcctccgaggaccccaaaaagaagagagctcagaagccctcccacatgagaagaaacatacggtgagctgtgctctgtgtaagaggagagggaaaggaatagagattttaccttcatcttaaggctgtcaatagcaaaaagactgatttgggaaggacagttctctctccaaaggagaaaagtgtcaggtgtgtgtcttcattaatag

SEQ ID NO: 29675 - DNA, 2300 bp, Homo sapien
ttcttccttccatcaaataacaatgcgtgccattgaaaagaaatgaatgatatctttttctcctcctgcctccacttaaaaaaaaaaataacgacaacttgaaatattactctgagtttgaaaataatatagaatccctgtaaccctagtttcttttcttttcttaatttatttatttattttttttgagataaagtctctctctgttgcccaggctggagtgcagtggcgtgatcttggctcactgtacccccacctcccgtgttctagcggttcttgtgcttcaacctcctgagtagctggaaccataggtgcccgccaccacacctggctaatttttgtatttgtagtagagacagggttttgccacgttggctgaactggtcttgaactcctggcttcaagtgaactgcccaccttcgcctcccaaagtgctgggatttcaggcatgagccactgtgcccggccaatcctaatttcttttctacatgacaacactatttttttttcttgagatgaagcctcactctgtcacccaggctggagtacagtggtgcagtcttggctcattgcaacctctgcctcccaggttcaagcgattctcctgcctcagcctcctgagtagctgggactacaggtgtgcaccaccacacctggctaatttttgtatttttagtagagacggggttttgccgtgttagccagactggtctcgaactcctgacctcaggtgatccacctgcctcagcctcccaaagtgctgggattacaggcgtgaaccaccacacctggccaacaacactatttttaatactgcttttcagctttgtgaatcaaatattactctagtttattcttgatctgttatgtggagagatgagttggcaggtcggggagttaaataatatagaaagtattagcctagagccatctgagtttgatatcctgttttttgaatgctgctccttgcatgggtatggtggggctgatgtggcttctccttctcccgcctcgactctgagatcatcaatggctatttctctctttagcttgccattacattgcccaaatcttaattgaacccaagtgctgtctcttatgtgaatgtttagaaagctactccgggaggatcaattggagcctgttaccaaagcagcacagcaagaagagttggaaagaaggaagcgcctggagcagcagaggaaagattatgcagcccctattcctactgttccgctggagttcctccctggtaagcagtggacatggcagggaaggccctttgcttcaggaggaagaagccctaggtgcacacagtggtcaaaagcagatctggaataagactgtggcctctcggctgggcgcggtggctcacgcctgtaatcccagcattatgggaggctgaggcagatggattgcctgagttcaggagttcgagaccagtctggccaacatggtgaaaccccgtctctactaaaaatacaaaaaaaaattagccgggcgtggtggcgtgagcctgtaatcccagctactaggaggctgaggcagggggaatagcttgaaccagggaggtggaggttgcagggagctgagactgcgccactgtactccagcctaggtgacagagtgagactctatctcaaaaaaataaaaataaaaataaaaataattgtggcctctcaggaatcctttaaagtcattcagcttcttgagagcacacaatcagaagaagatcatttaaaaagctaaaatgaataaaaatgtactctttaaataggttttatctagatttttcctcataactttggattttaacttaccaaaggattgggaccttttctggtggtcaggtggatagcaggaaggaaaaaccagtagagaaagggaatttggaaggagggctgaggtttttgagatgggctctgcttctcttctcagtggatactccccatgagagctataaaagaaaaggggtggtgaattgttttgggaaatatgttagagccaaatgtggtcttgacaccgttcccttccattttgcttttcctagaggaaattgctttaagggcaagtgacggtccccaactgcctcctcgggtcttggcccaggaagtcatttgtttggacagtagcagtggcagtgaggatgaaaaaagcagtcgagatggtaagatcaaaccaggtgcctccctttcttccgacctggtgttcatgctgagatcggctatactttgaaaagagtccagtccttcctccttcaatttgggatgtggctttgactaatttccctgtgtctcctt

SEQ ID NO: 29676 - DNA, 2300 bp, Homo sapien
ctcaagcgatccacctgcctcagcctcccaaagtgctgggataacaggcctaagccattgtgcctggctgaaaactctttgtttttgagacaggctcttgctctgtcgcccaggctggagtgcagtgatcacgactcactgcagccttcactccctgggctcaggtgatcctccacctcagcctaagtagctgggactacagcctcatgccaccatgcccaactaatttttaatttttttgtagagacgaggtctcactatgttgcctagtccggttttgaagtcctgagctcaagcagtcctcctgccttggcctcccaaagtgttaggattacaggcgtgagccaccatgcctgacctgtctaactgtatttttgtacccattaaccaacgtctcttcctccccctcctctcccttctcagcctctggtaattaccattctattttctacttccatgagatcaacttttttagttctcccacatgagtgagaatgtgtgatatttgtctttctgtgcctggcgggtttcatttaacataatgacctccagttccatccatgttgctgcaaatgacaggatttcatttttcgtggctgaataatattccattgtgcataggcaccacattttctttatcctttcttccactgatagacacttgggttgattacgtattttggctattgtgcataactcagcttaaaaactcttctgttgttgttgttgttgttgttgagacgaagtctcactctgtagcccaggctggagtgcagtggcacaatctcggctcactccaatctccgcctcccaggctcaagcgattctcctgcctcagcctcccaagtagctgggattacagttgtgcaccactgcacccggctaattgtttgtatttttagtagagccggggtttcaccatgttcaccaggatggtcttgaactcccaacctcaggtaatctgcacaccttggcctcccaaagcgccaggattacaggcacgagccaccatgcctggcctgttaaagagttcttaaggctgggcacgatggctcgtgcctgtaatcctggcgctttgggaggccgaggtgggtggatcaccagggcaggagattgagaccatcctggccaacatggtgaaaccccgtctctactaaaaatacaaaaattaggtgggcatggtggtgcatacctgtagtcccagctactctggaggctgaggcaggagaatcacttgaaccggggaaatgggaggttgcactgagctgagattgcgcctttgcactccagcttgggtgacggagcaagactccgtctcaaaaaaaaaaaaaagaactcttagcaatagggactacttctatgtggctgggcacagtggctcatgcctgtaatcctagcactttgagagaccgaggggggcaggtcacctgaggtcaggagttcaagaccagcctgggcaacatggtgaaaccctgtctccactgaaaatacaaaaattagctgggcatggtggcgcatgcctgtaatcccagttactctggaggctgaggcaagagaatcgcttgaacccgggaggcagaggttgcagtgagttgagatagcaccactgcactccagcctgggtgacagagccagactctgtctcaaaaacaacaacaaaaacaaactactcctatggaatgggctgccttaagagggtgagctttccaatgctgagggaagccaagctgactgaaagatcctgtcaggaatttgacactaccgattcatgcattacatggggtgttacactgtactagtgaatccttttctgttttttccaagaggactgtcaccagcaaatagatcagtcaaggtacagggaatcttctatggccatccacacctgctatctattataacgccttctcacttacttaattcttactaattacaaagtgagtaaaaactggagccctcatctttgtgagcccctctgacatttgtctttgtcccttgtcagattggcgggatccggttcctttacgataacctagtggagtctctggagaggtttaagaccagcagtggctttggctgtattctggcccacagcatgggtctggggaaaactttgcaagtgatctctttcatcgacgtcctcttccgccacacgccagccaaaacagtccttgccattgtgccggtaagagtttttgggaaggcaccacttaagtcactcctgaagagctctgtgttaatgcctttactgggcaccaaaaagcttgatgagctcagctctgagtttgttccataaaact

SEQ ID NO: 29677 - DNA, 2300 bp, Homo sapien
atactattgtttgtgaatttataaaaaagaatttatcccagttgtttttagtgaaaaccattcctgtcatagttctaattctactccatcttctaaggggcctttgctcatttggggaagaatgtttttaagggttcagaggccatttcactttagaagtctcttcatctatgagattatgtttgttctaggtttgcttctatggtagagctgggatgaatttgccatttagcaatgactggaaaataactgcgggaagaccctgtcctttagctagctcctaccagccagccctcagatggagtcaagacgctggcaatggtgagagcctactaaagtgtctggattattcctattggtttcatccaggtgcatttttaatcctaggctggcactctgtaaggtccctctctctgctgcccagttggtctaagccctaggaatgcaagtcagttatacttttcacataaagaaaaataaagtaaggaaaggaacggaacgggggaaagggatatttattgcaagagtcaactgccagaggcagatcatgaggtcaggagttcgagaccagcctggccaacatggtgaaacaccatctctactaaaaatacaaaaaattagccaggcatggtggcgcatgcctctaatcccagctacttgggaggctgaggcaggagaatcgcttgaacccgggaggcagaggttgcagtgagcggagattgcgccactgcactccagcctggacgacagtgtgagactctgtctcaaaaaagaaaaaaaaagagtcaactgccagattagcattcataccaagtcataccagtcatatccaggagcttgaatggctggcaccctctcaccaaggggggctgactcttgctttcctgcttccttcatttcttctgtctcctccagggtgcacccctacttctcatattattgactaagagcaggccctgtcaccctctgactccggatcctcttccctccctagagtttgagaaggctttatgccgccctggccctgatgtagtaatctgtgatgagggacaccgcatcaaaaactgccaggccagcacctcacaggctctgaagaatatccgctctcgccgccgggtggtgctgactgggtaccctctgcaaaacaacctcattgagtactggtgcatggtggactttgtgcgcccagacttccttggcacccggcaggagttcagcaacatgtttgaacgccctatcctgaatgggcaatgtattgacagcacacctcaggacgtccgcctcatgcggtaccggagccatgtcctgcacagtcttctggagggctttgtgcagaggtgagccatcctcagggtcctgcttcctgaattttcagagggccctgttgccaagggcatgccaaacctgttatacaggatagggtgttggagtaggagggccccttccctggggcagtagtaaaactttgcttcctgtgacaagctagcagatggtggatatccactgtttcagttctctgaaagtttggcctagaagtgcttctctcaaaagttatctttaaaggtactggagacacctgtcttacttgctgagagaagcaagaaaaaggtaccattctgctgacttaccttaggctagtctaaagcagacccctcatttttccttgttgagatggcatatggagcgaaagctcagagaggcagcccaaattaaagtaagaacctcaagttcccctgtctctgtcatgcagtcagacttgacctgggacaggtcactctgcctcttagtgttagttttcatccttaaggtgagtttcttcttggttgttgaaccactctgcattattgcaaggctgcagtgcatgttgagatcctcaagagggaggtgtggcaggagtgcaaaaggctctgtttttatcttgtgctgacccctcctggccacactaccttgccgtttctgttctgtttgcctccataggagaggccacactgtgctgaagattcatctccctgccaaggaagaaaatgtgatccttgtgcggctctccaagatccagcgagatttgtatacacagttcatggatcgcttccgggactgtggtagcagcggttggctggggctgaacccccttaaggcattctgtgtgtgttgcaaggtgcattggggcctcagggaagattgagatggggactaaggatacacatggtcccaagggagttactcctactgagagtcttcaataaagggagaataaagtgagagggggccacctcagttcactgcactggaggtttgggggc

SEQ ID NO: 29678 - DNA, 2300 bp, Homo sapien
agctgagtgtggtggcatgcacctgtggtcccagctacttgggaggcagaggcgggaggatggcttgagtctgagaggtcgaagctgcagtgagctgtgattgagccactgcaatccagcctaagcgacagagtgagaccctgtctcatttaaaaacaaacaaacaaatgaacaacaacaacaaaatacccaagagttttaattagcttttctctcaggagtgttatgaggcttagatgatgtgatgaatatgaaagtgctttaaaaagtagaaagtgcaaggtgactgtaaaaggctgatggtattgtctcatgccaagcagcttgaaggctgtgctgccttctgccatcgtaatgcccttggcaggatgtaagccagtcattcccctaagctgttagactaaaaatagtggaaacatctgtgtgcagaagtttcccctcaccaaggaacatccctccaaggccaggatgcgggggccttacttgttacagaggagagtgagttttgtttctgagctggtagacactttcatgttggatttcagggcacaattttcagtgcttgaggaatgtactgtttatcagcaggacagcaaaatccttgagtatgttgtacttagggcttaggacagagtaatattggggtagaagtcacagagggcaaaactgatttgaaaaccttttttaagactaaaggctctgtgattgttggcttgtcttttaaagggccggatgcttgggtgtgaatctgattggtgccaaccgagtggtggtgtttgatgcttcctggaacccttgccatgatgcccaggcagtatgtcgggtataccgttatggccagaaaaagccctgttacatctatcgccttgtggctgattacactctagaaaagaagatctatgaccgtcagatttccaagcagggcatgtcaggtgggccatcttccagacttcggagaggcacatctatacaggctaccatccttttagtatcaagggtgggagaggagcaggatatgggaacacaggcaggcttcgagaaagccagcatttcctcctatctcattctgattcaaattgcttaaaaggtaattgacctcaacttgttgaaggtgagtttaatgataacagccaagctcgttatacaagttttccccttatatgatgtttccagtgtcaccagcacctcagacctagtctttgactttcagatatgggatgacttttcattattagtgacctttacagtttttaatgccatgtgctgactttcttcatgtctttatccttctagatcgggtggtggatgatctaaatccaatgctgaacttcacacggaaagaggtggaaaacctactgcactttgttgagaaggagccagctccccaagtttccttgaacgtaaaggggatcaaggagtcagtcctgcaactggcctgtctgaagtaccctcacctcatcaccaaggtaagaacttggtatgcatgcaatccccagagtggcagtctctctgtcaaaggaggcttgtcttgtaagcttttttcttcatctgaggtgatgtttcatgcaggtgacttggactcaaggacttctttttcttgccccactcagtccccctcccttcccacaaccacttaccccgtcctctaatctggtcctgggagtgctaaggttagccatgtatagtaatttggccagtgagtcttcttagcagaaagagagggggaaagttctaaaaatgtagtttgttaattctctgaactcccccattcttttgatagggaaggcagacttagatgtctaaagctggtactaggttagagctataaattgtactcttgacagaaagacagtaaacctgcctgtgtatctctgagcagtctcttcgctagtgctggagacagccagctcttttcttggtcctaaagtaaggctcattatctatcagccatgttggtaactaaatcaacatcctcctgtgtccccaggagcctttcgagcatgagtcattgctcttgaaccgaaaggatcacaagctaaccaaggctgagaaaaaagcagcaaagaaaagctatgaggaagacaaacgcacatcagtcccctatacccgcccatcgtatgcgcagtattaccctgccagcgatcagagcctgaccagcatccccgccttcagccagagaaactggtgagttgctgaaaggggagggtctgctgctgggccaggcacaaacacctttcaacttgttcatattttaaataaaggcagagcctacaacttgttccttgactgctgtgaattga

SEQ ID NO: 29679 - DNA, 2300 bp, Homo sapien
gtgagaggtgggggaaagaagggacagtctactccagcttcctgtttaatttcttcaaggggaggggccctggggaaacaattttctggaaatttacaaagaaggatagagaaagaatctctgtagtgattccttggacagaggaaggcaagaggagatgaaggccaagtctggactcatgataggggaatctgtgctattgggagataagattgggagtggaggatggttgcagcacatggctgggcgaacaggtttcctcagacctgttacaaggggttggaatgaagaaagtgccttgtagagtaggctgctgcctcctggtggccagccgctgccttgcagggatcctgccaagggacctcacttggcactgttggaagcagcctgaggtgaagctgggcaggctgatgtcatggcctgcagccccagtcaccagcggactctcctcccacaaaagaggtgctgaagctcctgaggcacatgttgaactctgatgtggggctctagagttccccaatcaggctaagggaagtgagcagagagaacaagataaagaatgggcacttccttataatggtttcctgggaaaagctcaccaccttctgagaagcaggagaaatgaccacgcagaccctgcaggcagaggctgtcagtctctgagcccgggccatggctgctccttgtgtcaaaggaaatgctaccaagtgtgtagcccgcctgcctggggcacctaagctgagggtttgaccatgtgcttgatgttcataggtaaaacaactgctgcgacctgcactggcccagcccggagtgcctgtgaggggccagctgcctgttctgccagtttgcctagagggctgggacaggcttggccctgtggataaggttcaaactcccctgcctgcggaaggaagaatgtgaagcagagggaaaggaagctgggattttgactgtctctgtgtgcccagcctgctctttgctggtgcagtagtgggatccacaaggtgaaccaccctgtgactgctgacttttcccaccaccaccttcgtggtgttcccatctgctggatccccctcccaaacatcagtccttgtcaggataccaaagtagctcttggcctcgccggtcttgtagccaagcttatgagcatagttgtcaccttccccacctcccaccaaaagtccgggattttcacgaggggagcgttttatctttgggcccctagaagagtgctttgtagtttgtaggtcctcagaaatttgaggtgaagattgaaccaatcatcaaggagcttacacttgacgtgggaatcacgtaagttaccgctaaaccacaaaggtagaccagcctcccacagccacaacctgggcactgagggaggagcctggaagaagggcattcccatggaacgtgaactccaggagggcagaaccttggttttgttcactctatccccagcccctagaactgtcctggcaaggagtaataataagtgttggatggatgaatatactcacggaagtgggaatgggtgggtggaggcaggaagcagatatttgcgctatgcagaagttggatccaccagtttcttccgcgagcccagactgggcttcagcttcctcacctatgcctttcttggttcccaagtctgttgcgaagccacagtgagagaaagtggcaggactaaaggtggtacaaatgccagaggctgatactgctgtgctgcgcctccctaggctgtacaaattctcctcagccccagctccctggtccccagcctggccctctactgcgggccactgggctgcctcccgtacccgagcctgggccaggctgtcactgtggtgctcctgccaacccagatgccctggggtgttgctaaatcaacctcagcaaccggatagtttgttggaggcgggaaggtacgccgtgggttccgccgcagccagcgctggggctaggcacacgcccgttgccatggagacggggcggggcaggcctccgccctccgggtcccgcgcgcacgcgcccacggccacggccatgtcccgccgcgagagggggcggagcgagcgtgcgcggcgggcgcgcgcaggctccgtaaccgaaccctgagccgcctgcgcggatcggcgtccgcagcgggcggctgctgaggtgagggccgggccagaggagaggcatacccactggggcgtaggtctgggactccccctgtccgccctggcgcgacctcaggactctccgtgtcccctccgtgacccccgcggcccgggccgctctttgcatcttgtcttgcc

SEQ ID NO: 29680 - DNA, 2300 bp, Homo sapien
tgaggctggctaacagcatctctatgggggctttgttcatgtacaactgtgtgtggctgtgtctgtacaactgtgtgtatggtgatgttcatgacgttcatgtataaagctatgtgttttgctatgtgtccacatataaaaacacacatttgctatgtgtcctgcagccgtatatccataattatggccatgtatgtgtggacatgtcttggtggacagctatttgtggcatgtccttgtgtgagcagctgtatatatgtggctgtgtccacatgtgcagccgtgtgtagacatggtcacatgttcttaggggcaggggtgtgcccatgtgtattatggctgtctacaagtatagctgtgtgtggttgcatgtttatgtgtactatgcatgtggccatgtccacatttacaactgtgtaaggctaagtgtatgtcctcatccgtgtgcacacagctgggagtggtggctgcctagctgtgtgtaactgtgtgtccatgtgctgcgactgtgcagcttgtttgctgcaggccacatcatgggcttttctggctgatgctgtacacagccatatctgtgtttacagccctgtgccttttgtgaggctgacttgttgagcaggttgggagtgtggctagaaggagtgtgtgactcctcacctcagcaccctcctgctgtcaacccctctgctccagaggcctggcccattgctcacctaccccagggagctgttgctctgaggcagccagagagggtgagagcagccggtggcagagttggaggtggaagacagcatgtctgtctcccactgccaccttgtctcctgttagtgatggggcttgtgtttgtttgggttttatgtgtctgtttcgtttcaaagctgtattctttccacagcagcaggacatcaggtttctgtgtccagggaaaaagctcgtccttggtgatcacccccgcacccctacggactgccacacgcacatgtgggtgtgtgtgcctgaggggtctgggcttggcatgttcattagcatgtatctgagctggccttgcttccactgacacctgtggaagaaagggcagtgtcgggaatgtgtgtagggatgccatgccccttggcacttgttagtgtgtgcacatgttaggggcagatagcacaggctctctaatccccattccttcagcacagtctggcactacagcttatccactaccctctacccaggggcgtccttccccatcctgctgtgggagggaagagtcaagagaatcttctcagagctgtcctccctctgcttgggctccagctctcactccctcctacgcagcagccagttccagaagcctttccctaggcccctcccctcccagatgcccctgccatccctaacactccctcagggttgaccctagtacttggttctgcagcccttcctgcaggttgctctctccttgcttaaataccctttttacatgggagtgggtggcaggtttaaagggcatctgcaggaaggaaggggaggccccattctcctctgacctctcccttcccccaatcttttcctcatagtgactctggctccaggtctcaaaagtggcagaggacacatgcctccaactcaggcctgggatgtggacccagctgaaatcgctgagtggggagaatagactccacccgtctcccacgcgcccctttacctatcccccagaggcaccccttgcactaaggccagctcctccactctgcagtagcactatgggcacctgtcggggcgcagtgaccttccccaccccgtgccccgtggcatccccccgccccccacctatgctctctaggtggtagtctgactatggggcggagtgggccacgaagcacccgctccagcgcagagcgagagcgctcggggattcagcaccacgaggcggacagctccaggccctgaggtccccagaaaagctggagcgcggagtgtccagaggaggcggaggctgggttgggagcaggagacctggcgtctggaggaacggaggaggggctgggggcgggccggggccgggggcggggcggggcgggccgcgattgaaagcggcggggcgagcgggcgggcggagagcgcagagccagcgagccagcgagcgagcgagcgggagccggagcctcgcgccccccgctccactccgattctctccgcgccagagccagcgcgccaggtagggtgagccggtggtggtggtgccgctgccgctgccgacctttttggcccttacctcacgtcccagggtcctgcgggccctcaagttgtgg

SEQ ID NO: 29681 - DNA, 2300 bp, Homo sapien
gcgagagcgctcggggattcagcaccacgaggcggacagctccaggccctgaggtccccagaaaagctggagcgcggagtgtccagaggaggcggaggctgggttgggagcaggagacctggcgtctggaggaacggaggaggggctgggggcgggccggggccgggggcggggcggggcgggccgcgattgaaagcggcggggcgagcgggcgggcggagagcgcagagccagcgagccagcgagcgagcgagcgggagccggagcctcgcgccccccgctccactccgattctctccgcgccagagccagcgcgccaggtagggtgagccggtggtggtggtgccgctgccgctgccgacctttttggcccttacctcacgtcccagggtcctgcgggccctcaagttgtggggcgcccgcgctgctgtgtccagacagcgttccctgagagctccgggaagcgggaagacagccccgggcgtcccgcctttcttctccagaaaacgcacgccccacatcgcactcccccgttcctcctgctccagcgtcctctggtccttctttctgtctgtgcctccgtctttgtctcaacctctcaggcttgctcgctccctgcccagattttgtggcccaggctcctggctgtctgactccgggtttctgtccccttcctgcctctgagcttccgtctgggcctcccctctgggagacttgcgacttgaccagttttggcttcagcccccatctgggtccctgtctccatctgtgctggtcttcctccctgcttctccctcgcttgcctgggtaagctgctgctttcctgatccccagaggagcccagtgcccctgccctggggagctgagggggcaaaatgaagaggctcagcctccgtggccagcacatggggtccttgagttagttgctgcccttcttcaaactcagtttcctttcctgttctgaggaaagaggtatgtccctctcccagcctttccaagcctgtgtgattgtgagagcctttgtggggtgtgtgtttgggaaggcaactggggtacaaatgattggacgcagtggggaagagacagggagggggtctctgagggccatggctagggtgggcagggccctgaagctgaggatggggagattggaaatggtgactttctctgctgggtcgggagtgaagagaaaacagaggcacaaaatctcaagcagtgttctacacagagctagagagtcccgcactctcaccctcagcactgtttggagactctagcccccaaccctgacacacacatacgtgaacatctgcttgccctgttgacttaggaccttgagccacttgggtaccctccctgaggccagccattccaccttgctgtctcattcccagggcttagtgtctctattccttcctcagtcagcaaactgtggggatggctttttaagaaccaaaggttagaacccttgggtgttcacatgggctccagtctccccacgggttggagactgtcccttagagatgcttcccttcctcttccctggtgggtcctgagacagcagttccttctctctggaaatccaaggctcaggatggggacctctgagtttgtgactgtgacatagtctgttccaaaggtattgacctcggggtcctgggaggtttgtgctgttcttggacaccctttgaattacagaggggtcagcattggctggggtctcctgtcctctgcctgggacttcactgcttgcatctctccccactgctgagtttggtaggggaatatggcccatctctcaccaagctgaggccagggctgagagacaggtccaggggagtcccaggagcttctcaacctacttaatgacaccatcctgtccctccctggcttttgagtacctaggaaaggggctcgtggggaggcagagtcagaaggggcagctgctctcaggttccacttttcctggtctgtttttctgtctttctatctctctgcaggagctgggtcccttcgcatctctcttcttgtctgtcctttcctggtccctgtttcctcctctctttgccttcgctgcttctaatctcatcccctggagacccaggtctgcgggacccatccatcccctttggggccatgggatcgctgcttgcgctcctggcactgctgctgctgtggggtgctgtggctgagggcccagccaagaaggtgctgaccctggagggagacttggtgctgggtgggctgttcccagtgcaccagaagggcggcccagcagaggactgtggtcctgtcaatga

SEQ ID NO: 29682 - DNA, 2300 bp, Homo sapien
ctgtcttttccacacccctcgtcctactatcttcaccctgatatccacccccagccttaactgccctcctcctcttccctacattccccccagggctccactgcagcctccccagtactcatcctaaacatttcaaatgtactctagtgacccctgggcagaaactctgagggggaccagggtctgatgctgacccctcaggccgtggccagaggaccttctgctgagcattgacctgcagcaccaggtggcttttcagtggtcgggatcaggcagagatggtgccggcttctgcagtggctgtgctgactcatcttctgactgcgacaggagagcagtcaaagacatttgtaccccagctggggcctcagaggtaccctcagtgtgtgtcctgctctcccaggaggctgataactgggtgccctgcagacaggacagacacagggagttcagccacagtgagggtgtgtgccctgtccctccaattctactagcctcatcaaagataatcattgataaattttagttgtgtatgtcgtcctaattcccttgttttcatagtacttttatgatatgctcataattatttgtccatcaactcaatttgtttcacttgtactccatatcagtacagagagaacaaagttcttttctgtggtttcattaagtgcttggtttgatgaattttcacaattccgtattccttggtaaccaccaccaaaaccaagatatagcacattcctctttgtttccatgtgctgtttgcaggcaaaacccctatatctaggaattcatctgattcattttctattgttcttcattttacctgttagttttacctgttttagaattttatataaatggaagaacctgtaggccgggcgcggtggctcacacttgtaatcccagcactttgggaggccgaggcgggcggatcacgaggtcaggagatcgaggccaacctggctaacgtggtgaaaccccgtctctactaaaaaatacaaaaaattagccgggcgtggtggcaggcacctgtagtcccagctactcgggcagctgaggcaagagaatggtgtgaacccgggaggcggagcttgcagggagctgagatagcgccattgcgctcctgcctgggtgactgagcgagactccgtctcaaaaaaaaaaaaaaaaaaaaaagaacctgtaggtagtctagcttttttcatttagcatcaagtttctgagagtcatctatgttattctgtgtatgaatatattcatttttgttactattactccattatactaatatgtcacgaatttttgtctagtcacctgttggtggacatttgggttgtttcctgttctgacctatttgaataaagctgctatgaatatccatgcacatgtctttgtaaaatgtgttttcatttttcatttgcaaattttaggactgaaactattgagttacagggcgggtgcatgttgaacttcattaggaagtgccaaaccattttccaaagtgattctgctgtttcacacctttttatcagcagtgtataagagatctacccattctgaatccctgccaggatttagtactgtcagatttctcatgttagccattctcttagggtgtctaggggtatctcattttggttctcatttttatttccctcatgactattgatattgggcatcttttcatgtgcttcttagctattcctaaatctccttttctgaagcatctgtttgagaattttgctgctaattcattctttctcatccttatatggctcaattgtttcattgaactgaaatccatgtgactgaattttgtatttgatggaggtttaggttgtctcaatttttgtttttatcaactagattgaaagcattaactatatacctctttgtgctaattagccagtatttccagtggcttgcttttgtagtcaaattgtggccatgtctgcaaaaaagaatggacaagagttccacatattcgctggaaaagactcagctgttggaagccattctgatgccagagtcataggtgcccttatgacatcatcacactctctcttccttcacacttcctgccacagtggtggctagagaagtacagacctgagtataatggagacctctagcctctaatcatgggcactaaaggggattgcagacttgaagggattgaaccaactactgcaagtcatgggcattcaatgttttgtaagagacaaccagtcaattcaaagatgcaggcaggcggaggtgaattcccacagttaatcaggatgcaagccctgtgtctg

SEQ ID NO: 29683 - DNA, 2300 bp, Homo sapien
agaagtcaagaggtaatatctaaaagagaaaataattttcaatatagcatgttatagaggtaaatcataggagaaatatacagaagagttaaaaatagttgtctcagtgatgggagattcttttgggagagaataagacaggaaatgcatactgtccttttttattaattacaatttttataattaatttataattatgtttataatttttataaatgctagattataattattcataatttttataattaatttatcattgtaagtttttttaaacaaggtacatgaagttcttttttgttggtggtttttagttttggttttggtttttaacttttattttaggttcaggggtatatgtgtaggtttgttatatagataaactcgtgtcataggggtttgttgtacagattatttcatcacccaggtactaaacctagtactcaatagttacttttctgctcctctccctcctcccaccctccaccctcaaatggtccccagtgtctgttgtttccctttgtgtccataataattctcattattcagttcccgcttctaagtgagaatatgtggtacttggtttcctgttcctatgttggtttactaagccactatgagtcctggacagcctgcagaactgtgagacaattaaacctcttttctttataaattacccagtctcaggtatttttttttctttttttaaaggtatttctttatagcagtgcaagaaccgactaatataatgtcttttatcactctgattcctttgtttgtgggatgtgacctatttttttttctttctggaaacttttaggatcttctttttccttgatgttctgaagctacaagatgacttccaataccatgttgaataggagtggtgagagaggccatccttgtcttgtgccagttttcaagcggaatgctttcagcttttgtctgttcagtatgatgttggctgtgggtttgtcatatatggctcttattattttgaggttatgtcccttcagtacctagtttattgagagtttttaacatgaagagatgttgaatttcatcaaaagcttttcctgaatctattaagataatcatgtggtttttgtctgtaattctgtttatgtgattaatcacattttattgatttgcatatgttgaaccaaccttgcattccagggatgaagcctacttgatcgtggtggattagctttttgatgaactgctggattcagtttgcaagtactttgttaaggatttttgcataaatgtttgtcaaggatattgacctaaagttttgttgttgccaggttttggtatcaggatgatgctggcctcatagaatgagctggggaggggcctttcctcctcaattttttggaatagtttcagtaggaatgggaccagctcttctttgttcatctgatagaattcagctgtggatccttcttgtcctgcgctttattttgttggtaagctatttactactaattcaatttcagagctcattattagtctgttcagggaatcaatttcttcctgcttcagtctcgggagggtgtatgtgtccaggaatttatccatctcttctaggttttctagtttgtgtgcatagtctctgatggttatttttatttctgtggggtccgtggtaacatcccctttgtcatttctaattgtaaatgtcttataaaaacatttacattaaatgttaaaacaccttaatgtaaaaggtagaccagaatctaatagaaaaatctatgatcctggatggaaaagcactttattagaaaactacaaaagcagaattgtaaaggggcaatggatttgagcatatcaaaaattaaagataactgtggaaggaaaggcaaccatgaaaaaagttaacaggcagatgacaatctgagaaatgatatttgcacaatttttcctcaacagagagttgcccaaggaagtcaacaggagagccaggtattttctctttatccatcaactttgagcctggaaaaggcactgtggcccctggtcatagttgcctttgtgacatcacggccatctctttctccacctttcctgcccctgccaagatcaggaaacagcaaccagagggagatgatcacctgaaccactgctccaaaccatgggcagtaaatgctgtgtaagactcaggcacacaaactcccccaggggtgggagttgtcccatggcccaggaaagcaccaggccacttcttaggacccaggcaaagaatggggaactgggcctgtggggactttgcagtcaggctggtcctcacccat

SEQ ID NO: 29684 - DNA, 2300 bp, Homo sapien
tcctctgcctaggaaaaccagagacctttgttcacttgtttatctgctgaccttccctccactattgtcctatgaccctgccaaattcccctctccaagaaacacccaagaatgatcaataaaaaataaattaaaaaaaaaaaaaaagaagtttaagaagacctaaataaagacatctgtgtctgtaggttagaagacttaatattgctaaaatgacaatattccccaaattgatctacagatttagcataatccctatcagaattcagctgacttcttttgcagaaattgacaagctggttctaaaattcatatggaaagtcaagggattcagaatagccaaagcaatcttgaaaaagaaaaacaaagtgggagggctcacacttcctgatttcaaaacttactacgaagctacagtaatcaaactggtttggtacaggcacaaacacagacatataggtcagtgaaatagaatagagagtctgaaagaaacccatatatctatggtcaatttagttttgacaagggtgccaagtccattcaatgggaaaacaattgtctttttgacaaattatgccagaacaactcgacatccacatgtaaaagaatgaatttgaacctagcctcactccatacacaaaacttaaaatggatcaaagatctaaatgtaagagctaaagctataaaactcttagaattttaaatcggccaggtatggtggttcacacctgtaatcccagcactttgggaagctgaggtgggagaatcacttgagcccaggagtttgagaccagcccaatcaacatagtgagaccccatatcttaataaatacatactttaaaaaataaaagaacaaaaaaatgaaaaaaataaatagccaggcatggtggtgtgtgcctgtagtcccagctactcaggaggctgaggtgggaggatcacctgagtccaggaaggtcaagcctgcagtgagccaaagttgcaccactgcactccagcctggacaacagagtgacaccctatctccaaaaaagaaaaagagagaaagaaaatcattttctcttagtgttcaaatttgtcaccatcaatatttccttgtatttatttaaatttccctgtggctatttcacctttttcattccacttcattctcttgattacccaggttggtaaactgtgtatctttaaaactggtcttgtcagaatactgccttttaaatttattttccactacccatctttgttttctatgcattaatttaagttttgatctttatttgactgctttccagattcatctggtgtatctttttctagtttcctaaggctttgtgaggcaccgagtcaagggaagagaggaagtgctaaatctcaccagacgctagagagtgatatggggatgcaccgtcatggtcctccctgctttgccatgctgatgataatgagaagggactgtggatggacttcacatgaggagagccctgctatggaatggcactcaagtgctctatttttccaccctcagctctgacacatctctgacaggaggcaagcagacacatggtactgaggagagaggccatttctcttactgtctcctgtctctgaagagaatgaggaagtaaaagctgaagaacaacaggaatgaagtcagtggcaagaccaactggtgccactgaccagacctgagattgaaagattaaccctccccacccccaactctaaccacatgtgctctcaatctatcacaacactttcacatggaccccttagagttgaaagccctaaaaagggccaggtttcacatggaccccttagagttgaaagccctttaaagggccaggaactctttctttagggagctcggttcttgagatgcaagtcggccaatgctcccgggggaataaagcctcttccttctttaacccagtgtctgaggggttttgtctgcagctcatcctgctacagtacaagttcccctggagtttgtttctgacagagacacatctctgtggcagatgtcccaatccctatgtcataatgcaattgtgaattcagagctctctcctcactcacgttactcatgccagaccttgggaagcagagaaatcagggctaatgaaccatctaaggacaggccatgagggttcgattttgtgtaagagacatggccagatctattaggtggaccaggaatgggtgggtatctccctgggctttacaggacttgagaaaagagaggatgttaaagtagtaattgtctttgtatagagccatagagagaaacagtcttaactcattt

SEQ ID NO: 29685 - DNA, 2300 bp, Homo sapien
taccaaaagaacaggaaacaaagaaaaaaataggtaaattcaattacaccaaaatttaaaacttctggccaggcgcggtggctcacgtctgtaatcccagcactttgggaagctgaggcaagcagatcacttgaggccagaagttcgagaccaacatggtgaaaccccatctctactaaaaatacaaaaattagccgggtagggtggcatgcctgtaatcacaggtacttgggaggctgaggcagaagaattgcttgaacccgggaggtggaggttgcagtgagccgagatcatgccactacactccagccaggtgacagagagtgactctgtcttaaaaagaaaaaagaaatttaaaacttctttgcatcaaaagacaaaaacaacagagtgaaaagcaatccatagaacgggacaaaaatctttataaatcatatatctgataaagtattaaaatcctacaacacactaacaggaccaaaaaaacccaattcaaaaatgggcaaagaatttgaatagacatttttccaaagaaaatattaaactgccaacaagaacatgaaaagatgtttttcaccgctaatcattagggaaatacacatcaaaaataatgagatgtcacttcatacccattggaaggactgttatgagaaaagcagagataacaagtattgatgaggaggtggagaaattggaacacttgtgcactgctggtagcaatgtaaaatgttacagctgctatggaaaacagtatggtagtgcactatgctaatgtgttgtccacactaagtttcgcatcaatatggtgacctcctaggagcagggcaccaccaggtttccctagcaggagtgaaccatcccagactgaaaatggagcaggtcaaaattcctgtgctgatcagtagtgggattgcgcctgtgaatagcaactgcactccagcctgagcaacatagtgagaacttgtctcttaaaataacaaaaacaaaacaaaaaaattaaaaatagaattaccatatgatccagcaattccacttctgggtatatacccaaaagaattgaaagtaggatctcgaagagatatttgcacatccatgttcatagcagcgttattcaaatcgccaaaaggtgaaaggatcctagtgtccatccacagatgaatgaataaaatgtagcatatacatacaatggaattttattcagcctgaggaaggaaaatgtgacacatgctacaatatggatgactcttgaagacattatgctaagtggaataagccagtcacaaaatgagaagtactgtatgatttcactcataggaggtacttcgagtagtcaaattcatagagacagaaagtagaatggtggttgtcaggggctaggggagggaggactagggagtaattgtttaatgggtacaatgtttcagttttgcaagatgaaagaagttctggagatggatggtggtgatggttgcacaacaatgcgaatgtacttaatgccactgaactatacacctaaaatggttaaaatagtaaattttatgttatgtatattttaacaccatgtttaaaataaatcgttaaaatgtattttaaaaggttgggcacagtggctcacacctgtaatcccagcaacgtcagagaccacgataggaggactgcttgaagccaggagtttgagaccagcctgggcaacatagttagacccccatctctacaagaaattttttaaaaattaaccaggtgtggtggtgggcatctgtggtcccagctactcaggagactaaggcagcaggaaagagttggaagctgcaggaaactgtgattgaaccactatactccagcctgagcaacagagcaagacccagtctctataaatgaatgaatgaatgaatgaatgaatgaatgaatgaatgaatgaatagcaaaggatgacacagtcttccatgctgcacaaccacagggtgttccatttacatagtctccctagagttggttgacttagtgaccctgaaaccccaactcttctacctatggcagacattgctaatcaatcacaggtcctactcatctcagacggctctcagaatccttctccacatggaaaccaagacaacccctgctgattcctcacagctgacttgtgacatgcctagtatttcccatcattatctcaaacaatgacctcctgaaaatacatctgatgaagagagctggggacacagatatagcagacctggtcattcttttaatggaaggggtatgcattgttgcaccttacaagcctgtaagcccaaagagat

SEQ ID NO: 29686 - DNA, 2300 bp, Homo sapien
tctctaggaagttccaaactttcccacattttcctgtcttcttctgagtcctccaaactgttccaagctctgcctgttacccagttccaaagttgcttccacatttttgggtatcttttcagcaacaccccactctactggtaccaatttactgtattagtccattttcagctgctgaaaagacatactgaagactgggcaatttacaaaagaaagaggtttaattggacttacagttccacatggctgaggaggcctcacaatcatggtggaaggcaaggaggagcaaatcacgtcttacatggatggcagcaggcaaagagagcttgtgcaggcaaactgcctttttttttttttttgagatggagtcttgctctgtcgcccaggctggagtgcagtggcatgatctcagctcactgcaagctctgcctcccaggttcatgccattctgctgcctcagcctccccagtaactgggactacaggtgtcaaccaccacacttggctaattttttgtatttttagtagagacggggtttcaccgtgttagccaggatggtcttgatctcctgacctcatgatcctcccgcctcagcctcccaaagttctaggattacaggcatgagccactgcacccagcccaaactcccatttttaaaaccatcaaatctcttgagattcattcactatcatgagaacagcacaggaaagacctgcccccataattcagtcacctcccaccaggttccttccacaacacatgggaattgcgggagttaaaattcaagatgagatttgggtggggacacagagccaaactatatcacacccacaacttcccacatctttcaatgtattcccatattctccaccccctcatcccattaacttcacatcccagcctcaaatggcctcctcctcttccctacattccccctacagatccacattggcctctcccatactcaccctatacatttcaagtgcacttctcagtgaccccaggggctgtgcctctcatggccttaccctgtccagctgggtcttcagaggccgagatcaggcagaaaggggccatgcttgtgcagtggccaccttcatccatctgattgtggccttgagaccccagggacagaggaagacaggagagcacttggacccatttgagcctcagatggagtccaggctggtcctcaggccctcatggggttccttggggactgtgttaggcatgagtcagcaatttaactctcctctccaaaggtaatcattggtaatagtttggtatatataccttttttcttctttatattcatttacaacatataatgtgtatcatgtaataacttctggcataaattattcaattttatgtgtataattatgttcctagttttgtttgcatagtgggatcaaaaggaactttagttttttacttataaatacatctttatatatttcctcattagtaatatagatcaaattcttatttttaatagttatgtagtattttatagtatgaatgaactatgcatcattaaattaatcccctattgattatttaagttggctatataagttttttcttttcttttttttttttttttgagatggagtcttgctctcttgcccagcctggagtgcagtggcatgatcctggctcactgcaaactccacctcctgggtgcaagcgattctcctgtctcagcctcctgagtagctgggattacaggtgacagccaccacacccagctaatttttgtaattttagtagggacaaggttttgccatgttggccaggctggtctcgaactcctgacctcagttgatctgcctgcctcggcctcccaaagtgctgggattacaggcctgagccactgcgcctggccaagttttttcaattaaatgttattagaaatgactggctttttataaaccttacagcaatgggccagtatttctggcatcttgcctttgaagtcagggctttggccatttctggcagaaaagaatgggcagcgcttttgtctttcccttggagggggctcacttgttaggagccatctggtgcctgagtcacaggtgcccttatgacatcacaggcctttcttcctccacccttcctgcctatgctatggctggatgaacacagatgtgaggggatttgaaccatctacaatcaatccatatgtgaccaatggtaagagaaagccagacacaccaggcttgttagggatgtccccatagatctctcagggtgaagggaccccctgacactgaagactctaagaagccctggaa

SEQ ID NO: 29687 - DNA, 2300 bp, Homo sapien
gactctgtctcaaaaacaaaaaaaaaaagtacattctttccatgagcaaattaaggcaacacatactcaattttagaagcgagttctaaagtcaactcatagggaaggcactaggattctctggtccaagagcctccaacccacagggtcaggcctgacaccatgcctgaccctttgaaaacctgcaagcaaccacacccatcacctgcagaaatgagggaggcatccaaagccctctacaatctacatgcacttatgaccagtcctcctgtttttgtgtgtggtttttttttagagacaggatcttgctgtcacccagactggagagcagtgcatgatcatagttcactgcagcttcaactccctgggaagggatccccaaaccttagcctcctgagtagttgggactacaggtgcacaccaccatacccagctaactttttttttttgtacagacaagatctcgctatgttgcccaggctggtctcaaactcctgacatcaagcaatcctcccgccttggcctcccaaagtgctgggattagaggcatgagttaccaggcccagccccctttcatcttttctactgcccattctggcacacttacacctcagactttcctctgatcactgaatgccttccctacctctccgtgagagactcctcttcatctctcaagaccctatttaaatgtccctcctctgttcccagaacacacaactataaaatacacacctcactacaacacactctcttcacccgcctgcctatctctgcacttccaacagcaaaggcagtgcctggcatgttaagagacggggagcccagtaattgtgaaattgcaggaaaactggcaagggaagaaggatgcaagaaatacttgacagctttgttctgttttcctgcaatttctcaatcagtccagtccctgccaaaacctaaggaggtctcaatggcctcggattggggcccagggtccttcccacccagagacctcgcagaaacaagactttgcaggaccagaaactaaaggaaacagccacgatctcagagccaagggacagagtcttggattctaggctcagttctgttcggactcactcagtcttccgtgcaccatgggactcagttttccctcccactatgtggaaaagaatagctcacctctcgctctcagagtcgctggagatctcctcattcatcttgccgccacccttggatttgcccctgtcccccgcagagtcggcctgggaattatacggtcttttctttggtcaggggtccagaccaccctggcattgaccaagggcccccccccctcggttccctcagaaccccaggaatggggaaggcggtggttcccgggttaagcgaacggctttctaggatttggcccgcggagagagggacgaagctgactccagcaggggtccagggcgaagggctggggaagggccgggacccaggtcccctggatgggatgacggttgtcccagtagcagggctgaccgcggccctcagaagcgccatgctcacctttcgccgccgcttgccggcccccgcgccagccccggccccagaggccggctttccccgcttacgagcagccgctgttgccgacatgctgcccaccaggcgtgtagcagcggccgcagaactcacgtggcagctgaaccctcccagctccccagccgcctggcaagaccccgcgtattgataggcttccaccgcccgccgggccccgcctcctactgctccattgggtccttctgcaggctctgccacgcccccaggcacccataggatgcacgcttgtagccccgcctcctgaagttcctaggctcccgcaccaggctcgagtaggaagcccgcatctccacggcgcttccggcctgatgctgtggcgcttgcgctctgctgctggcccacttcgaagtcggagcaagagccttctctgtgtttgcgccccttggccgctggggggcgccagagacgcggcgccctttcgcgttctggaacgtgactcctcccctccatgggcagcccggcgctagacccaacggggatccaagcagccccggggagagggaggctgcgtctgtatccgggcccaaggtcaccgcgcgaccggcagatgcgtgctgcaggccccggccacatgagcagcgctacggacgcgactgccccggccttggatatgccagatcgagtgtccacccgtccgtgggactggtcgcctgactcggcctgccccagcctctgcttcaccccactggtggccaaatagccgatgtctaatc

SEQ ID NO: 29688 - DNA, 2300 bp, Homo sapien
aaacaagactttgcaggaccagaaactaaaggaaacagccacgatctcagagccaagggacagagtcttggattctaggctcagttctgttcggactcactcagtcttccgtgcaccatgggactcagttttccctcccactatgtggaaaagaatagctcacctctcgctctcagagtcgctggagatctcctcattcatcttgccgccacccttggatttgcccctgtcccccgcagagtcggcctgggaattatacggtcttttctttggtcaggggtccagaccaccctggcattgaccaagggcccccccccctcggttccctcagaaccccaggaatggggaaggcggtggttcccgggttaagcgaacggctttctaggatttggcccgcggagagagggacgaagctgactccagcaggggtccagggcgaagggctggggaagggccgggacccaggtcccctggatgggatgacggttgtcccagtagcagggctgaccgcggccctcagaagcgccatgctcacctttcgccgccgcttgccggcccccgcgccagccccggccccagaggccggctttccccgcttacgagcagccgctgttgccgacatgctgcccaccaggcgtgtagcagcggccgcagaactcacgtggcagctgaaccctcccagctccccagccgcctggcaagaccccgcgtattgataggcttccaccgcccgccgggccccgcctcctactgctccattgggtccttctgcaggctctgccacgcccccaggcacccataggatgcacgcttgtagccccgcctcctgaagttcctaggctcccgcaccaggctcgagtaggaagcccgcatctccacggcgcttccggcctgatgctgtggcgcttgcgctctgctgctggcccacttcgaagtcggagcaagagccttctctgtgtttgcgccccttggccgctggggggcgccagagacgcggcgccctttcgcgttctggaacgtgactcctcccctccatgggcagcccggcgctagacccaacggggatccaagcagccccggggagagggaggctgcgtctgtatccgggcccaaggtcaccgcgcgaccggcagatgcgtgctgcaggccccggccacatgagcagcgctacggacgcgactgccccggccttggatatgccagatcgagtgtccacccgtccgtgggactggtcgcctgactcggcctgccccagcctctgcttcaccccactggtggccaaatagccgatgtctaatcccccacacaagctcatccccggcctctggcgattgttgggaattctctccctaattcacgcctgaggctcatggagagttgctagacctgggactgccctgggaggcgcacacaaccaggccgggtggcagccaggacctctcccatgtccctgcttttcttgggtgagtgtcctatggtcctgcccacggcagggcagggcaaggcctggtgggactggcctttgccctctatcagttcaaggccactgatccggagttctggctcctcagaactcttgagtccattgggaagggcttctacagctctgggttctaagctccgggaggataatctggccccaagaatcctgcccccaggatcctctgcccaccctcccccatagctcggtgactcggcccggcaaccatgccagggctgaactagctgacacagggggaggagccccgaagtggaagagagagagcctcctttcactttccctacccctcaggacacacaggtgagctgcagagggtagggagccaggcagaccctgttgaccagagtgggcagactggacagagtcctaaccttgcacttgggactggggaaaggggtgtttctgagtgacaaagagctgggtgtggtctggggctgggaatgccgtcagagtggacacaggatgcagtgggaggccaccgaagggccaacccggggtggggcaagttggtgctgtgctggcccagggcaggggtggggactgagagtgggtcgttggggatgaggagaccatggaggcctaagggcctctctgtgccccaggacagccatggctccaaagccgaagccctgggtacagactgagggccctgagaagaagaagggccggcaggcaggaagggaggaggaccccttccgctccaccgctgaggccctcaaggccatacccgcagagaagcgcataatccgcgtggatccaacatgtccactcagcagcaaccccgggacccaggtgagct

SEQ ID NO: 29689 - DNA, 2300 bp, Homo sapien
gagagggctctgatggggacaggagtctgacggcagtgggagtcagagggaccctgtcttggaagcttgggggggtcactgctcttccctaggggatgcggtgtgagaggacatggctaaaccctgacatggaggtatggggggtgctgggggggacacagctgggccctggatgggggaatctgagagggacatggctctgccctgaggggacatgggcaagcgcccaggagactgatgtagtcacagcctttccctaagtgcggtgggaggaggcctgcatggggtctgaagggcagatgtgacccgcctggacctgacgggacacagccctgatgtctggggtcaggagaacatggccttgctctggcgcttacctgggggccttgggctccaaaaccagaacagagtcctaagggggtggcctgggtgtgtttgtgcttatcagtgggcaggctctgggcctgactggggactgcagctcacctgggtcccggggttgctgctgagtggacatgttggatccacgcggattatgcgcttctctgcgggtatggccttgagggcctcagcggtggagcggaaggggtcctcctcccttcctgcctgccggcccttcttcttctcagggccctcagtctgtacccagggcttcggctttggagccatggctgtcctggggcacagagaggcccttaggcctccatggtctcctcatccccaacgacccactctcagtccccacccctgccctgggccagcacagcaccaacttgccccaccccgggttggcccttcggtggcctcccactgcatcctgtgtccactctgacggcattcccagccccagaccacacccagctctttgtcactcagaaacacccctttccccagtcccaagtgcaaggttaggactctgtccagtctgcccactctggtcaacagggtctgcctggctccctaccctctgcagctcacctgtgtgtcctgaggggtagggaaagtgaaaggaggctctctctcttccacttcggggctcctccccctgtgtcagctagttcagccctggcatggttgccgggccgagtcaccgagctatgggggagggtgggcagaggatcctgggggcaggattcttggggccagattatcctcccggagcttagaacccagagctgtagaagcccttcccaatggactcaagagttctgaggagccagaactccggatcagtggccttgaactgatagagggcaaaggccagtcccaccaggccttgccctgccctgccgtgggcaggaccataggacactcacccaagaaaagcagggacatgggagaggtcctggctgccacccggcctggttgtgtgcgcctcccagggcagtcccaggtctagcaactctccatgagcctcaggcgtgaattagggagagaattcccaacaatcgccagaggccggggatgagcttgtgtgggggattagacatcggctatttggccaccagtggggtgaagcagaggctggggcaggccgagtcaggcgaccagtcccacggacgggtggacactcgatctggcatatccaaggccggggcagtcgcgtccgtagcgctgctcatgtggccggggcctgcagcacgcatctgccggtcgcgcggtgaccttgggcccggatacagacgcagcctccctctccccggggctgcttggatccccgttgggtctagcgccgggctgcccatggaggggaggagtcacgttccagaacgcgaaagggcgccgcgtctctggcgccccccagcggccaaggggcgcaaacacagagaaggctcttgctccgacttcgaagtgggccagcagcagagcgcaagcgccacagcatcaggccggaagcgccgtggagatgcgggcttcctactcgagcctggtgcgggagcctaggaacttcaggaggcggggctacaagcgtgcatcctatgggtgcctgggggcgtggcagagcctgcagaaggacccaatggagcagtaggaggcggggcccggcgggcggtggaagcctatcaatacgcggggtcttgccaggcggctggggagctgggagggttcagctgccacgtgagttctgcggccgctgctacacgcctggtgggcagcatgtcggcaacagcggctgctcgtaagcggggaaagccggcctctggggccggggctggcgcgggggccggcaagcggcggcgaaaggtgagcatggcgcttctgagggccgcggtcagccctgctactgggacaaccgtcat

SEQ ID NO: 29690 - DNA, 2300 bp, Homo sapien
tgcaaagaaactggcttgatgggcggaaggaacagcaagcagactgctgtggctagaaatactgtgggcaaggaggagggtgagctcagaaagggatggaaaaggtagataaaagggcctagctcccttttatctgccttttttttttttagttccagaggagctgagattctattctcatctattctgatgatgggaagctcttggagggatgagagctgggtcatgcccccatctgctttgtttttagcgggatccacttcagcccctgtgtagagagtggactatagagtatacgtcagttaacaaccagtcagcaaaacagaaattaccctaggtatttcagacaagggaaatttgatacagggaaagaattgaatgaccaaatgggggatgatgaggcaatccaaagatgagcaacagccggaagtcactactactcttaagactggagagataaaggaagtgaatggtgctctgatgccaagaggctaggatcaccctgcaggagccagaaccacagagggggccacctgaagggagcccctggctgagcttcagagggaaataaatcctggcttcttccctcctcccatctgccagtcttctgctggtaactttcattggctgaacatacccaaagtcagttgacaaaggagcctgggaaatacagttcccaggaaggcagtatagcactggggaagaagggaatgaatctgagggcaaacaggcagatggccagcacaaggtgcaggagctgaggccgggagaccagttagaaggatgctgaaatggtccaggtgagaggtggtggtagctgggaccagcttgatggtgatggtgagaaatggcaggattccagagacctcagcggactggatatagggcgtgggggagagggaatcatcctgagatggacactaagatggagaagattctgggaggagcaggttgtcggggagggatcaagagtcatggttctgttttggacataggaagtttgagatacccattagtgaaagtcctggtggggaaatgttgaaaaggcagctggatacccgtgaaaagaggaagaggcttcagatacaaatgcaagctatcagactatagatagggttttgccatgaaactgggtgactttgcctgggggcatatgccccacgggagttacatggctttccatgagccaacgacattggggtggggaaccctgacattcactgattagtcaagactgggttttgtgcctaatcaggaaaatagagtgtggggatcttgttcacccaaatttcctgtcctgagaattggggaggggtggtttcctaaagaaaattcagggtgtttagccaggtgtggtggctcgtgcctgtagttccagctactcaggaggctgaggtgggaggatcgtttgagcctgggaggcagagattacagtgagccaagattgtgccactgcattccagcctgggcaacagagaccctgtctcaaaaaaaaaaaaaaaggaaagaaaattcagggtgctgttaccaaaaggggacctgtttgctagcagcaaaaacaaaagcaaacaacagcaacaaaaaaccaaacagcatctgcctgctaaggcctcctctcactcatctcacacactatcatggagcacctattctctatgaagttaatattagctgagcacctactatgtgccacgttctatgcttttctctcacttttccagcctcctttctttctgagagaactagccctcttggggggccagggcatgcctaagggtcctcctgcttcagcttttgtctcactggtacctcagtttccctttaatatgagagctaaatgctcatcccattgatgaggatggggcaggacaggagatggggggggcacttctcaccactgagaaaggtagagcaggctctggctgactccaaagcccacactctaaccctctcaagtctaggctccaagtctgtgcctgctctgtcctccacccctccaccctagaggcacccccaagcacttccacagcagagcctccagccttcagctggcagctgctaggacccagggggctggcgccaggccctgcccctcccttgccagccgtgtgtggcaacatcagagtgacagccagtaccatctccgacaggggctgagttgctggagctgggctggggcaggggagaaagacagcagactcatccttgcacccctccatgggcctggccaagcccccaagaggatggcagcctgggcgtcggagccacctcctgggcagccaatgaggtgaggggccgga

SEQ ID NO: 29691 - DNA, 2300 bp, Homo sapien
cacaatacaggtgggtttaggtcaggtgaagacctggccaaagttacccactggacttggggcggtgggtctctgctggagacccaggcatcttttcatggcagaagctctagttctggccatgttccagccctcctgccccatttttcctggagccacaagaggtcatgtggagatggtttggggacaatgtcaggtctcccactggttaccatcccaagggggtccttgaaccccagaaaattttggaacttaagaccgaggctctggacaagttgtcagtcctttccaaataggatccctgtcttctagctaggcaaaggtctcagagacgactgaagcccaatccccactttcgaaggagcccgccctccaggaagaggactaacagatccagacaggagcagcctgaaaggggaggcagatggggctttggatagcctcacactagcaatgctagtcccactgtgtcccacctctctgtgaccttgggcaggttactgatcctctccaggcatcaggttctcctgtgtagtgaattcatctgctcagctaaccagtatgttagctgagttccagctgagctcagtatgttctgagcaccttctctggcctggctctgaactgagccctggggacataaggagaaggcagcagccttggctcctgctccaaggggctcctgggcttggctgtccagagaagcagaaaccaagcacgtcatcacaagtgctttgatgggggaagtgcaggcagctgggggaatgtctagcaagggcagccagcatgaggctggccaggatgctcggagagcacagtccctgcatccactgctcatctccagcctctggagtccctgtggcagaactcaaatggaaggaggagcagctgcacccaggggagcagggtgtcacctccgttggataggtgaggaaacaaagaccttatgccatacggtggcttgctgggacttctgagaaggagccaggctgggagcccctttcaccttccgtgctcaagctctgtctagcaaggggagttcagaagagggcgttggacagaactccatgccctttcctgtcatgttgggatggggcagggggctgaggaggaaggcgcccagagacttctggagtgttccaagctcagcacactcatccttcatccccacaccctcctgggcatgaggaatttgcagtgttagggcttggtcttggcccagacttagcaccagttggtcccactccctgttttccccatagggttctggtcccccagtgagctccccatcaaggctgagccttggcaggagacagacgcctaaggagagggatttccaagcaggattaaggttgaggattaagtcggggcatgaaaaagggtcgggtggggagggctggccactgagctaatcccagcagctaatctcaggctccaccttcctccatcagttaatggccttgacattcccgcagcccaccaaatccttttcttacccatcacgcagtcccagggagaggtattccctccattttataagtgaggaaattgagactcagagcccaagtgacttgtttctggtacagtagaaagtgttccaggctgggaatgtggccagcctggacacttcttacctcctgttcccaaggccatttccagcacatagaagagagattggaaaccaacgtgcagaactgccagtcccctgacacgctgtgccccacccactgcagcccagtgctgaatgaaccctgcccagaggtgtctgtagtgagcttctgccctagtgacttttggtaggtgggagtgtgcctcaattcccccctcaacccctgcctcaagcctttaccaggcagtggcaagacctgaccacacccgaggcctccctgccttcaaggcttcccatggctgctccagcttcctccccagctgctcttctgtgctccatccaccatctggctgctggacgaaagtgcctctcatatggagtaagctttcagcctgaactccaccttcagggccccatccacagaggttacctcttccaagaggtcagggaggaggctctcctcctgactcccataggcttcctagttaattatttcttttagtgtctcagggtaagggaaaggctaggtacctaccatgtatgtgcttattgttttaattctcatcactctttggagatgggaatttgtatccccttctacagatggagaagctgaggctcagagggttgaatgggctccccaggcttacacagctcgtgagacacacataagcaccctggtcagagtgat

SEQ ID NO: 29692 - DNA, 2300 bp, Homo sapien
agctgtagcatttctggcacctgccaacttgtcagagctgcctttcccttcctggcactttgtctatgtggcagatctgaatcaagaagccagaggctggaacttgtggaccccaggatgctcacctgaggcttcccactcccctcctcctctcccaactgtagatgattggctatcccgggaggctgggaggccaagaggctgggcacatgtgtccaagatgctggggcagttcttatgaaggcctggctagttaggagagtgagcatctccagagaagggattgggcaggagagttaggagccctcgatgcagacgtgctgtggcccagggtccacccccaccacaccctgcctccctggatgctccgagccattccccagcatcactgggtgtggctagcatggctgctttgggagtgggaataggagaagggggctgctaggtggggagctgggggtgctgagaggatgtggggggatgtgagatggagagtgaagcccaggtgggtccacaggccctagctggtccagacattctggccagcagagcggagggaatcccccaaggggcgggccagtctacttgaatcgcctggccccaggagccctcccctcccccggattgttcttgctccagaacaaaggcagggtggacacttgatccctgcatgtggggtgagctggctaagcccccagccctttgattgggcagctgtcatgggagagagacagctgggggggaggggcaggaagggggcagccaccatcgcttacacagctgtcacccccccgcctcctccagcctgagtggcagaaagccagggacaggaggagtgggcactggggctggggagggggcctgggagtcaggagggaatgcccgaggtcagaggcctggtgtgagcttggtatgccctgccagggagccctgctgaccagagggggctgggcacccgcggaggtgagctggaggtcactgtggcatgttgtgtggctgccacgtgggtggcccggcaaagacccagggcccacccggctggagcagcaaatgactccctagagccccactgagggcagggggagccagtgatgcctcatggggctgctcgttccttgggccctaggagaataatttggaagacatgggtcagaaccccttgttcttgcctaaagatgggaaagaccttgagagtctctcagaccaggaagggcgcagatagaccagcaactctctccctacccccagcccctaaacacaatacaggtgggtttaggtcaggtgaagacctggccaaagttacccactggacttggggcggtgggtctctgctggagacccaggcatcttttcatggcagaagctctagttctggccatgttccagccctcctgccccatttttcctggagccacaagaggtcatgtggagatggtttggggacaatgtcaggtctcccactggttaccatcccaagggggtccttgaaccccagaaaattttggaacttaagaccgaggctctggacaagttgtcagtcctttccaaataggatccctgtcttctagctaggcaaaggtctcagagacgactgaagcccaatccccactttcgaaggagcccgccctccaggaagaggactaacagatccagacaggagcagcctgaaaggggaggcagatggggctttggatagcctcacactagcaatgctagtcccactgtgtcccacctctctgtgaccttgggcaggttactgatcctctccaggcatcaggttctcctgtgtagtgaattcatctgctcagctaaccagtatgttagctgagttccagctgagctcagtatgttctgagcaccttctctggcctggctctgaactgagccctggggacataaggagaaggcagcagccttggctcctgctccaaggggctcctgggcttggctgtccagagaagcagaaaccaagcacgtcatcacaagtgctttgatgggggaagtgcaggcagctgggggaatgtctagcaagggcagccagcatgaggctggccaggatgctcggagagcacagtccctgcatccactgctcatctccagcctctggagtccctgtggcagaactcaaatggaaggaggagcagctgcacccaggggagcagggtgtcacctccgttggataggtgaggaaacaaagaccttatgccatacggtggcttgctgggacttctgagaaggagccaggctgggagcccctttcaccttccgtgctcaagctctgtctagcaaggggagttcag

SEQ ID NO: 29693 - DNA, 2300 bp, Homo sapien
ttgagcacctgaagcagctgcccaaccaccgggtgctgatcatgaagggggcggggcacccctgttacctggacaaaccagaggagtggcatacagggctgctggacttcctgcaggggctccagtgaagcccagcactgctgcagggggtgggctgcctgcctgctctgagctctctcttgcacgctctctcttctctcccaggctctggctcatgcacatgcaacaggtgcgtctgtctatatgtctgggttcttgtcttttgtggtctgtttgtcttttctacctctttctcttgcagtgatagactgagggggtaaaatcaagagaaaaaactctcaggaatcaaggaacataatcctgtggagggtaatccattacatgagcttctcctgttcttccactttcctgcctggctttcactccttcccctgctctgcccagcctttccctcccacccactcctccttctgcaaatgccctgaaggccagcccttaccccaacacccacttccccacctccttaggccccagatacatacatgcccacatgcacgcttacatgtttagagccatccttgtttccaaatatgacccttcgcttgagggcaactgcataggtacatctaactctggactggcatgcacattgtcatgtgcagctttgcatatacacacatgcatacatgagcctccacacaagcacttgcacacatgtggactcctaaccatgctaacctcactggctgggaaggtggggaccccatgggccagcccttgcaggaggcccttttgcaaggcttagggtgtggccagccctgaaagctacttggacacaggtttcagctggccccagcccagaagtgacccccagaaagggagggccaccgctttgccccctgcttttacccttccttctgggtgctctacacctcaggttaccaggcctgaggcatctcagccaagcttgtttcctgctctgaggcttgtggggtgggagccagagtggaggtcggtgaaataaagtgatgcaattagaccccaccggctcctgcttctaaagagcgccgcccctcccccacccctgggaccaacactgtgggcccctcccccaccccggcgggaccagatggtccccctgccctttgtccaccaggccagatggagaggaagggagattggattcccctccccacccacacatacccaggtgccaagagactcagctgtggggggaggtggaggtcagtgggaccaggctgagccgattatggaggagtgggggggaaggaatagttgcttccccgagggcggggggtgcccagcggacttgagaacagttcatcacccccactagtatcccttccccagtaaaagactcaacggagcccgttccttgcgaccctatccccaaaaggaattccgggggtagatttggggttatcacaggatcgggtgcacagggccacacggctctcaggcccctcctccagcctgtcctgcgcggacgagggccgggccatgcagctgtgggtggccgaggagagcgggtcttggtgggcgcaagcccgagcggaggatggcgcgcagcgagcagagccgggagctaggcggggcgcagggtcccagccggagctcggagggacgcgggccgggagcgaggcggagccggggctggcggggccaaggcggggatgggggtgcagggggctcggcagaggcgccgggcgggcggcccgggccggaaggactggcctggcgggagcggaggggcttggagccgggcgcagcgcgggcggtgcggggaaggccgtggctggggaccgggcttcaggccggacgcccctacccccaacccgtggggctctgggagtggcaggggaagggtcgcccgagccctccaggaagcggccgccgctcggggcgcaccgcggcgcgcggggcggggcgggcggctgcggcactggggcggctggggcgggcccgccgctctgtaatcggatccggggagggggcggggaggggccgggccgggcgggccggggggtggggggggggcgcggagccgggctccgggccggccgggctccgcgcctgtcaaacccctcattgttcgcagctgatgtcactcgcagttgtgagcggccgcctctcccggggacaatgtgggactgagcggcccagccgccgtgccgccgccgccgccgccgcaggacagccccagcgaggtagggcgcgggccgggcggggcacggcgggccgcgaagtttgggggttcgcccgggggcagggagcccgcg

SEQ ID NO: 29694 - DNA, 2300 bp, Homo sapien
cctgggttcaagcgattctcctgcctcagcctcccgagtagctgggtttacaggcgtgcgtcaccatgcctggctaatttttttttttttttttttgagacggagtctcgctctgtcgcccaggctggagtgcaatggcacatctccgctcactgcaagctccgcctcccgggttcacgccattctcctgcctcagcctcccgggtagctgggactacaggcacgcgccaccacgcccggctaattttttgtttttttttttttagtacagacggggtttcgccgtgttagccagggtggtctcgatctcctgacctcgtgatccgcccgcctcagcctcccaaagtgctgggattacaggcgtgagccaccgtgcacggcctaatttttatatttttagtagaaacggggtttcatcatgttggccgagctggtccggaactcctgacctcaagtgatccacccaccttggcctcccaaagtgctgggattacaggcgtgagccaccgcgccggaactaaaagcccattttcttcggtttttttttttttcttttttttttttttaagagaagatgtctcgctctgtcgtccaggctggagtgcagtggcgcaatcatggatcactgcagccttgaccttcctgggctcaagtgatcctcccggctcacccccagtagctggaaccacaggcgcgcttccacaccggaaagcccattttctagaggcggaaaccgaagcgcccagtgggaaaggcgacccgccggggatgcggggtgctcaacgcgctgccacctggggcccaacgcgttgacctcgcggtcaggttgcttccgcggactacggttctggctcgctagctctggaagggagcaccgggagggaatggtggcaactcccaaggaggggacccagggatccgagaaaggaagacttggggtaggtggggttggattttgactggagagaagaaagggtcaggagtgcagggcgggtacctggggagctgcgtggactcgcgcagacgggaagcaggcgcgtgctggcggtgacctggggccggaggaggaacgctgggaagaggccgggccccatccagcgggggcggggactgggccgtgctccggggcgccctcttgtggccacaagctcgcagcgtccatagactccgctaaactcgttctcacagcggcgtcagtttcccaaagcctctcggtctcacatgccccaaacgcggtgctgagcacggtttcgaactcttcagcgacctgccccacatggacatggagcagtctgaggaggaaagttccttcgggatcgcatccttgctgctgtcttcctgctccccatcccccttatccccagcttgaactgcccagggcaacttgttggcctggcacggagttgaggcccgacaggtttgagtgcgaggctccgccagtgtccagccaagtggccttgatcgttttcccaatgcccccgagcctgtttcctgccagtagagcgggtcagatgttgccaacctctgcagagtagcaataagcagtaaacgccacgctctgcacagcctcccagtgctgggcctggtcgccacgcggagccttgggctgggacaggccagacgttggtaacacatcgccaaccagggcaggcgccatgagtagacgtgaacgagcccagggccagcccaggctctgaccgtgggtgtgcgtcggggagggggtggggaggagtgggtaggagtcaggaaagtgggtcggccaagacctggagctgctgcataacaatatctggcatttacacaacgaggcctctgctccggacactgttctgaggcttgacccgtccttaagaacctaggacaaccctgtgcggtgggttttatccttaactccattatacaggccagagaactgagccagggtggagatgttccactgagaagaagccacatggctctccgccggctctcaagccaaaaacagttccgaaaatctgggcggggagcgggccagagagcgctggggctctgcccccagcaccccctccacgcagacgactcggtaactgggttgcaggcccgcggctgcggagtgcgcaggcgcgccgagatggccgcgctcctggccgcctagagccggagcggcccgcggagctgcggaggcagccatggtcggggcgctgtgcggctgctggttccgcctgggcggggcccgcccgctcatcccgttgggcccggtgagtctcccgggggagggaggccggccggtggcccaggggagggccgtctttaccccgccc

SEQ ID NO: 29695 - DNA, 2300 bp, Homo sapien
cgcgtctctaactgggcgttagtccagattcccaccgggcgcgagggacatttccttgctgcccactcggggcgcccccgcgcttctccaaagcgggaagggcggggcttaggctgttgccttggcaaccgagggtgcccgcagtactaggaaattgtagtggacctgcagctggccgcctgcgggggtttgcggggggcagggtaaactgtgcccgggttaggtcattggaatatgcgttgacaatgacacacaggtgcacacacgcacaaatacgagtcttgcccccacacgcttttcttttgcacaagctattccctgcatgtacatgcagcctctttgcacacacactggcccgtgtgcaattaatcccttgtaatggtaccctctacatcacgcacacagtcaggcatcaggaagccagagagactgatggagatgcacactttgaaaaccacaggctgatcctcagaaatactcaagcacggtcatacacacaaccgtaagactacacattcacacaagaaaggcacatgcacaggaaagcagacacgcacacacacacaaacccccagaaatgcacacacgcagacaggtagacacatacccttaaaatcacacgcacacagaaatacactcggaagacataacgctgacacaagcaggcagacatcaacgaacacaccccccccccaaaaatataagcgcgcagaaacccactgacggacaccatgcagacacacaagcgtacacatacacccagacccccaagaacatatgcagaccctgcgcgcgcacacacattacacgcgcgcacatgcacattcgcggccccagcgtctgcttcttccgcgggactctgccccggggcgccggggcaaggggcggggtaaagacggccctcccctgggccaccggccggcctccctcccccgggagactcaccgggcccaacgggatgagcgggcgggccccgcccaggcggaaccagcagccgcacagcgccccgaccatggctgcctccgcagctccgcgggccgctccggctctaggcggccaggagcgcggccatctcggcgcgcctgcgcactccgcagccgcgggcctgcaacccagttaccgagtcgtctgcgtggagggggtgctgggggcagagccccagcgctctctggcccgctccccgcccagattttcggaactgtttttggcttgagagccggcggagagccatgtggcttcttctcagtggaacatctccaccctggctcagttctctggcctgtataatggagttaaggataaaacccaccgcacagggttgtcctaggttcttaaggacgggtcaagcctcagaacagtgtccggagcagaggcctcgttgtgtaaatgccagatattgttatgcagcagctccaggtcttggccgacccactttcctgactcctacccactcctccccaccccctccccgacgcacacccacggtcagagcctgggctggccctgggctcgttcacgtctactcatggcgcctgccctggttggcgatgtgttaccaacgtctggcctgtcccagcccaaggctccgcgtggcgaccaggcccagcactgggaggctgtgcagagcgtggcgtttactgcttattgctactctgcagaggttggcaacatctgacccgctctactggcaggaaacaggctcgggggcattgggaaaacgatcaaggccacttggctggacactggcggagcctcgcactcaaacctgtcgggcctcaactccgtgccaggccaacaagttgccctgggcagttcaagctggggataagggggatggggagcaggaagacagcagcaaggatgcgatcccgaaggaactttcctcctcagactgctccatgtccatgtggggcaggtcgctgaagagttcgaaaccgtgctcagcaccgcgtttggggcatgtgagaccgagaggctttgggaaactgacgccgctgtgagaacgagtttagcggagtctatggacgctgcgagcttgtggccacaagagggcgccccggagcacggcccagtccccgcccccgctggatggggcccggcctcttcccagcgttcctcctccggccccaggtcaccgccagcacgcgcctgcttcccgtctgcgcgagtccacgcagctccccaggtacccgccctgcactcctgaccctttcttctctccagtcaaaatccaaccccacctaccccaagtcttcctttctcggatccctgggtcccctccttgggagttgccaccattc

SEQ ID NO: 29696 - DNA, 2300 bp, Homo sapien
gcctgcttccttccaggagtccagcaaacacatctttattttatttttatttttctgagacggagtcttgctctgtcgcccaggctagagtgcagtggtacaatctcggctcactgcaacctccgcctcccgggttcaagcaattctcctgcctcagcctcccgaatagtgggattacaggctcccgccaccgcgcccggctaatttttgtattttttagtagagacagggtttcaccatgttggccaggctgttctcgaactgctggcctcgtgtttcacccgcctcggcctcccagagtgctgggattacaggcgtgagccaccgcgccgggccagcacatctttattgagtgccaactgggcgcctgcccgaactaggagccgggggcccgtcttggttcctattcatccctccgggatgttttggggatgtttcctgagcccgcatccccaggcttcggggtcggggggcttgtgagccacagcagcagccgcctttctgctgtttctggaaaaccaggacctagtggaggaagagcgcgttcctcttttcttccagaccactaacaacctcagacgcgcgtctctaactgggcgttagtccagattcccaccgggcgcgagggacatttccttgctgcccactcggggcgcccccgcgcttctccaaagcgggaagggcggggcttaggctgttgccttggcaaccgagggtgcccgcagtactaggaaattgtagtggacctgcagctggccgcctgcgggggtttgcggggggcagggtaaactgtgcccgggttaggtcattggaatatgcgttgacaatgacacacaggtgcacacacgcacaaatacgagtcttgcccccacacgcttttcttttgcacaagctattccctgcatgtacatgcagcctctttgcacacacactggcccgtgtgcaattaatcccttgtaatggtaccctctacatcacgcacacagtcaggcatcaggaagccagagagactgatggagatgcacactttgaaaaccacaggctgatcctcagaaatactcaagcacggtcatacacacaaccgtaagactacacattcacacaagaaaggcacatgcacaggaaagcagacacgcacacacacacaaacccccagaaatgcacacacgcagacaggtagacacatacccttaaaatcacacgcacacagaaatacactcggaagacataacgctgacacaagcaggcagacatcaacgaacacaccccccccccaaaaatataagcgcgcagaaacccactgacggacaccatgcagacacacaagcgtacacatacacccagacccccaagaacatatgcagaccctgcgcgcgcacacacattacacgcgcgcacatgcacattcgcggccccagcgtctgcttcttccgcgggactctgccccggggcgccggggcaaggggcggggtaaagacggccctcccctgggccaccggccggcctccctcccccgggagactcaccgggcccaacgggatgagcgggcgggccccgcccaggcggaaccagcagccgcacagcgccccgaccatggctgcctccgcagctccgcgggccgctccggctctaggcggccaggagcgcggccatctcggcgcgcctgcgcactccgcagccgcgggcctgcaacccagttaccgagtcgtctgcgtggagggggtgctgggggcagagccccagcgctctctggcccgctccccgcccagattttcggaactgtttttggcttgagagccggcggagagccatgtggcttcttctcagtggaacatctccaccctggctcagttctctggcctgtataatggagttaaggataaaacccaccgcacagggttgtcctaggttcttaaggacgggtcaagcctcagaacagtgtccggagcagaggcctcgttgtgtaaatgccagatattgttatgcagcagctccaggtcttggccgacccactttcctgactcctacccactcctccccaccccctccccgacgcacacccacggtcagagcctgggctggccctgggctcgttcacgtctactcatggcgcctgccctggttggcgatgtgttaccaacgtctggcctgtcccagcccaaggctccgcgtggcgaccaggcccagcactgggaggctgtgcagagcgtggcgtttactgcttattgctactctgcagaggttggcaacatctgacccgctctactggcaggaaacaggctcgggggcattgggaaaac

SEQ ID NO: 29697 - DNA, 2300 bp, Homo sapien
ttatctgtaaaacgggtatgatggcaacacctaggttggagggtggttataggactgaatgagtctggataactgagtacttggccacataaggctggggaattgctggtgggaggcggggtgtattactgctgctgcatgaccacagggattggtgggaaatccagggtctggacagccaagccaaggaagtcaggaacctagagggtatggggaacgcgatttaacaattagccagcattggccgggcgcagtggctcacacctgtaatcccagcactttgggaggccgaggcaggcggatcacgaggtcaggagatcgagaccatcctgactaacacggtgaaaacccgtctctactaaaaatacaaaaaattagccgagcgtggtggcgggtgactttagtcccagctactcagtaggctgaggcaggagaatggtgtgaacccgggaggcggagcttgcagtgagccaagaccgagatcacaccactgcactccaccctgggtgacaaagcgagtgagactccgtctcaaaaaaaaaaaaaaaaaaaaaaaaaaaaaaaaaaaaaaaaaccagcattagctgggcactgtggctcacatctgtaatcccagcaccttgggaggccaaggcgggtggatcacctgaggtcaggagttcaagaccaccctggccaacatgacaaaccctgtctctactaaaaatacaaaaattagcccagcgtggtggcacgcacctgtaatcccagctactctggaggctgaggcaggagaatcacttgaacccaggaggcggagttttcagcgagccgagaaggagccactgcactccagcctgggcagcagagtgagactccatctcaaaaaaataaatagctaaataattagccagcattgttatgagttaaagtctatttgcccgcatgaataaataggtaaataattagccagcattgttgtgagttaaaatctatttgcccgcatgacagagtgagactctgtatcaaaaaaataactaaataaagaattatccagcattgttatgagttaaagtccatttgcccccatgttatgtgtgagcagccaagacttaaacctcaggaaaggtgggacagaacccttcccacagcgtgcctccttggcctagagattgaagtctttgtccctcacccttccccaagctgactcagcccctggagcagagggcagacctggctgggagtacaaagggcagctggggcacaagtgggcaactgcagctgtggcctgcagggggccagtggtacacctgtgcctgtttagcctccccctctggtggctgcagaagagccagtttcctcacactgtccatccagggtcacaattacatccattcacagtgacttcatcacacccacccaccatctcacactgtcacatacacaatcatatccactgatagactgcacacgcagtggcacgcttaaaccgtcacacgtgctcttgtccatgcattcattcccattctaggcactgtccgggctcggcacggccccgggcagaaccttgcaggaagtggagctcacagcctcctggagttcagtgtgggcagacagacattggccaataacttcagtacaagtggagctgaggcgtcagggaggacctccccgaggggctgaggcctgcagtggggagccgttggagacttgccgaggagggcgagggcgcaggcccagggctttgcagctctgcatcttgagagcctcggggcggccccctttcctcccgccctatccgggggctgaaggaggaggcgcccttaggggacgggaccgtcctgagctcccggcgcatacctgggggcaggagtggcaggcgtgtcgtgtggggcggggcgagcctgtcagagcagggccagcccggagctcgcaactcgcggggcggcgctggccgcggcggccgctgcccggggacgggatccggatctaatcctccagtaatctcgctgaggcccgaaccagaggcgggcggggacatccgcgccgacgcggccgctggcgccgggacggccctcactgacggtcttcggtctccgccccgacatccggcctcggccacgtggtgggcggaccggggcggtcctgagcctgcgacctcgcaggcgacctcgctggaccctaagtccaggccacagtcagggaagggcgctgagaggcgagcgtgagcccagcgacaggagagtgaggtgggggccctggggagggatagagggactggggctccgtggcttgaaagccgggcaactgggaggcgttgg

SEQ ID NO: 29698 - DNA, 2300 bp, Homo sapien
gtccccaaggcctgcactgcccacctccccagccccttacacaccttgaagacaggcaccacatccgtgtgggagttgagcaagatggaggagagtgtagggttggtgcctggccaggtcaacacggtcaccacatagccaggtgccacctggagatggtcaggagggtaggtggtctgagcagggtgaggaagtgcccaggcccacctcccttccccgcttagggccccaggctcacctctactttctgacagcccaggcccagctggcgggctgtctcctcaaagaaagccacagcagctcctggaggcacagagtgtcttggggctgcttctgcctacccacagcttcccaccagcccaggcagcccggagagtggagcatacccagaaatgggctgctgcctccccgacacactccatatccctcagagatgcttgcatttccatccccaagaaagaagatatttttggctactcagtgaccctttctggaagtccagggggatgtctggacacagggttggaggaaggtgttatcttccttaaatatgggaaactatggcacagagacatgaagagattcacccaccatctctcagctgattaatcacagaggaggaatttggacccatgtacacaattcccagccactaagttttttttttttcttttcctttttttttttttttttttgagacagggtctcactctgtcaccaaggcaggagtgaagtggtgcgatctcggctcactgcagcctcaacctcccaggctcaagcgatcctcccacctcaacctctggagtagctgggactacaggtgtgccaccattcctgactaatttttgtattttttctgtagagacagagtcttgccatgttgctcaagctagtcttgaactcctgggcccaagcaatctgccagcctcaacctcctgaagtgctgggataacaggcaggagccacctcccaggccctagccaccaagcttgactccctaagggctgtggcctttgtccagccccagtgggcttctggagggcctctcctttccctgtggctgcctcaggcttcccccaccactcctgccctggagagtgaggtgaagtttttctttaaccagctgccaggagtaaccttggtcagcagcagagtctctggggaaagggttcctccctaacctggaggggctgcctcagtctatttacttggggaatggctggaggggttggggagccatttgggacagcagagtggggctcagctgggtgacaggggttggaggctggtttagagcacagtccccgtcccttaggccccgtcacaggctctggaaccaccgtcttctcaccatagtcaggcttgggctggacagtgcggatacgcaggtactggcggaagagcgtcaccgatgggtgctcctcctcgggacccttgctggtcatggcgctgcgcgtggtgagctgggggcaaagtgaatggctaactacccctccaagaccctggaaatggtgagctcctgcacacagcctgtccccacggcggctcccggacttcccacaggggtaggataccgtgtttcggagcccccattaaggagcacccattctgtttcaggcgctgggctgtctgcttccagcacatttccttatttaatccccaaaagagccccatgaagtttgtgctcagaatgcccactttacagaggagaaagctgagaggctcagagaggttcaaggacagctcatagagtagctgagcaaggtttgaacccagacttgtactccccccgccctcctaaaaaaaaaaaaaggcaaaaacaaaaacaaaaaacaaacaagaaaaaccccaacgcctcccagttgcccggctttcaagccacggagccccagtccctctatccctccccagggcccccacctcactctcctgtcgctgggctcacgctcgcctctcagcgcccttccctgactgtggcctggacttagggtccagcgaggtcgcctgcgaggtcgcaggctcaggaccgccccggtccgcccaccacgtggccgaggccggatgtcggggcggagaccgaagaccgtcagtgagggccgtcccggcgccagcggccgcgtcggcgcggatgtccccgcccgcctctggttcgggcctcagcgagattactggaggattagatccggatcccgtccccgggcagcggccgccgcggccagcgccgccccgcgagttgcgagctccgggctggccctgctctgacaggctcgccccgccccacacgacacgcctgccactcc

SEQ ID NO: 29699 - DNA, 2300 bp, Homo sapien
tctgaacatcagaaggaacaaactccagacacgccaccttaagagctgtaacactcaccatgagggtccgcagcttcattattgaagtcggtgagaccaagaacccaattccggacacactgggattacaggcgtgagccaccgcgcccggcctagactggcttgcttttcattgaacccttacagcagtcttgtgatggaagccgggtcccactagtgatgcaggaacaggctccattggccgggtgcggttgctcatgcctgtaatcctaacactgtgggaggctgaggcaggcggattgcctaagctcaggagttcaagaccagcttgggcaacatggcaaaaccccctctctactgaaaatataaaaaaagtagccaggcatggtgccatgtgcctgtggtcaagaggctgattctggagaattgcttgaacccaggggatggaggctgcagtgaaccgagatcacgccactgcataccagcctgggcgacagagcgagactctctcaaaaaaaaaggaaaaagaaacaggttccactaatatagtttgccccagacaacagagcttggaggtgaaggagttgaaactcaagaactgggaatttgtgcttcctgagcacaaggcaggttccatgtacaagctggaggctgagggtagcagttggctgtaaccttaagcccagctgaagccctgacctggcctcccccctcagaccggaacttggtaaagggatcactcctttttcatggcaggatggctggggaaaggagaaccttcacaccccatgtccaggacaccagcacagagacctcactttggaagtcatcaacctggtggcctgtctgggccaaaccaccttcagaacacagaacctgctcttgctccctttcaaacccacctccacctgtcatgccttggcaaggggcagttggccacccagagacttccaggattacagtcaagagctagcagccccagctctggttgggcaattgaaacctcctagggccccacatggactgcctagatcaaatgctacccccaccccttcgtaggttcattatcttcaatattttctcacccgtgaaacaaagataatcataatacctacttcagaagtaggggatcacatgccatgggctgcacctgcagctgtagcataacagcacccctttaggagtttctaaagtgtccgaggttggaccaaggctggttttgaggattaagtgcggccaggaagtgcccacgtggtgccttctataggcagcctccacaaaggcttactattacttcagtactttcttcactgactgctgaggataaagacctccatgtgaagcagctgacccaggggcacagaagggtcagaaccagtcacgggagtaaggcagtgccactaccacctgccttcctgggtccctagctgttgggggactaacatagcccagagcagtggatgctgaccaggtgcaccaaaagagcccaaatctgggacacctcaggccagagtgcagagctgctcagcggggccccttcccctcccttgcagtaagctttaagacctcatgaggatgtttaagatttctccctttgggccaggagcactggctcacgcctgtaatcccagcactttgggaggccgaggcaggcagatcacaaggtcaggagatcaagaccatcctggctaacacagtgaaaccccatctctactaaaaatacaaaaacaaaattagccgggtgtagtggcaggcacctgtagtcccagctacttgggaggctgaggcaggagaatggtgtgaacctgggaggcggagcttgcagtgagccgagatggcaccactgcactccagcctgggtgacagagcacgattctgtctcaaaaaaaaaaaaaaaaatttctccctttgctcggcaggttacacagtccagcaagctatgtgcccgagcttcccaaaagcccccaatcatttctcattcattaggtcctcctcttgcacttcagggccccatctcctgactcccacccacaccccaccatccagacccatgtcttctcccacaccaacagatggagcaaccaaacccatccccaggatcatagacagaggctaacaaatcctgcctcaggtttatttgtacaaatagcacaggaggaccccagccccatgcagatggtagcccaggggcgggggtggggggtcgcaccagtccttctgtcctcatgttggcagagatatctactctgaagcctttgtaggggcctgggtacgtttgggagcctgagctggaactgaag

SEQ ID NO: 29700 - DNA, 2300 bp, Homo sapien
cctggcttgtcaaggaacgttcactgggcatgtgtttattaagctcttgctctatctacattatgctgagttaggcagtgggaaaatgaaggtgatcaaaccagtcccaaactctgggctcctatgataatggacacatacacaactaagtaaacaatgcaattagagtctgggaaagttctataaagaaagcaaaccatggccgggcacggtggcttacgcctgtaatcccagcactttgggaggccgaggcgggcagaccacctgaggtcaggagttcaacaccagcctggccaacatggtgaaaacccgtctctactaaaaataattctttaaaaattagctgggagtggtggtgtgcgcccgtaatcccagctactcaggaggctgaggcaggagaatcgcttgaacccgggaggcagaggttgcagtgagctgagatcgcaccactgcactccagcctgggagacagagtgagactgtctaaaaaaaagaaaaaaaaaaaaagaatagaaaagaaaggaaaccatgagaggacacagaatcactggtgagatgaggcagtggttctctattttagataatggagtccagggaggcctctataggaaagagcacaccatccaaaaagcagggagaagggcagtccaggtggctgggatagcaagtgcaaaggtcctgaggcagaacacacatttgtggttggcaggaaagaaaggcaatgcgtttggagagaagtaaatgacagaggttgtcagggtcaagtgggtaaagaattgatcttcaatgcaaggggatgtccttgcagatttaagggacaggatctgatttgtatcttaaaacaagtccccaagccccactgccgtgtggaaaatgaactatagggggaagaggtggagaaggcaacagagttgttagaggcaacaatttctcaattctgatgtccaacaggcatctcacatttaatgcatccaacaaaaatatctggctcatcattccccctcaaaacaaaacaaacaaagcccctgctccccactcaatcttccatctctgtaaacagcccaccattcacccagttgtcaagccaaagacataggggctatccttgcctcctttttctccctcatcttctgtgtcccaagtccagtactctttctttgtccactcctctgcattcccactgtcctccctcaggtccaggcagccctctctccttcctcccctctgctccttctccacgaaagagtcaggcgtgcttttcttttttttttttgagacagagtctcgccctgtagcccaggctggagtgcaatggtgcgatcttggctcactgcaacctccacctcccagattcaagcaattctcctgcctcagcctccagagtagctgggattacaggcacgtgccaccacgccccgtgaattttttttttttttttttttttttttttggatttttagtagagatggggtttcaccatgttgtccaggctggtctggaactcctgacctcgtgatccgcccacctcagcctcccaaagtgctgggattacaggggtgcttttaagaacacagatcggccaggtgcggtggctcacgcctgtaatcccagcactttgggggacagaggcgagcggatcgcgaggtcaggagttcgagaccagcctggccaacatggtgaaaccccgtctctactaaaaatgtaaaaattagccgggcgtggtggtgggcgcctgtaatcccagctactcgggaggctgaggcaagagaatcgcttgaaaccggaaggcggaggttgcagtgggccgagattgtgccactgccctccagcctcggtggaagagcgaaactccgtctcaaaaaaaaaaaaaaagaaaaagaacacagatcttcttgcccaacaacatccctcaaggactcctttctttttcagtatcttgaataagacttaagagacaggtcctggagaaacagagaagggaggaggcagcctgaagggggcggaggcaagctcgtagcaccgcctccacgtctggcttgcgttcttccgggcttcggaacttttcttcgcggagcctggggaagcttttccagtagtactttccggcgttgttgaccctatttcccgtgctgcaccgcagcccctttctcttccggttctaggcgcttcgggagccgcggcttatggtgagtgttggccgcgcggcatccgatgccatccgcgacttacgggtggcggcggggcgcgggctgcggagaggactggtgaccgaccgtgtgtctgtcgggagcaaaagctgc

SEQ ID NO: 29701 - DNA, 2300 bp, Homo sapien
agtgctgcctccatccctgacaagcagcatccagcctgccagccgagaggcctgtcctcagaccacgtcctcccagccggatggattcatagacggattgggctcagtccacactagcactctcctacactgggagacccaaggcccagagggaagaaccatactaaggtcacaggacacacctgcaagtggcaggacagaatctgggtcttggcatcttgggccctggaagctctttccacaggcccaggacccccaggacaaccttgggcggagagttgcttctcctttcacactctgagaatgtgactgtgggagagacccctgctcctttgggatacagccctgtggcccaggatgaaactcttccgaaagactatccctcgcttgaaagacaggcggggactgctcctgagtcaccccttttcgtgccttctggtcagaggttagcggaaagctcaaatcctcggggttccagaggccgtccctcaagcaccaccgctcccccagtcagggatgggggcaaggtgtctcagagccgaccagcctcgggcggagtcggggggttaagccccaaggaggggcaccccgccaggcaaaagaatggaccagatagacggcagggtccagcctcaagctgccaccctggctccgtagggaaagcactgcaggtcctacgcaagcgcgccgcctgcgtctagccgctttgttctagcgctacctgcgggtccattcacctccgctgccccgcctgcctgcaaatcgacacacagggcgggcggaggccccgcccacttccccgccctgggtggaaaccgcggcgggccccgcctccctccgccaccgcctctttcggccaggattggccatctgcatggcaggcgcccgcctaccgcggaagttgattggtccgttgagagggaggcaggggaaggaaagctgattataaaggagcattcccctcccaccggccccgtggaaaaagtcacgtggcgcttcactgggcgcctgtcaccaccccgcttgtaaagctttcttaaagggctcgcgatcccttcccaaagctggtcctttctaggatttctccacacctgcccacggaaggtggcacggccctgagtcttcctaccccgccagttgcccaggtcctgatttcccatcaggcctgctggcgtgagacgctctccctcaggtctggagcctgtgaccgtcaggggaacgatgaggtcctctgaaacggtgaccgcctagcacagtgcctggcacgtagtaggcgttcagttctcatttgttgaatgaactcgatgacagaaaaaatgaatgggatgacaggcgggaggaggagaggttgctcagcttgaccatcccccccaccacgccccgtcccaggaaaactatgctgttgtgaatgtggggtgggggtgccaggcataggacgcccccagggcctctcttcccgcagtgtccagaagagcttgggagcacgcgcagagtgaacccatgagggcgtctaggccggggtccctaggcggatcgtagtcagctccgagctagtccagggggcaacggtgcggaggcggtgggggagggccccgccgctggtctcccgggctcgggtcgcgagcgcgcccgcataccccgtggggaggggcggtggaggcgctgcgcctttaagcccgggcgccggcccccgcggccccgccccccggagaacgcctcggcgcgcggccgccggagccgccgtttaattggggctgtcaggccgcggtgcgcgcggagggccgggcgggcgggcgggacggaggccgggaggccgggaggccggggcggcgggcgcgcagctcggcgggaggcgggcgcccggagacgcggctggggcccgcgcggccggggcgccgtcccagggcagggctgcccggccccggccccgggccgcccgcgctccccatgaaaaaccagctccgcggccccccagcgcgggcgcacatgtcgacttcgggggcggcggcggctgggggcacccgggcggggtccgagcccggtgcggggtcggggtccggcgcaggcaccggggcgggcgcggcgacgggggcaggggccatgccctgcaagagcgccgagtggctgcaggaggagctggaggcgcgcggcggcgcgtccttgctgctgctcgactgccggccgcacgagctcttcgagtcgtcgcacatcgagacggccatcaacctggccatcccgggcctcatgttgcgccgcctgcgcaagggcaacctgcccatccgctccatcatccccaacca

SEQ ID NO: 29702 - DNA, 2300 bp, Homo sapien
ctttattaagttattcatacaccacagaattcaccttttaaagtgtacatttcagtagtttttagtacattcacagtgttgtgcaactgtaatcactaattccagaatattttcatcatcccaaaaagaaactccatactcaataacagtcataccatttcttctctttccccattttctcccaacccttggcaaactaatatattaatactttctgtctctatagatttgactattctgaacttttcatatgaatggaatcagacaaaatgtggcctttggtgtttgacttctttcacttagcatgttttcaaggttcatccatgttgcagcaagcatcagcacttcagtcggttttatggctgaataatattctgttgtatgaatatgctacatttggtttattcagtcatgtgttgatggatcatttgggttcaatcacttgttggctattaaggaaaatgctgctctgaacatttgtgtacaagtttttgtgtaaaccatgttttcaactctttggggtatttacctagaattgctgggtcatttgctaaccacgtttaactactttattttttattttatttatttatatttattttatttatttattttttgattaggagtctcactctgtcgtccaggctggagtgcactggtgcaatctcggctcactacaacctcctcctcctgggttcaagcgattctcctgccttagcctcccaaatagctgggactataggcgcccaccaccacgcctagctaatttttgtatttttagtagagaggggttttcaccatgttggccaggctgatcttgaactcttgacctcaggtaatctgcccgccttggcctcctaaagtgctgggattacaggcgtgagccactgtgcccggctaactacttttttttagtcagggtcttgctctgttgcccaggctggagtgcagtgatgtgatcacagctcactgcaaccttgaactcctgtgctcaagcagtcctcccacctcaccctcctgagtagctgagaatacaggcatgagccactacgtgtggctaattctttaatttttttgtagggtcagggtcttgctgtgttgcccaggttggtcttgaacccctggcttaaagtgatcctcctgcctcagcctcccaaaatgtggggattacaggtgtgagccacttcacctgacctatgtttaactttttgaggaactgccaaattactttctatagtatctgtgttttttgtttgttcgtttgtttgtttgtttttaaagatttttttttttttctgggtgtcttgcattttcatgtgaatcttgggagcagcttgtcagtttctgcaaaaaagacacctgggattttgataggaattatgtggaatcggtagatcaatctgaggagtatcgtagtattgtatcttaacaatagtaagtcttcctgttcatgaatgtggaatgtctttccattttttaagtcttctttcatttctcttagtgatgttttgtcgtctttactgtacaagtcctgcacttcttttgttaaattattcctttttttttttttttttttgagacggagtctcgctctgtcacccaggctggagtgcagtggcacaatctctgctcactgcaagctccgcctcctgggttcacaccattctcctgcgtcagcctcctgagtaactgggattataggcgcctgccaccatgcccggctaatttaaaatattgctattttttttatgtatcataaatagttttattttttggattattcattgctagtgtacagaaagacaattgatttttgtgtcttgattttgtatcttgcaactttgctgaactcatttgttttttgtttttgttgaagcatttccacagttgatgtattaattcaaatagtaaaaactattcctagtaaaaactaatcctaagtggattccttaggattttctttatataagatcatgccttgagcatttttaaccctactcccccggctgttgtaggaagagtgctggccctggggaagccccttcctcacccaggcttcacacatttgaccctggctctctctcaggaggacccctcgctggaaaggcattttaagggccaccgagatgcagttacctgtgtggacttcagtatcaacacaaagcagctgggtaagaagaggcaccctgtctaggtgctaggttatgagctgaacaggccaagtttttacctcggaggggtggtgggtgggaagcagagcacaaggactgcacagctttgtctagacctgcttctagtct

SEQ ID NO: 29703 - DNA, 2300 bp, Homo sapien
ggctaaagactgctctctaccatcccagaagtagggaaaactcaaactttccttctctgttggaagcgagctcaaactccagaaaggagttacctgccttccatcgtcagggaagcaggaaaacctgccttccttgttggaaacaagtaaaactccagaaaaaggagttgtacagtaaaataaactttagatgttaaccaaatttgggaagatcaggaattttgtggaggggggctcccaggccttagcaaattgtcctgtagatttgagccataaagatagctcaagctggtaccaagcaccgataggagatctgtcaaaggtcaggggcacctccactcagaatcctttcgtggttgccaaactgtcaacccgaaatacctgagacaggtctcagtcaacttagaaaatttattttgctaaggttaaggacacacccatgacacagcctcaggaggtcctgacaacatgtgcccaagtggcctgggcacagcatggttttatacattttagggagacaaaatacatcaatcaatacatgtaagatttacattggtttgatctggaaggacaagacaactcgaagtgggaaacttccaggtcattggtagatttaaacatattctgattggcaattggttgaaataattattatcagtagaaagggatatctcggttaagataaggggttatggagaccaaggttttaccatgcagatgaagcctccaggtagcaggtttcagagaaaatagatcgtaaatgtttcttatcagacttaaggtttttgttgatgttaatgctggagggtataatgaggcatgtccaacccccacttcccatcatggcctgaaccactctttcaggttaaatttgagtgccctggccaagcagggagtctattcagatggttgctggtggccttcaaattttattttatatatatatatattttttgagacggagtctccctctgttgcccaggctggagtgcagcggcaacatctaggctcactgcaatctctgcctccggagttcgaacaattctcctccctcagcctcccgagtagctgggtttacaggcgcgtgccaccacgcccggctaatttttgtatttttagtagacatggggtttcaccatgttggccaggctggtctcatactcctgacctcaggtgatccacccacctcggcctcccaaagtggcaaagtgctgagattacaggcgtgagccactgagcccggcctctccttcttttaaagactgggtttctaacagcttctgaggccttaaggatcctgacagggccgggctgcaccacactccctcgtgttacaaatggggaaaccggggcacagagcagaggcgtttttcctgagatcacacagccaatcagggcgagaactgagaatcgaaccttgatctctccactccatgattgtgattccgagtaactcatgttattttaaatcgacacttgtcttaagaacgttcggacggcgaaccactgagagttcccgaggggcgaatactcagctctcaataggttcctgcggggaaaatctggctgcgccggcgcgcgcgggtgctttaacgcaatctggttacagcaacccacgtgtcctccgcttccgggatccttaaggccgtcgcttcgggtggtaaaacccggcccgccctcttgttgcccaggctggaatgcaatggtgcaatctcatgttgggaagtgtagctccaccttcctccagacataggggcgtgggcggcttggaactgcatttcccaggaggctgcgctcgccgttagagtagccggacgacgggctggtggggtgaacccttcatcctgggtcttttaatttctcaggcggaacgagtggcggcggacagaggcttttggctgcgctgtctgtgggttgtctgggcttggggaactgggcacggagaccgtggcgccggccgccggtcatacagctctgcttccagtcgtcgggcaaaaagctgaggcgcttctcctttaattgcggtgggcggggcgtgccgacgcggcccgcgttgctattggtggccgttgggggcgcggaaactgaacgggccgcaacggccaccgcagctgccttcggcgccgccagccccgccatggctgcgccctgcgcggtaagcccagccgagagcaactccccaggcctcagtctccccgctgggacactgggcgcctaatggccagagcgatggctgcgaggggcgggcggggcgccaggttccagggtggtcctcttcaggtccagtttactgtctgcgc

SEQ ID NO: 29704 - DNA, 2300 bp, Homo sapien
ccaaccagcacccgcttctcttctggaagccttcctcgtggttgggatcctcctctttcagcgcctgttggagtaatagcctcctcctcttcctccatctggagttgcttacaacactctatttcactttccatgtgagtcggccttgtttcccaatctttctctatattaaacaggaaactcccagagggctagggactggctggtttaaacaataagcctctgaaatacaggacttcacctgaccctcctgccagccacaagtggcagggcgggagagctttacaaatcaggaaaccaagccttgaagaggttgtggcctgcccaagtctatggccaagtaagattcagagctgggtttgaaacccatgcccaactccactatccagttctttctgctttggctttggctctgatcacccccaaaaaaaccctatgagggccaggcgcagtggctcaagcctataatcccagaactttgggaagctgagggtgatcacttgaggtcaggagttcaagaccagcctggccatcatggtgaaaccccatctctactaaaaatacaaaaattagctgggcgtggtggtgtaatcccagctgctcaggaggctgaggcagaagaatcgcttgaacctgggaggcagaggttgcagtgagccgagattgtgccactgcactccggcctgggcaacagagggagactctgtctcaaacaaacaaacaaaataacaacaacaacaaaaacaacctgtgaggcaggcatttcagggattatgatcctattgcccagataaggaaagcaaggcccaaagatgagcaaagcactcaatatcatccttattctgttcccacttccagctgcacttgggtccaagtccaagtgctgaccttttctctctcatcttctctgggtgatgggcactgcccaggatctcttggctgaatggcacagaactgggtctcgagctctcagaccaaagccctcatcctggactggtcccactgccactctgaacccaggtgcctcctctgaaggtggagactcacctcacctgccttgcagccagctgggtgctcagagacagaaatgcaaagtacctggacacaccctggtcaccatcattctggactttgtccctcttgttaatgctcagctgggaaaggaataccctcaaaggccctttcctcaagaatggaggagagtacctctgagcctggcacaggcccagcccaacacagcccaagccaagctgggaagggtgtggggcaaggaagccagactgacattcctgagacgggtttgccaagccctacactttatgtgttgtacccgggaaactcaatggaggtatggcccaacgctgacctttggcatggaggcctaagccaccctgctggtgcccagggtggccagcaaggggcttcagacaaccctggatggaaaataaaaatagtggctaatatttgttacacgctaactattgtcaggccctgtgccttcccctcctccccaagtgctcagagctgtggagtggatgggttccaccctagccctgttcctctgtcccctctggatcatcttagaccagaaagtgccacagctgagtgtcccgcttcttccgcatcctgccaggaccactccatttgtgggcgatatagccagctccacctcctccgggaagcccttgttcacagtttccaaagcaagccgcaggcgggatggatcctgcttaacaccccggcccagaaccccttggatctccttcttcctccatgtccaagacacccagcttaacaaccctgtagcccccaacttggccctagcggcacctcgcctcgaccttgccattttatactcaattggggcgtagggttctgaagcccagggtagttggtggggaggcagcacgagggtgcaggatgaggtcgggaaaagagacctcgtccgcccaccgcctagcgcttcctcctccctgcaggcgagccggggaatccccggcagcaccgatatccgcagagcccaagaagtgggcctctctgccccgcccccccggctcgccgagggctacgcggcgcgcctgcgcagaagaaggcagcgcccaaggcgcatgcgcagcggtcactcccgctgtatattaaggcgccggcgatcgcggcctgaggctgctcccggacaagggcaacgagcgtttcgtttggacttctcgacttgagtgcccgcctccttcgccgccgcctctgcagtcctcagcgcaggtgagggcccgcgcggtaggtgcggcgccggccgaggaagcccc

SEQ ID NO: 29705 - DNA, 2300 bp, Homo sapien
gcttactggcctctctggttttctgcctccaaagaaggcagggccactgctgggtatgggggtctgggtccctggtccaagggactctgggaaagtctcaggcttggggctccacaggagcccgagctttggtgtatccctctgagaggtggatggagggaatgaatgcaggtgccttccaccccaggcaggcaggagtggaagcatggggttgatgcctgcagcccagctactgagtgggcactgctctccttcctggctcagggcaacattctatccctggcgcctttctgagcccctgctcaagcccctagaattgtagagaggagagccagactagctaagacccagaggaggcttgtccttgcccagccgaaacattggctcccaggtgggcaggaagacgatgccatcgccccctgctgctgagccagccagatgcctggcactatggagcctgcctgccatgataccacccagagtgggcctggggggagcaggctggcagatgtgcagccttgcctcctcccagcagcaacaattcattaattcattcattcagccttcactcagaaataccctctctgtgcctgcccagagctgactgctgggtgtacataattcagcagatatcaagcacttactatgtgctgggcactgtactggatcctggggatgcagataaaagatcactgcccttaagaagctgacattccagcaggggaataagacgatatacaataaaccatgaaagatcaatgatccggtgtgctagcagttaaaaaatgttaggacaaagagaaacatagaccaggcaaaggagctcaggagtgccagatctggggtgggaggtttgtaagaaggctggatggccctgttgagagggtgacatgggagcagagacataatggaggcaaaggaggggtcatatgagacttgggggagttttcaggcagagggaacagcacatcccaaggccctgaggcaggagaatgcccaggggctacacagtcaactgcaagcaggccagtgggcctggagagcactcaggggaacagcgggtggcaggtcccatagggccttgttggccatctgtggactgtggctttgactccagagtcagccagggaggggtctgagcagaggagggacctagtgtgacttaggtttgaacagttccctctaggggctgaatgtgaccagcccctggagggcagagagcagggcaggacagccagaagggaggtggcacctgcatgggtctaggagagaggatgggggctggtggacatggggacggtgggctgtgggcacacccttcagcatggtggacccagcagaacttgctgaggggcccggggtcacccaaggctttgggcccgaggaatctgagtctcctcacctagatcagaaggagagtgggaagaactgatggggaggactggctggcggccctgctgggccagcacacacctggcctctaggagccccatctggagtgacgtggtgtgtgctctgatggggccccaggggctctgggaatgtggaggaggaggtcttgtttccggaagatgttgcaaggctgtggtgaaggcaggtgcagcctagcctcctgctcaagctacaccctggccctccacgcatgaggccctgcagaactctggagatggtgcctacaagggcagaaaaggacaagtcggcagccgctgtcctgagggcaccagctgtggtgcaggagccaagacctgagggtggaagtgtcctcttagaatggggagtgcccagcaaggtgtacccgctactggtgctatccagaattcccatctctccctgctctctgcctgagctctgggccttagctcctccctgggcttggtagaggacaggtgtgaggccctcatgggatgtaggctgtctgagaggggagtggaaagaggaaggggtgaaggagctgtctgccatttgactatgcaaatggcctttgactcatgggaccctgtcctcctcactgggggcagggtggagtggagggggagctactaggctggtataaaaatcttacttcctctattctctgagccgctgctgcccctgtgggaagggacctcgagtgtgaagcatccttccctgtagctgctgtccagtctgcccgccagaccctctggagaagcccctgccccccagcatggtaggacaacagctctcagtcccctggggaaggggatatcctgggaaggggtggggaaagaagtgggcttggcagctgcaagcaacagtgacgggttgtcacccacatggcc

SEQ ID NO: 29706 - DNA, 2300 bp, Homo sapien
tgagatgggtctcacagggccaaagttgaggtgttggcagggctggctgtgtctgggcccctcagaagaacccatctcctggccttttctggctgtattccttggcttggggccccttcctccaccttcaaagccagaggtgacatctctgattctgctttcctcagcctctgggctcccatggccttttgtagtcgaatctccctctgtctccatttcataagggacattgtaattgcattcaccctccctgcccccaccacctacccctgtcaagatgggtaacttaatcacatctgcgaagtcgtttttgccacactgtggggtgttggggtcacgtgtttgcaggtttggggaattaggacaaggatctctgagagggactttatgcagcctcccacatgggataagggctcctcctcgaaggcttcccagcctccctgggctgaggccaggacaagtttttctgtggacatcgatatcggtgtctccaagctgagtgtgtccatgtgcgtgggtctgtacctgtgtgtgcagacccctctgtcagcttactggcctctctggttttctgcctccaaagaaggcagggccactgctgggtatgggggtctgggtccctggtccaagggactctgggaaagtctcaggcttggggctccacaggagcccgagctttggtgtatccctctgagaggtggatggagggaatgaatgcaggtgccttccaccccaggcaggcaggagtggaagcatggggttgatgcctgcagcccagctactgagtgggcactgctctccttcctggctcagggcaacattctatccctggcgcctttctgagcccctgctcaagcccctagaattgtagagaggagagccagactagctaagacccagaggaggcttgtccttgcccagccgaaacattggctcccaggtgggcaggaagacgatgccatcgccccctgctgctgagccagccagatgcctggcactatggagcctgcctgccatgataccacccagagtgggcctggggggagcaggctggcagatgtgcagccttgcctcctcccagcagcaacaattcattaattcattcattcagccttcactcagaaataccctctctgtgcctgcccagagctgactgctgggtgtacataattcagcagatatcaagcacttactatgtgctgggcactgtactggatcctggggatgcagataaaagatcactgcccttaagaagctgacattccagcaggggaataagacgatatacaataaaccatgaaagatcaatgatccggtgtgctagcagttaaaaaatgttaggacaaagagaaacatagaccaggcaaaggagctcaggagtgccagatctggggtgggaggtttgtaagaaggctggatggccctgttgagagggtgacatgggagcagagacataatggaggcaaaggaggggtcatatgagacttgggggagttttcaggcagagggaacagcacatcccaaggccctgaggcaggagaatgcccaggggctacacagtcaactgcaagcaggccagtgggcctggagagcactcaggggaacagcgggtggcaggtcccatagggccttgttggccatctgtggactgtggctttgactccagagtcagccagggaggggtctgagcagaggagggacctagtgtgacttaggtttgaacagttccctctaggggctgaatgtgaccagcccctggagggcagagagcagggcaggacagccagaagggaggtggcacctgcatgggtctaggagagaggatgggggctggtggacatggggacggtgggctgtgggcacacccttcagcatggtggacccagcagaacttgctgaggggcccggggtcacccaaggctttgggcccgaggaatctgagtctcctcacctagatcagaaggagagtgggaagaactgatggggaggactggctggcggccctgctgggccagcacacacctggcctctaggagccccatctggagtgacgtggtgtgtgctctgatggggccccaggggctctgggaatgtggaggaggaggtcttgtttccggaagatgttgcaaggctgtggtgaaggcaggtgcagcctagcctcctgctcaagctacaccctggccctccacgcatgaggccctgcagaactctggagatggtgcctacaagggcagaaaaggacaagtcggcagccgctgtcctgagggcaccagctgtggtgcaggagccaagacctgagg

SEQ ID NO: 29707 - DNA, 2300 bp, Homo sapien
gtgttaccagggcaaactgacacccccacagggaaaggcacatccctgcccaccccagccccaatgcctgcccagccaccatcaataatccagaggccaggcctgggacacctgagcctctattatcaatgattcatgaacaccctccctccgactcaagtgagcctcacattacaggtccctttcctgcctactctgcggtcagcagatccacacctatggtcaggacagggctggcacctggtcctccagggtgatctctgctgccaacttcccaggccagaaatgggaagaagtgggctgctcacaggtggaaggagggctaggggcagcccagtccccagtgaccccctcggtgggcctgtctcactatgggaaaggagggagtgaggcagcagggaaggggtatggggtggctaacttcctgggatctcctccaccagggctggaggctgggaggcagcagctatgaccagacaaaggggaaggaagaagctggccaggaggcagttccctcctgtggggctgagtcatgaagcctgcccgccagctcctcctggagaaaggctggcccatctgggagccctggccctgacccaggcccctgccttcgcggggccagggaaaccttctcagggcagcccagccaccaagtggccacaaccgcaccaggattcaggtggtcaggcaggtcgatggtggcagccccaggcaggggatcctagtgtggtgggaggggtggctgatggccaaacccgccaggctgtctgggcaaacagcccgggccttccccacaggccaggcagctctctcaggccagtgacagaggaggacactgagccccaggtagagtcagggcacctggctcccagccattgcttctctcacagcctgtccaagaaggaaactgggacccctaggggaggggagggtgtgatgcgggaatggtgaagcttcctagggctgggggctgggggtgggagctggcctggattctttagggccaggactctccccacaaaaccccatatctggacctcttctctgtctgcagcctggagctgggatcttccaaccagactgaggcagactcagaaagtcacagtggaaaatgggagggaggtcagaggtcaaggtcagataggcagctttctccatcccacgtagaagtctctgttccgggttttccctagcctggggagagtgagtgtcctgggaggagcaaaggtcagggccttctcctaacacacataaacaagcccattcaagtcagacacatgcggtatatgcatccttggcaaaaatgcacactgagacgcgctccaactgtgcacacacacagacacccacatacatgtgcacactgccatgaaacactgatgtctaaagagggtcctatgcgacctacagtgtccattcaaacagtcactagtgccagtgcatgaatgaccctagatgtacacaagcgagtcacatccagaggtgcacaggcaggactgtacacggaagacgtgtgcacatgcgtgtacacccactcccggaaaggaacaaaaatatacagatgggcacacacagccacattcatctccaggtaggcacacagatacttccaccccagttgtgtacgtacacatacacccactcccagctatgcacaccacgtccgtactcccccagatgtgcccaccccaggcgacccgcggctgcaaaagagaacaggaagctttctcccggctggtgtggggtggagggaggggccgagagccgggggggggcgcttccgagagcccagaccgaggccccctgcccgcccgccatccgccctcaccgtggatgcccgtttggtgcgccatggctcggcgcttcgctccgtccgcgccgtcggagccctccgcttgaccctggcccggcaacgctcgctggaccaagagaggtggaggatgtggcggaggctgtcgaccctcgcgcagcttcccgggcggtgccgcaggacccgcccccagcggcgccccgcccccgacaggcgcggcagggaggcggggactcggggccgcgcgtgcgcgcagcctgcgcctcggtccgggtgggtctaaggatgatgattgatccgccgtgcgcacgccagcgcgttcctctgtggcaggagaggggggcctgcgtgtgaccgagcgtgcgtgggaggacgcgcgtgtgtgtctgtgcgccctgatcacggtggtctgtgggtggggcggatcgtgcgcgcgcgcccgatctgtgcgccccaagccaggtgggtctccgaataggagtgggtccca

SEQ ID NO: 29708 - DNA, 2300 bp, Homo sapien
tatgattcttggcctcactcactaccatgtgacattgatcaaatcacttcacctctccaaacctcagagtctttatctgtaagatggaaaaagtaacacctacttcaggggctgtcatgaggattaaataaatgtgcccagcaggtagtaagtatacaacacaaagcatctaatggttcattcatacatttgcttattttgcaattattggccacctgccaatgttgggcactgttctaggcacaggggatacagcaagggcaaacacctaactactggtggagggaagacgataaacaaatacgtaaagatttgtgccaggtagtgataaaagcaaagaatgacccatggagagggtcagctggggagaccacgcagtaccctactttgtcacagttcatccagtgagggacatttttacagggcacatgaccttaatctttttcattaatcttggttaattcatttccaggaggtcaagtctcttgtggttctgtggaatcaccagatgctcctgtgggtgtggcttagtctgagctgatgtaacaagtagctctgtgttgctggcaccatctggctgtagcagggttcagtgtgggaggccttgcctgtgaactgttctagaaggcaagctgcagggctgcataacactccattttccactgtgagtgctggggggacagtggttagcagatgacataggcccagtcttcagggtgagcgcaggaagatgaatgagaaaacccttcaattctgtgtagctgggctctctggggatgagaaactcaggggttggggggcacagaggaggcctcaatgcaggctagtgagggtggggagcaagacagtaaatggagctgaagctggggccagatgccaggtaggccacacatttcatcatcacatctctcagcaaccccagcccaaaaagctggcctcctttccaatcttcccagccaaagtccctggacaagctgattggaccaaccagagtcagatgctcatccctgactcatcacagtggcctggaagatgccacatgttgactagttggtagcagcaggcaggtactggtaccagtaaggcaaggctgctggatatagacacagaaggtcattaggacatgggaagttcctcaccaggctctggccctctttcaacctctgggcctttgcacatgcagtgccctcttctcagaaaacctttctggctgggactagtaagtggctcacgcctgtaattccaacgctttgggagtccgaggcgggcagatcacctgaggtcgggagttcgagatcagactgaccaacatagagaaaccccgtctctactaaaaatacaaaattagccaggcatggtggtgcatgcctgtaatcctaaccactcgggaggctgaggcaggagtgaacccgggaggcggaggttgcagtgagccgagatcgcgccagtgcacttcagcctgggcaacaagagggaaactccatctcaaaaaaaaaaaaaaagaaaaagaaaaagaaagaaaacttttccctccactctgctgggctgtttcattctcccctctaggtttccaatcttcgccttctcctggcagcccctcacattgtctcggcgggctctcaccaccatacactccatctagtgggtgaaggcgggcctaggcccgtgagggcaaagcctagcggccatgatcaccccgaggtgcccaggaccccacgggaggcgctcaagaaacggcccctggggaagagctggcgcgcccacccacaagcagaccccttcctgggtgcaaacccgtgtacgctgggacccactcctattcggagacccacctggcttggggcgcacagatcgggcgcgcgcgcacgatccgccccacccacagaccaccgtgatcagggcgcacagacacacacgcgcgtcctcccacgcacgctcggtcacacgcaggcccccctctcctgccacagaggaacgcgctggcgtgcgcacggcggatcaatcatcatccttagacccacccggaccgaggcgcaggctgcgcgcacgcgcggccccgagtccccgcctccctgccgcgcctgtcgggggcggggcgccgctgggggcgggtcctgcggcaccgcccgggaagctgcgcgagggtcgacagcctccgccacatcctccacctctcttggtccagcgagcgttgccgggccagggtcaagcggagggctccgacggcgcggacggagcgaagcgccgagccatggcgcaccaaacgggcatccacggtgagggcggatggcgggcgggca

SEQ ID NO: 29709 - DNA, 2300 bp, Homo sapien
gagcttctgtgaaaatacttcaggacaaggctttcccccacccaggggtgggttggggaatagagtgtatgcactttgttttgtccaattttagactttaaaatcctctgaggcatcaactggtgagggtgaggaagtggccccatagactgaattgggcctgccccaccctggtacctttctgttctgtcacagtgacaattcacagctcagaggtcctttgggaaactttctctgacatcgcccctatcctcttgccagctggatgaagcagcatccaccagaactgctaccatcactgcagggggcttggtgggcagaggcctggcttgtctccattagcactgcgttcctgtgcccagtgtggccccagcagacactgtgggttcagtcaatcagcccccaggctggtctgggactgagtcatcggagggagtgggtgttgggcacaggtccctgccctaagaaccttccttcttgggcccgaggaactcccactggggcaggactagctgctgggaggaagtagggcttactgagcgtctacctgggctagggagtggaggtgaaggtggactcctcatacagctcatatgcaggcactgggctgtggagccttagccgcttttaattggcaagccctggcttcctggaggaggaaaggggaagagaagtgccctgggggcgaggattgagtcagctgcattgtcataatggaaatagtacagccctgggtgtccaagacttcccctccatgggcctcagaatcgtccatatgatgtaacactcttttttttgagactgagtctcgctctgttgccctggctggagtgcagtggctccatctcggctcactgcaacttctgcctcctgggttcaaccgattcttgtgccccagccttctgagtaactgggattacaggcgcacaccaccacgcttggctaatttttagtacagacggggtttcaccatgttggccaggctggtctcgaactcctgacctcaagtgatccgcccgcctcggcctcccaaagcactgggattacaggcgtgagccactgcctccggccaaagtaacacttttgcacagggagttggacttgagtgacaaatgggtgacaaagtgctttgttaactcgcagatgtgaaggggacactgcggctgaccgcctggtgacagctagccagtggttgagagaccgcaagatggttcctcgtctttcacttccctccgtcccaggtctgaactcggaccagctggagcctttgggggaccacggattcccctttacactcacacagatttctcttgtccgtcactcactcacagtccagtaaggatcctgctgtctattccgcgaagacatcttgaatgcagggacagccatttggaagactgtcctcgagggtggcagcagcctctcaggacggggaaagccaaggtgcccactaagcccgtctggggtggagggtggcaggccggggtggagaggattggaggccgcctgaaggaacctgtgctcggtggcatttactcaatgtgggggtctgacacctcccagctcattttgtccccatcttccccttgcgtcaggtccccacccagcaggaggaggtccgaggatctgcgcgacgctggccccgcggagtgtgggggacttttcctctcaaccaccagtgccccgcaagcgtgggtgaacagtcctccctggctactgtgggacgctgggcaggcgacttcgcctctctaggcctcggttttcctgcttgtcaaatggggctgatgccggcgtgggcttcttcaggcggtcgcgagcgttgacccctggagtcagcgaaccagccgcgcacgcactcccgggcggaggtcggggctggggggcgacgcctcccgtctgcgcgcccccggccccgcctcccgccggcgcacccctccctcggctccgcccgcggcccgcttcttcctcccgcgggcggcccagccctagcgccccgcgctccgcgggcagccccctgccgccgcgccatgtccgccggctggttccggcgccgcttcctgcctggggagccgctccccgcgccgcggccgcctgggccgcatgccagccccgtgccctaccgacggccccgcttccttcgcggctccagctccagccccggggcggccgacgcctcgcgccgcccagactcccggcccgtgcgcagccccgcacgaggacgcacgctaccctggaatgcaggctacgccgagtgagtgcccctccccgacccccagctcaggcccgggcctgaacccgct

SEQ ID NO: 29710 - DNA, 2300 bp, Homo sapien
agcatccaccagaactgctaccatcactgcagggggcttggtgggcagaggcctggcttgtctccattagcactgcgttcctgtgcccagtgtggccccagcagacactgtgggttcagtcaatcagcccccaggctggtctgggactgagtcatcggagggagtgggtgttgggcacaggtccctgccctaagaaccttccttcttgggcccgaggaactcccactggggcaggactagctgctgggaggaagtagggcttactgagcgtctacctgggctagggagtggaggtgaaggtggactcctcatacagctcatatgcaggcactgggctgtggagccttagccgcttttaattggcaagccctggcttcctggaggaggaaaggggaagagaagtgccctgggggcgaggattgagtcagctgcattgtcataatggaaatagtacagccctgggtgtccaagacttcccctccatgggcctcagaatcgtccatatgatgtaacactcttttttttgagactgagtctcgctctgttgccctggctggagtgcagtggctccatctcggctcactgcaacttctgcctcctgggttcaaccgattcttgtgccccagccttctgagtaactgggattacaggcgcacaccaccacgcttggctaatttttagtacagacggggtttcaccatgttggccaggctggtctcgaactcctgacctcaagtgatccgcccgcctcggcctcccaaagcactgggattacaggcgtgagccactgcctccggccaaagtaacacttttgcacagggagttggacttgagtgacaaatgggtgacaaagtgctttgttaactcgcagatgtgaaggggacactgcggctgaccgcctggtgacagctagccagtggttgagagaccgcaagatggttcctcgtctttcacttccctccgtcccaggtctgaactcggaccagctggagcctttgggggaccacggattcccctttacactcacacagatttctcttgtccgtcactcactcacagtccagtaaggatcctgctgtctattccgcgaagacatcttgaatgcagggacagccatttggaagactgtcctcgagggtggcagcagcctctcaggacggggaaagccaaggtgcccactaagcccgtctggggtggagggtggcaggccggggtggagaggattggaggccgcctgaaggaacctgtgctcggtggcatttactcaatgtgggggtctgacacctcccagctcattttgtccccatcttccccttgcgtcaggtccccacccagcaggaggaggtccgaggatctgcgcgacgctggccccgcggagtgtgggggacttttcctctcaaccaccagtgccccgcaagcgtgggtgaacagtcctccctggctactgtgggacgctgggcaggcgacttcgcctctctaggcctcggttttcctgcttgtcaaatggggctgatgccggcgtgggcttcttcaggcggtcgcgagcgttgacccctggagtcagcgaaccagccgcgcacgcactcccgggcggaggtcggggctggggggcgacgcctcccgtctgcgcgcccccggccccgcctcccgccggcgcacccctccctcggctccgcccgcggcccgcttcttcctcccgcgggcggcccagccctagcgccccgcgctccgcgggcagccccctgccgccgcgccatgtccgccggctggttccggcgccgcttcctgcctggggagccgctccccgcgccgcggccgcctgggccgcatgccagccccgtgccctaccgacggccccgcttccttcgcggctccagctccagccccggggcggccgacgcctcgcgccgcccagactcccggcccgtgcgcagccccgcacgaggacgcacgctaccctggaatgcaggctacgccgagtgagtgcccctccccgacccccagctcaggcccgggcctgaacccgcttcgggtcctgcgcccgcctagaaagcgggaggagctgagtgacagtccccacccacctgtggacagccccttcttgccctcacctccgaatcctgacaacttcccggtcatcccgacccagcgttttccttgggattccgacctccccctcagagaagacaggaggtcgggaaggacctgcagcccaggggcttccaagatgaggcccagagactcggtagagttccagcattcggggctttggagatttcccctcgccctctacccccacc

SEQ ID NO: 29711 - DNA, 2300 bp, Homo sapien
gcattcggggctttggagatttcccctcgccctctacccccaccatctcaccctgggtatgacctgcgctgtatgggacagggctttgggctgcgacaggacaggggcaggaatggcaacctacccttaccgtctagccctgggtcaccaggtaggctccagaggagctgggccctgacttttaccttagccatgaggccagtgaagttaggaagcttacatcgtggttgtctaagtgtgtgttagggacagcactggggagctgttgccccagagggaggggtcttctccctgtgctggcttgggtccctgtgcccatggggacataggtgtgtccctggagggtcgcttaccatttcccggcctcaggattatcaatgcagagaaatctgaattcaatgaggatcaagccgcctgtgggaagctgtgcatccggagatgtgagtttggggctgaagaagagtggctgaccctgtgcccagaggaggtgagtgcagtctgagttcttggctggaatccctccgacaggctggggccacgacctgcaggctgaggttcttaccctgctgccccaggtcctagttaggttgcgtcaggggacaagtggggaagtcaggcagaggctgacactgagcccttcctgtgcagttcctgacaggccattactgggcactgttcgatgggcacggcggtcctgcagcagccatcttggctgccaacaccctgcactcctgcttgcgccggcagctggaggccgtggtggaaggcttggtggccactcagccccccatgcacctcaatggccgctgcatctgccccagtgaccctcagtttgtggaggaaaagggcatcagggcagaagacttggtgatcggggcattggagagtgcctttcaggaatgtgtgagtgtgtggcttttggctggggaagaagtggagattttgccccggggatctcaggaaatggcatctctgtatacccatggtcatcacaccagatccttggattgggaggatgagattgggttggttggattgttactaacagccatcactatcagcataacccctctcatttatccagcacctactgtgtgctaactgcttttacctgcatcatctaattgaataccctattggtccttggtgcaggggctggtttctcttcctattttgagtagcacttcccttgtctagatctcctgactgcagggatcttggaggtatggctggactttgggctgggactgtcaggcctgctggtagaagtgaactgtagggtagggtggggattgagagacaaagtagtatggtggcagaacaggcagcagctaaggtggcctcggttttccccaggatgaggtgatcgggcgggagctggaggcctcaggccagatgggcggctgcacagccctggtggctgtgtccctgcagggaaagctgtacatggccaatgctggggatagcaggtgagtcaccccttggagggtgggcaagggtgggatggggagggcataagcagcaatggggacaagcaaaggtggctggaagtggagggatagtaggaaggattgactggctgaattgtgtgtgtacttgttatgtgtcgagtgtggacagtggctgccggggagggcagggacctcaaaggccccgctaaagggctaagccttcacccttgcaggtcttaggtagtcatggagggctttaagggatcatcatggacagagctggatcctggtggttggaggagggactggtaggagggtggccatgggtgagggtggaggcctcctcctagacctctcccttctctcctcaatccagggccatcttggtgcggagagatgagatacggccactgagcttcgagttcaccccagagactgagcggcagcggatccagcagctggtaggtgcccttggcagcatggaggctgtgaagctccaactcctgggtccagggccataagaaggagtatgacctgagcgcagcctccccaccccaggcctttgtctatcctgagcttctggctggtgagttcacccgactggagttccctcggcggctgaagggggatgacttgggacagaaggttttgttcagggatcaccacatgagtggctggtgagtggggatgggggacaggtaggaagggagacccctgggatccaggcccagccgtatggcctggggcccccctccaccttggcagggtggcactgtgagggtgtgacagctgggccctgagttggggaaagatgagatggggcacagggcttgggttgatgctggctct

SEQ ID NO: 29712 - DNA, 2300 bp, Homo sapien
tcctagcagtctgttttaacccaccctccaggtgatgctgatgccacttaggtttgagaatatctgtgtagtcctcacacatcttgataaggaatcatgcttttttgtgtttttttaattgagatacagtctacatactgtaaatgattcctttaaaaatgtacagttcagtggtttttactatatttgcaaagttggacaactatcaccatcatctaacttcagaacatttttatcactccaaagagaaactctgtacccattagtaatcactccctcagcccctaccaactgctgatctacttctgtctttatagatttgcctattctagacattttgtgtaaatggatcagttcatatctgatcttttgtgcctggcttcttttacttagcatggtgttcccaaggttcctccatgttgtcacatgaggcagtactttattactttttattgccaaataatgttccagtgtatagatacagcacattttgtttgtccatccattagttaatggaccatttgggttatttctactttttggctgttatgaatagtgcagatctgaacatatgtgtacatttttgtgtggacatatattttcagttatcttgggtaaatacctaggagtggagtttctgggtcacgtggtaactttttttggaaaaacttttccaaagcaactgtaccatttttacatttccattagcaatgtatgagggttccaatttctctgcatcctcaccaacacttgttatctctcttattatagctatgctagagggtgtggagtagtatttcattgtggttttgatttgcattggaatcatatatttttattttgtagctttaaatttttttttttatactagttgcctttgtttgttccagatatggttgtggtatgtgtgttttattgtgtttcttaaaatggcaattttgggagaacaggtatatatatgtatagataggcagagtggtttagaattcacatccaatttttgctaatatttcgcatcaactcctatttatctcgatgtattgcagggtggtggccttgtccatgtcacctgtggatgacactttcatttctgggtctcttgataagaccattcgactctgggatctccggtctcctaactgccaggtaatggtacctcacagttatactttttgagcattttctttggtaggcactgtaatgaactctacctctcaaagaagggagaaaacagtggttccattctgggatcacagggtctttttaaactttggagaaaatctgtttttttagttggtagctgctaagcacataccctaatctagtgcagattgcattgtactctgtggcttaattgttgtgggttttttgttgttttgttttgtttttgtttttgttttgagacagggtttcgctcttgttgcccaggctggagtgcaatggtgcaatctcagctcaccgcaacctccacctccagggttcaagcgattcttctgcctcagcctcccaagtagctgggattacagtcatgcaccaccatgtctggctaattttgtatttttagtagagacggggtttctccatgttggtcaggctagtctcctgacctcaggtgatcctcctaccttggcctcccaaagttctgggattataggcgtgagccactgcgcccagctggcttaatgtttttaaaagtgttcctagagcttttagcttcaagggatttatttttatttgaattctgtgtctgtaatattgtgcagttagagttgatcagaaattgttgtctggagacctgttttttaaaagcttcattttagttttatgttttttttgtgtgtgttctgtaggtaggctgatatttgtttgtatgcctttcttagttttaattgggaaaagtaaattatatagtggtaaggtcctggattcatttttttttccccattgtaccagcagtctttggttattccacgtatggttgtggcatgtgtgttttagtgtatttcttatttcttttctcttagggcctcatgcatctgcaggggaagccagtttgttcttttgatccagaagggttaattttcgctgcaggtgtcaactctgaaatggtcaagctttatgaccttcgttcttttgataaggtaaatctttgaatctttgagatctttgagctgttttttgttttgttttgtttttgagacagagttttgctcttattgcccaggctggagtgcagtggtgtaatctcagctcactgcaacctctgcctcccaggttcaagtgattctcctgcctcagcc

SEQ ID NO: 29713 - DNA, 2300 bp, Homo sapien
tagtggctcatgcctgtaatcccagcacttagggaggcctaggagagtggatcacttgagcacagaagttcgagattagcctgggcaacttgggaaaaccccgtctctacaaaaaatacaaaaattagccaggtgtgatgggacgcgcctgtagtcccagccacttgtaaggctgaggtgggaggattgcttgagccctggaggtctagggtgatcacaccactgcactccaacctgggtgacagagcgaggctccatctcaaaaaaacaaaaaagatttttctaatgtcattccacaaggatagcttatactgctattttggctgtgcctatctcagagcagaatgggcggaagtccttttttccatttttttttttttttaatgagactcttctgcctgtattgatttttagttaagtatgtcatttctacttttcatgcctgtatttcagaagtggttttctaaggaagcagtgtagttaatgattttggaaaagaatgtaaaaccttaggatcctgaggaaacatgtctatgtgatcatccgaatgactggtttatttcttctgttgggatgtttttctgagtgattaaatgaggattctccaaatgtggtgcaagatgaggcaaatgtgtggcacttgtagctttgctgccaagcctctgctgtgaggatgttccctttcctgtctcaagtgcatcctgaagagttcctccagcgctccgtttccttttgcctgattccaggctgaggtagtagtttgtacagtttgagggtctatgataccacccggtacaggagataactgtacaggccactgccttgccaggaacagcgcgccagctgccaagtggggctgagaggatggcgtcaccctgctcatctctgggaaaccaggtaatggggaggaagtctttttcttcttagggcaggtgagtcattgttagcagtagaataactagaaatacttcgtagttgtcattcaagaagtttgaagatgttttcaaggaaaattgtgtagtgttcaagttatggaatatacaaatatccctattcccctattccccctcccaagttaaatgccctcttattagaaagcacccctgtgaacccctgggatgactcgatgctttcaacccctttattcctatgttctgtttgccttcagaatgttctttctatggttttctttctgcattttggtaccattttcccttagctgtttctcaacaatttttccttattcctagtctttttaaggggataatacttttctattttgcagttttattctttatggcacttcatttctctaccgccaccatgttttttgtttgtttactctttcagatagaatcatttggttaagagtgtcttatttttccacaagcacaaatctctgattgttcctttctttaatattgtcaaaatctcactgctattactcattggtataagaatttgatttttttaatgtcttaagatctttttaacccagatcttgacatcacttctctgacgttttgtttattttcattgtaatttgtgtgtccaattgaagaatgttcaaatgagttgagggtgggtcaacatactgatggagaactctagacaaaaattgctgccagggttcaacctgatcttcagtttaactgccatggctgctcacctctttaagtctgttagctcaacagccacatatttttctttaaggtttgccattctgtggacactagaccagtatctaaaattattatgtgtgctttacttgtttttgttttttgaccagggtatatttgcagggtgggagttgcattgtaattatgaagaaaccaaattggtaataaaaggtcatttcaaacattgctttctatgctgtcaacttaagaactctgcttttgagttaggtgaaatctacatacccactcttcagctgcagagtagaattattcaccattatttattcatgccttgcttgggatatagaatacaatggattatttgaccttgtctttttaagatgaaaatgtaaagtaaatttcttttaaatagtatgatatcatcataccttgtttgtctttttacagatactattcgttacttgtccttgcatgacaacaaatacatcagatactttcctggacatagcaaaaggtaagacccacgtattatagaagcagatagttcttttatccctgaggttacccagagaatagaaggctagagagagcttattagtgaactgaagctacttcctcactactgcttggcattcttcatcttctcttaaatagtcaact

SEQ ID NO: 29714 - DNA, 2300 bp, Homo sapien
ctgaggcaggagaatctcttgaacccgggaggcagaggttgtggtgagccaagatcacgccattgcactccagcctgggcgacagagtgagactccatctccaaaaagaacacttttagaacaaataaaaggaaagaacacttgatacacagcaagtgataaacaacaggactttttcttttaaaatgatagagatttgagaaaagtttcacaaatgcttgaactatgatagtttaagggaagttagaacagttttggtgttttcccaaccttagtcacttctgattccaggaacgttttttgatctaaagagtagagttacttttagaaattgaacttgtgagtttctttctataataaacaatctctgtttttgcctgcatgtctcgagataaatcctaagttaacagattgtcttggtaactgaactgtaacacttattttcatgttagaattctttaattttttaattttgtttattttcttttgtttgtctgtttttattttttgagacagagtctcactctgttgcctaggctggagtgcagtggcgcgatctcagctcgctgcaacctccgcctcccgggttcaagtaattctcctgcctcagcctcccaggtagctgggactacaggtgcatgccaccatgcctggctaattttttgtatttttagtagagacagggtttcaccatgttagccaggatgggtcttgatctcctgaccttgtaagccaccgtgcccggcctattctttattcttttgagacagagtcctgctcttgttgcccaggctggagtgcaatggtgcaatctcggctcactgcaatctcagcctcctgggttcaagcgatgctcttgcctcagcctcccaagtagctggtattacaggtgcccaccaacacgcccggctaatttttgtatttttagtagagttgggacttcaccatgttagtcaggctggtctcgaactcctgacctcaagtgatctgcctgcctcatcctcccaaagtgctgggattacaggtgtgaaccaccacgcccggccaggattctgtttttaaacttatttcagtggattattgatgatcatctcacattttgcagtaaggttttttttaggccggtggctacatagtggctcatgcctgtaatcccagcacttagggaggcctaggagagtggatcacttgagcacagaagttcgagattagcctgggcaacttgggaaaaccccgtctctacaaaaaatacaaaaattagccaggtgtgatgggacgcgcctgtagtcccagccacttgtaaggctgaggtgggaggattgcttgagccctggaggtctagggtgatcacaccactgcactccaacctgggtgacagagcgaggctccatctcaaaaaaacaaaaaagatttttctaatgtcattccacaaggatagcttatactgctattttggctgtgcctatctcagagcagaatgggcggaagtccttttttccatttttttttttttttaatgagactcttctgcctgtattgatttttagttaagtatgtcatttctacttttcatgcctgtatttcagaagtggttttctaaggaagcagtgtagttaatgattttggaaaagaatgtaaaaccttaggatcctgaggaaacatgtctatgtgatcatccgaatgactggtttatttcttctgttgggatgtttttctgagtgattaaatgaggattctccaaatgtggtgcaagatgaggcaaatgtgtggcacttgtagctttgctgccaagcctctgctgtgaggatgttccctttcctgtctcaagtgcatcctgaagagttcctccagcgctccgtttccttttgcctgattccaggctgaggtagtagtttgtacagtttgagggtctatgataccacccggtacaggagataactgtacaggccactgccttgccaggaacagcgcgccagctgccaagtggggctgagaggatggcgtcaccctgctcatctctgggaaaccaggtaatggggaggaagtctttttcttcttagggcaggtgagtcattgttagcagtagaataactagaaatacttcgtagttgtcattcaagaagtttgaagatgttttcaaggaaaattgtgtagtgttcaagttatggaatatacaaatatccctattcccctattccccctcccaagttaaatgccctcttattagaaagcacccctgtgaacccctgggatgactcgatgctttcaacccctttattcctatgttctgtttgccttca

SEQ ID NO: 29715 - DNA, 2300 bp, Homo sapien
gaagccaggagagccccactataatagggcagggagccaggctaggaattggaaacagtaagaatgcgaaacaggatgaggatttgaagaccctcttaaaaatgggggaaaaaaaaaaagactgcattccaaaaataatgcagaaagtcaagtcttgggaggaaggtttggtcttaacggtgaaatctggaaaaggtataggaagtacaatacttgaaaaataccctgcaaagatttattttggctggcaacattcagtagattacagctgtttctgtggttatttttgtagattaacatggaccaaaatatggcatcatcttactgggtgtgttcacttcccgacagttctagaacatggtactcgatctgtccttgttgccttctaaactattcgaagcagacgctgtatcagactttctagcttctgaaataaaggcacaggaattacagggaagcagagcaagtgatctgggacgtggagggtttttcttccattgtgtgcagtttggaaagttgccatctattcaggtttcactcaaaccggctttttccagaccccagaacaaattgtagccagaagctctgctctttgtcaggaggcaattataccccagacttagccaggaacttgcctcttcccttagagaacaacttctctttatgtataaggatcctggctctccttttacccagggggttgggatacagcctctagttctttctagaaagaccccaactgtcccagggtttccattttgttttttaccattgcacaggtctctggataataaccttcctaatagcgactgaaatgtctcacagcctttcctcgtttttgtttctctttagctaaagaaagcaaaaataaataatccccatcttcattgttggaaaccccaggcaattaaccttttgaggagcttcacacaagatacagatctgtgaagccacataggttggcattgagtttaaccccttgcccagaaagttaaggttaggaagcttggttcctattttctgttcaaatactgctttcctttgttagagataaactttcttttaaggcaaataatcacttatatgatagaacctttaaaataatcctgttgactacaaacaggatagtgcaactcttccaaatcttgaatgtggtggtgactgcatgactgtgtatgggtgtcagaacataaaactagccactaaaaaggctaatttttggggggaaaccgtctgctctgtcgcccagcctggaatgcagtggcacgatttcggcgcactgcagcctccgcctttctcaattctcgtgcctcagccgcgccatcatgcccggctaattttttgtattttagtagaggtggggttttgtcatgttggccaggctggtctcaactcctgagctcaagcgatcatcccgcctcggcctcccaaagtggtgggtttaaaggcgtgagccaccgcgcccggcctaaaaaggctgatttttactgtacctaaagtctacctcgattaagaaaacgaggccgggtgcgggtgaggtcaggagttcgagaccagcctggccaacatggtgaacccccgtctctaccaaaaatacaaaattagctgggcgtggtggcgcgcgcctgagcgagagactccatctccaaaaaaaaaaaaaaaagtaaagaggtcgaagctgtctaagcggacgctgcggtggactagcggtcaagcttgcctgcgagcggctcacctgagtcacccccaaaaccggcctccagcagcatacccgaccctgcagtaccccctcccacgcagcctgcgatcgggacgcctgcaggaggcgccagagtcttcgcgggggttgcaatcccgcgcaagggcccccggctcccaaggcatccgcaaccttccgatcccccgggaaggccctgcacgtctcggccgctccctgccagcagcccgccccgccactacactccgccgcggccgcgctgacgtcaccaccccgcctccccgccttgctccgccgttcccgccccgccccctttcccggcgtgcgccgcggctgaggctcctcgccctcagcttctgcctgtcgccccaaaatggcggacacaatgagccggcgacgcgccggttgtccgtgaggtggctgtgaggacgaacggtcggcgaggctccacagtccaggcagaagaccctcgaccaagcaggaagaagaggaggaggcggcccaactgttggccgacttcccgctagccgccggcgcggcgcccgccccgcctgggttggcccctcggcagcccgcccgctcg

SEQ ID NO: 29716 - DNA, 2300 bp, Homo sapien
tgggattacaggcacacaccaccatgcctagctaatttttgtatttttagtagagacggggtttcgccatgttggccaggctggtcttgaactcctgacctcaggtgatccacctgcctcagcctcccaaagtgctaggattacaggtgtgagccactgtgcccggcccatgcccagctaatttttgtattttttagtagagatggggtttcaccatattggttaggccagtctcgaactcctgacctcaaatgatcccacctgcctcagcctcccaaagtactgggattgcaggcatgagccactgcacctgtcccaaaaacacatttctaatgtcaacctaaaaatcatcaaaaggttcgatatccagttaaaagaatttattcaagcataaagtgtgagggcagccatccagggaaacacagacaccaagcagtggcaattagtgttctccagcatggggaaagatgaaggttgtttatataggccgggcgcctgtaattgtttatacgcctgtaatccctgcactttgggaggccaagggcggtggatcacaaggtcaggagttcgagaccagcctggccaacatggtgaaactctgtctctactaaaaatacaaaaattagctggacgtggtggcgggcgcctgtagtcccagctattcgggaggctgaggcaggagaattgcttgaacctgggaggcggaggttgcagtgagccgacatcgtgcccaggctgcagtgcagtggccgtgagctgagactgtgccattgcagtccagcctgggtgacagagcaagactccacctcaaaaccaagagaaagaaatgtgtttttgtttgttggtttttttttgagacaggggcccaggttggagtgcagtggcgtgatcaaggttcactgcagcctctacctcccaggctcaggtgatcctcccatctcagcctcctgagtagctgggactacaggagcatgccaccacacctggctcttttttttttggtagagataagtttcgccatgttcccaggctggtctcgcattcctaggctcaagcgatccgcccaccttggcctccccaatgttgggattacaggcgtgaaacactgcgccctgccaagaaacatgtttcaataaaattgttaggaaatcaagtgtgtgatttgtgatgcaactctctcctctatctccctaagaaaacatcagtaaaaacagtgaactgttttgtatttttggagtctgatcaggactcatcttatgaatgtgggaaggcatccagccaacacagggtaggccccggatgagagtagggacagcgaggtaggcccagagtcattagcgtttacatgccgcttatgtgcttgaggatcgcagaatggaactcttgctaagccagagctgtatttggtggcccatggtgggagagggaagaacaataataagttgtggaataaaagccatggagaggagcgggaattacttaatctggctccagaaggggtgagttgtggggaagtagtgattctcagttcgtttgctcagcccagtcagtgcctgacactcagggtgcatctgctgactgaccgtacaggataaaggaagggagaggccgggtgcggcggctgaagtctgtaatcccatcactttcggaggctgaggtgggtggatcgcttgaggttaggcgttcgagaccagcctgggcaacatggcgaaagcccgtctctactaaaaaatacaaaaattagcccggagtggtggcacatgcctgtaatcccagctactcgggaggctgaggcatgagaatcgcttgaatccgggaggcggaggttgcattgggccgaaaccgcgactctgcactccagtctgggcgacagaatgagaccccgtctcaaaaaaaaaatcggcaatcggtgaggcggggattattaccctcaatgtagagatttaaaaaatgaggactgaaggtgactccttccaggtctgtcagtggccagcaaagagccaatatgctaaactctcccctcccggacaccggcttcagccagagctcgcacccgcctgcgccgctccacccacccacacttccggcttccgctccgcccaccccctagtacttccgttctccagcgctgggcaccgcggccggagctgtgggctggtaagtctgcgccgccagggctcgcatggccttcagaagcggtccctgggctgggcgatgacgggtcctggtggcagcaggcccttctttctcgcatcaccgggcattacgcggcagccatttccctcgctaaggccctacct

SEQ ID NO: 29717 - DNA, 2300 bp, Homo sapien
aggtcagagaaaaataggctgggggagaggaggtgagggtgggatcatgtggggtcatgtgcaactgggctggtgtcaacagccactatctttgaggtgatggccccgatgtgggttgctctatcttccagtcatttctatgggtctttcctggactgacgcatgggcagggctgctgagaaaagctgtgcctctgccccagcaccccctgaccccatccatcaagtccaccctccagttgggagaaacagcagtgaccatcacatggtagggagtgagtcatctaccaagtggtactgaccatggtcctctggggccctgaggagagtgtgtgttctgttggccaaggcactcagggagtgtgtcctgagaagtagcccaagatggcatggaagatcatagaaaaacaaagagggaagaggctccggcagggaggctgcacaggagtaaaggtgggcaggggattaggtgggggctgtgatggatgaagattgtctgttcatgggccagtggtcttcagtccaccagccccggagaaactctgttctactccttgcttgagctctgggctttcaaggtcttgtctgtcaaggtgatcatgtggatcaaaggagaattaaattttctccatttttattcatcaaagaaatgattatgctggtcagaactgctgagggcagctgagcaatggcagggaggcttatgtcggggaggcctggggaggcagtgaatcgtagacctcacccattcccttctctgacaccccccgcccccgatgcctgcaactcactttcttgtggcatagctcagagctccaggcctagaaaatcagaggaagatcctgggggcccaagagggaggctggggacaggtggggagcgggtagctcagccactcagtctggatgcctgtcaccttccgttctggctggccagccacatgaagggcccattctgctgcccattcacaaggggctttcatctctgcagccagtgaagcattgctcccatctcagccagcaaggagacacaggggagggggtgtgcagacttgccatgacctcagactccatgctggaaaggcatggccctgggccagggcatcctaagcagcccatctgccccaatcccccagcttccaggccaccagagtcctcagcaagggggatctgagtaagagatgggcagtgactccccaactcttgtagaaacctagtcctcccatttcaacaagggtaaggctgacctctcttccagcttattcagggcaaaagatggccctcccatcacaagaggggcaggagtccagtgggtcatggctcagccccctgctcctttcccagggagcaaggtaagtatggtggccttcaggacagggcaggaagaccaaagcctgaacccttgcgcagccatgggagaagacagcacattagagggtagcccctgagacccaggagaacagggactgactcacggtgtccttccagggaggagggaggcagtcatatccacagcccgcccttgaagaggggcgaagtggagctggcagggctgctggtaaaagcagcacccccgacccccacccctcaagtccattctccagttgggagaaacagcagtgaccatcacatggtaagcagtgagtggttctgtgagctgggcctcctgagagtggaccctttcagctgtggcctgtccatctgtccagcagccacagcccctgtgatgtcaccagcccactgtgttgcttggcaactttccaggattagcattctgcccctctcatccctgacatcccaccataggctgatgttgccatggcaacccggatagatgctgcagctttttggacagctgtacctagtgtgggaagtgccaggcaaaagcagggaagcaggtgcctctctacaggccaaggggggtacccaacctatacgcagacccattgagcagccagactgccctaaacagggctatggagtccttgtcccttctaagagctgtggacaccttgcctccagttcccctcacagtcctttcttccttctgcagtgatcactgagtacctgtgtgaatgccaacaagaaaaataaaaccacagtttggattcaggaaaggttgcaccaccatcaggtcttgaagggtgagtaggagtccgccagatgcaggagtggatggagacaggttctagacagaggaagcagaagcctgtgcaagggctgaaccactgtctccaggcatagattacaccctgcctctaggttcctcatggcctggcctctccatctttcccactcaata

SEQ ID NO: 29718 - DNA, 2300 bp, Homo sapien
caggacagggcaggaagaccaaagcctgaacccttgcgcagccatgggagaagacagcacattagagggtagcccctgagacccaggagaacagggactgactcacggtgtccttccagggaggagggaggcagtcatatccacagcccgcccttgaagaggggcgaagtggagctggcagggctgctggtaaaagcagcacccccgacccccacccctcaagtccattctccagttgggagaaacagcagtgaccatcacatggtaagcagtgagtggttctgtgagctgggcctcctgagagtggaccctttcagctgtggcctgtccatctgtccagcagccacagcccctgtgatgtcaccagcccactgtgttgcttggcaactttccaggattagcattctgcccctctcatccctgacatcccaccataggctgatgttgccatggcaacccggatagatgctgcagctttttggacagctgtacctagtgtgggaagtgccaggcaaaagcagggaagcaggtgcctctctacaggccaaggggggtacccaacctatacgcagacccattgagcagccagactgccctaaacagggctatggagtccttgtcccttctaagagctgtggacaccttgcctccagttcccctcacagtcctttcttccttctgcagtgatcactgagtacctgtgtgaatgccaacaagaaaaataaaaccacagtttggattcaggaaaggttgcaccaccatcaggtcttgaagggtgagtaggagtccgccagatgcaggagtggatggagacaggttctagacagaggaagcagaagcctgtgcaagggctgaaccactgtctccaggcatagattacaccctgcctctaggttcctcatggcctggcctctccatctttcccactcaatacactttatggtggggatagggtccagttcagttccagacacttagtgcccagcaacaggcctggcaccaagccagcacgactaaaatgccaagtaaaattcaacatcagggcctatgacctcccctagtactaaccgtctcagcaagtctgtttccccatctgtgaaatggggccagttttgagaaggctgtgggcaggggttctcaggtacagatggggtgatgtttttcttttggttcttttggtttgtaaaccacttctttcccttacagaaaaaattggaagactagtacatggacatctgtgaccttcagattccctaattgttatattgcagcacttttgctttatctcctctttgtctttttatctagctatgcttacctatatgtataatttttgctgaaccatttgaaaggaaattgtagcggacattctgacgtgtttcttcaaacacttcaggccacgtcaactaaggacagtctgatacaaccacagtagcattatcacatctaagaaaattaacaataattcaatattcagaatagggcaggaagatcaaaacctgaacccatgccaggtgctgagagcagatgaggggcatcagagggtgggcgcccgagccgaggggtgtcgggcgcatccgctgcccagcggaagcggcggcctgagtggagtcaccgtgcaatgggtgggtgtggctttgtgagccaagccccaggagaaccagaacccaccttttcctcagtgccctgaccagctgtcccgcagctgtggcttaaatgccaacttccagttcgtaaatttcttcaattattcctccccaaattatttacatatgtatatgtatttaaatcaggatttaatcaaagttctcacgctgcatttagctgtttcgctgcttactctaaaagggcacaggagggaagatgggtgggtaatggagcctagaagagtgacgctccctggtcggccctaatcctgccgatcggggcatatgctggaacatcccagtcccactgtcctgggcggaagtaaccgagacctggagttggtgggtaggtaagggttcaggctggggaggttcgcggacggaagctcccgccctgcggtgccggatggccccgccccttagcaacggcctagcgtccctccctagagacggggctgatgcatccccgcactgctcggtggaaccggtacgtcggtgaggcggaggggttgcggggccagcgcgggcagcgggacctcgaaaaggcgcggagggcgagtggacgagggtggggaatggggtctcccaggagtctggttgctgagccttggccagggggaaagaagggaggtgcactttattttattatttttg

SEQ ID NO: 29719 - DNA, 2300 bp, Homo sapien
gggacccatggcttccctgctccctcttgggatggcatgaggcttctccctagatctctgagaggttgtctagggtcacacgacagaacaggcttcaacctggctggtggtcagggttgggcccaggggcccagcctgaagcccctgaatgtgccccatcctagacaaaggcccctctgctcccagccctgtcccaaccccagagctcccttcaaggcagccactgtgagtcaggaaagggaggatgccatctaacacaagccaggcccaggctgtatgagatgggcaaggacctatctctgcccgtggccatggtttcctcttgtgagtaaactgagacatggagaggggcgaagaggaagatgccacaacccccagtgaggacccagtgtcctgccacaacccagtggttttcagagcttctacatgggggcaagtcctagactatgactacaggctagtctgttatgaggtcacttttgtgactctgggcttctctgagccttagtggtacagtctgtcaaatggagctgttgtgaaggtccagcgagactgtggtcatatagtccaacatgcaggggcttagctccccactccttcacccctccccagatcaagaacgaatccttcctggaagatatcaacaacgtcctaaactctggtgacattcccaatctgtatactgcggacgagcaggaccagatcgtcagcaccatgcggccctatatccaggagcagggcctacagcccaccaaggccaacctcatggctgcttacacagggcgtgtgcgcagcaacatccacatggtgctgtgcatgaggtacaggcagctgtcgccaggctgcgctggggcagcggagctgggtgtgtacatgggctggccccggggacactggatgccatgcgctggggcctgagatgaggagacgcggccctgggcctggccatcatgccattgggcccaggctgctgtgctgctgtgtcctggctgccatgccacagggctgtgcaagggccctgggtcctgggctcctggggtcgttggtcagtgtctctggacctcatttggattcctgactttccagccccatcggagaggtcttccgagctcgtctgaggcagtttccctccctggtcaactgctgtaccatcgactggtttaacgagtggccggcagaagccctgaagtctgtggccaccgtgttcctcaatgagatcccagaactggaatcctcccaggaagaaatccaaggactggtgggtgtcttgctgaagctcaggcccttggggagacctgtttagcttggggcatgggctcagggtcaccaaggtctgggtgagattcccaggcccaccaccgagggtaagcttttggtcaggctgtgtttcctgtctaagcctccatttcctcatctgtaaatgcgcagagccacaggtcatcacagtgactagggtgctgcgcacacagctgcacgggtactgcttcccttattccctgagggccccatggtgctttcttccaagaaccccctgatagaactccagagatcacagatgggggtgtagatttgcctggtccagcctgagacggtgacagtcccaacatttccctaccagctgtgctgaggccttgggccctgtctccccctagatccagcctctgagggggaaccacctcagggctctcagagagaggcaggtcatgggggctgtgaaaagaccactgggccaagagctgggagacagctaggtccaagttcaaagccagcccagcccttgacagctatgtgaacttgaactaacccctggacttccctgggcctggggtttttcatctgcacaaaaggtgacctcgacctggaggtcgtgaggctcatagagtgaatgtgagaggcatggaggttcctgctgtggccccctcctcggcccaggttgcagtggctgtgggcacccagtccctgtctttcctggggcctctaccaggccggcatccatggtcttcctcccccagatccaggtctgtgtgtacatccaccagtcggtgtccaagaagtgcatcgagtacctggcagagctgacccgccacaactatgtgacccccaagagctacttggagctgcttcatattttctccatcctcatcgggcagaagaaactggagctgaaaactgccaagaaccgcatgaagagcggcctcgacaaggtgggcccaggcgagtccccgtggacaaggtcagctgcctgcaggctgcctgctcactcagccctgactccagggtgacaccatgctccgcctttc

SEQ ID NO: 29720 - DNA, 2300 bp, Homo sapien
aagtccccacctctgtctctgaccagcctcgccttcccaaagagacccttcccccttgaggcctcgcctccatgataggcagcctgcaggtggctctccgctcactcagtcattcaacaagcacttagcaggctccctctctgagccaggcgctgtaaagcactggggatacagcagtgtacaaaacagccagaaaagccacctagtgggaacatagaagagctcacacttctgcacttgctgcatgccaggcactgttctaaacatgccacctgtgtcccatttaatcctcatagccgccattacaggcaggcatcgttagctttgcccgtttcacagatgaagggctgaggtttgtggaggccaagaaagtcacccgaagtgggattagaatgcaggtatctggctccatgtctgagctcagatctctgcaactgccaagcactgtggcttagtgggagttgggaggtctctgtgagtgtcatggtggggtggtcctgagtctggcatctccccagggccagtaccgcacggtgctctacgacagctgggtcaagcagctcaggagccacaatgtcccacacacctccgagcccacgctaatcgggacgctggggaaccctgtgaagatccgatcgtggcaggtgcccaccccaggggcaggagtgcccaggcagggcctgtggtgtggtccaggctgggccaggagccttctgcctccttcctaccctgctttccagggcctggctcggagctgcctctgctgaaccctcctgtgcccagcaagagggtggtaggaggacaggaggagaaagctgggctgagtgtggcacagatgctagctaaatgtggggagagggattaggggtacttttaagagtgtgatggaccaggcgtggtggctcacgcctgtaatcccagcattttgggaggccaaggtgggtggatcacctgaggtcaggagttagagaccagcttggccaacatggtgaaaccccctctctactaaaactacaaaaattagcctggtgtaggggcacacacctgtaagcctgtaatcccagctactcaggaggctgaggcaggagaattggcttgaacccaggaggcgggggttgcagtgagcagagattgcgccactgcactccagcctgggtgacagagcgagactccgtctcaaaagagaaaaaaaaagagtgttgggtggaggttgagaaacagtgtccacagtagggtttagaagggttgtctggtcagatgcagtgtaatcccagcactttgggaggccaaggcaagtggattgcttgagcccagaagtttgagactagtctgggcaacatggcaaaaccccgtctctactaaaaattcaaaaattaaccaggcatggtcgtgcatgcctgtagtcccagcttctcaggaggctgagatgggaggatcacctgaacccaggaggtggaggctccagtgagccaagatcatgccattgccaaaaaagaaaagaaaagaaagctttcctaaaggaagtatctgagtgagactctgaagggcagggagagttggcaaagagaggtaaccaagaggccataggcagaggccaggcgtgggcagaggccaggagggtcagtggggtatgggctctatgaagatggtctcatcaagtgagcactcagtaggcaagaggacaaaaaggcacagcgaaggagggcctttctgtctgtgggtttctctgtccatctggggccatcagtgtccttgggcctgtgctctctcaggggctgtgccatggttaggtatccagcccaggagcgagggagaggcgggagtcctgggggtgaggcattgcctacattgtcacctgcccccaacctccaaggggatgcagtaaggagagggaagtccatagccgaaacacgaggccgggagatgctgatgccctcagtgaccctgcttgcaggaaagctctgacccagtccagtgcctggctctccacagatcgctggcctccccaacgacacactgtcagtggagaacggggtcatcaaccagttttcccagcgctggacccacttcattgaccctcagagccaggccaacaaatggatcaagaacatggtgagcccacccaccaggcaccaccaccccaccccagccaggcatagcaagggcagtggtgagccgcagagcctcaggctggctctcagtccctgcaaccccttcttttccccttcccttacaggagaaggacaatgggctggatgtgttcaagttgagtgaccgcgacttcctgcgcagcatggaga

SEQ ID NO: 29721 - DNA, 2300 bp, Homo sapien
cccccgtcagaaggtagagggagagcagtccttccctaaagaaaggcacctgtaaagggccgctgttaccacaggcccctgggcccttctctgtaatgtacactccctttcttgttttctctagaggcggtttttttttttttttttttttttttttttcttcctgcttcttttttcccatctcattctttgccctgtctcattgcgggatcatgacttagagcttgctgactcccattgcaccagctggctgggctgttcttctctgggaagtgctggttcacagggccggggagactgtgagcttttcttggagatcctactggaggtcctgcctgtgttcttgccctgtctcagatggtgcagaggaggcggctggttcatgcgcacaagccccatcccacagccctcccaacaaacccaagctagtggtgaagcctccaggcagcagcctcaatggggttcaccccaaccccactcccattgtccagcggctgccggcctttctagacaatcacaattatgccaagtcccccatgcaggtaagctgggagcacccttgcaggattctctacttgattctcttgagaggctgcaacaggcaattttcccatgtggttccttggtgttcatccttggcatggctgggtcaagctgcctgggcctgggttgctaggttcctctgcctgatatgaaaaggcccccacaacagcaggagcttagggaggcagggagagctcctttgaatttaatctagttacgtggctgtgggattaaatgtttaggtcacgctccttggtacaacttcatgggttgggttttactggcaaaataaaggcatgtgtttcagggcactctgtttctcttaaaacccctccgtggggttctatccagtgtaagtgggtggcagcctccccacaagccaaggacaggccatggaacagctggaggggttccgctgactcagtctggaaaaccatgttggctttctctctggctgtgagtgtctaggctcagcctgggccgagcagcacttgtttgtaactgccctggtctttgtcccaggaggaagaagacctggcggcaggtgtgggccgcagccgagttccagtccgcccaccccagcagtactcagatgatgaggatgactatgaggatgacgaggaggatgacgtgcagaacaccaactctgcccttaggtcagcccagctttctaaggctaccaggttctaggtgcttcggatcccatcctgaatatctcagtctgtgtctgagaatgccctgcagcagataatgttgagcacctgcggagtttggggccctgggggaggctggcatgatggggctgaccccaggtccccaggaagtttttggtgggctggggggtaaggctgagcacgtaagcttatatcatgtcctattggaagtggccttttagccaggccttgaaggattggttggggcagggatggaggagatgtgggtggtggggaggcagctttgctggaacacagggcattggcaaaaggccaggagtgggatggctggaatagaggaagtgtcttttgaggacacttggctgcagctgtcagaacttgatgccaggcttagcatggctagttcaagttgcttggaccaagtataaggagttttagggtcagcccctggaggtcgggatgtatttaagccattctgggtactgctgggtatggtcacctggcccgttcccttgcttcacatcttctcgggccccacaggtataaggggaagggaacagggaagccaggggcattgagcggttctgctgatgggcaactgtcagtgctgcagcccaacaccatcaacgtcttggctgagaagctcaaagagtcccagaaggacctctcaattcctctgtccatcaagactagcagcggggctgggagtccggctgtggcagtgcccacacactcgcagccctcacccacccccagcaatgagagtacagacacggcctctgagatcggcagtgctttcaactcgccactgcgctcgcctatccgctcagccaacccgacgcggccctccagccctgtcacctcccacatctccaaggtgctttttggagaggatgacagcctgctgcgtgttgactgcatacgctacaaccgtgctgtccgtgatctgggtcctgtcatcagcacaggcctgctgcacctggctgaggatggggtgctgagtcccctggcgctgacaggtgggccttggactggctcactggccacttggtgcacccaggagggaggagggaagtggccaag

SEQ ID NO: 29722 - DNA, 2300 bp, Homo sapien
gaccatggtaggcaccatgagctggaggcctgttgggtgtctctgcctacctcctagggagctggggctcagggccctctggtatgtggtacccagtggcaggggttgtcggtaccgacacccggctctggctggggtttcaccctacaccatattgcccgaccagctcctgattccctggctcaactgctcttctctgtcttccttcccactcctggcctgcccaaactcagggtttccttctcgctgattccttgtcttggtctccactagggccctggggggaggacgaggagtggacagacaaggcccggcgggtcatcatggagcgtatcggcctcgccactgcagggtaagggccctgtgcctgccctgttctactctctggagctgtacctactttgggagggacagagagtatccaggtgatttgtaaattgcaaggccatatggtgaatctggcaagatcaggcttagatcatgggttctcaacttgttgtcttatttcctgcctgggctgcctgtggcctgctcctgggtgggctgggggaggggcaggcctcagtggagccttaggcagcccaggtctgctggttcacttccagataggcccctcatacagcttgttggaaggtaccagctcaggtgcctggcatgtatggctagtcgctgcctgcctgttggggtggggcctatacctacagctgcaggtgtgactgcagggagccctgccaggatatctgcctcaacctgatggcggggccggggcgggagctgctctcacggctgcggctgtgactgcagggagccctaccacgacatccgcttcaacctgatggcagtggtgcccgaccgcaggatcaagtatgaggccaggctgcatgtgctgaaggtgaaccgtcagacagtactagaggctctgcagcaggtaggtgccctttcttcctggcctctgcccagcccaaccctccctgcattcctcctcccttcccccacagcatttgtctctgattcgtgaacatactctcttgtagatctgggcttcagctaaccacatcttttctttgcccccattgtgggaaaggtgggacttggagtggggagggagaatagcttctaaaaggaagtttgggtttgggtgttttatttccctgtgagtgaatgggtagagccaaggccattattcctttaggtcctcagcccttagctatttaaggtagaagcccgggtctaccctttctcctctgagccctggattctgttgttagctgataagagtaacacagccagagctgattcagacccacaagtctcaagagtcacagctgcctgaggagtccaagtcagccagcaacaagtccccgctggtgctggaagcaaacagggcccctgcagcctctgagggcaaccacacaggtactggggggtttgggacctcttgtggacctcagagccacccgctaatgtctgacatgggaggcctaaacagggaaagtctttttctggggatgtccttgggcagtgttcttcccccgtcagaaggtagagggagagcagtccttccctaaagaaaggcacctgtaaagggccgctgttaccacaggcccctgggcccttctctgtaatgtacactccctttcttgttttctctagaggcggtttttttttttttttttttttttttttttcttcctgcttcttttttcccatctcattctttgccctgtctcattgcgggatcatgacttagagcttgctgactcccattgcaccagctggctgggctgttcttctctgggaagtgctggttcacagggccggggagactgtgagcttttcttggagatcctactggaggtcctgcctgtgttcttgccctgtctcagatggtgcagaggaggcggctggttcatgcgcacaagccccatcccacagccctcccaacaaacccaagctagtggtgaagcctccaggcagcagcctcaatggggttcaccccaaccccactcccattgtccagcggctgccggcctttctagacaatcacaattatgccaagtcccccatgcaggtaagctgggagcacccttgcaggattctctacttgattctcttgagaggctgcaacaggcaattttcccatgtggttccttggtgttcatccttggcatggctgggtcaagctgcctgggcctgggttgctaggttcctctgcctgatatgaaaaggcccccacaacagcaggagcttagggaggcagggagagctcctttgaatttaatctagttacgtggctgtgg

SEQ ID NO: 29723 - DNA, 2300 bp, Homo sapien
cacttcccaagcaaaaacatggcagcatcccaccctccaaacaaagcacagagtccagcagacctggtgggcaaagaacatgttattcacaatatcatcatcaatcacggacgtatcatccaccaaggtagagacctttcgccgggaccggcgctcttcgatccatttgaacaggaagataaatccatatacagggctgggggaagtaaggggcagagccagatcagccaaaggggagaagacaatcagcattcccttctttctcccattaatcctttgcactgcgtcatcactcaggtgtccttgctgtgatcccccctctcccctggcttcttcccaacactgtgtctgaagtggccttgtgccctcacacaccaaaggcctgccacaggcagagcaaagcataagcctctgactgtgatgctccaggagtccacccagtctccttatgaagtctatagttctgggtaagagaagaaaagctggaactgagggccaaggatgggacagggtaggaacacaaagtaagacaagaacaaaaactctgatgaggaactgaggcactccttctcacttgtgggccccaatgcagtcaggaaagcaaatgaacacccacaccagtctcttttgttccaggaaattaaagtagacttcttggttcagtcacggttgctactgttgctactctcttacacatctattctgcaggaccactgggaaaagactctaagtgtgggcacccaggaggggccttgtcaccccaaccaatcaatacaggatgactttgtgtcaggattaaagccaaggacacatgggcacactaaaattaatacattacacaactgcacaaaagacattgtgtgaccggggtcttcccgctgcaaggccaggaaagcagctgaaccaaaggatgcttaggggtggggagggggctgctacaaaaagggaagcgctaaggaaagtttgggagaaaagaaagtatcagtttgatcaggagcgggcactcagagagcaaggctgctgctttctgtgagattttacaacgtagggttcctggcactgtcttccctaaggggccctgttctctgggaccttccccagcactctgggtgtaaggggcagccctggtgtacagccactcacccctgacatttgctctgaaggtcgtagatctcctccacttgcacccccttgacacctgcgatgaggaaaggaaagcagtagggaaggacagcccctgatgagtgagggcgcaggggtgggccgccacagccccggtccggcagggagaaaaggctcttaccgaaatcttccacgagcagggtgaagaggcctgggtggggcgacaagaggagggggtgatggtcaggcaggcgcgtcccgggcccatccggcctccccagcccctggccctcccggtcccctcctcacctgggtcgctctccagctccagccagcccttattcatcttcccgcggggcggcccctcagcgccatgtccaggccctccctccccaccgctgcccccaccgggagcccccaccgcccccggggcccctcagtcccacacacagacaacgggcccagtcgcgtcacccgcccgcgccggcggcagacgtcaccaaggcgcgacggccctgctccgcctctgggctcgtcttccgcctgtcggacagcagatgcgggcatgcgctcgaaggcgaacgcgcacgcgcggagggacgggggcgaaggggagggacgggggcgaaggggaggggcggggcgggacgggacgggggcgaaggggaggggcggggcgggacgggggcgaaggggagggtcgggacgaggcgggcgaagggaagagggggtccgggcgatgctgagcgctgaggctcgagaggaggggcgggacgggcagtactaggcccgggtgctgcgaggggaggggcggagcgggcgaggggaaaaggcggggccgggaagtgctgggcgcaggtggggcgagaggaggggcggggcaggctaggggaaaaggcggggatgggcggggctgggcgcggatggtgggagaggagggacggggcggggcggcgaacggaaggggcgggggcgggtgttgggcgctgaggcgcgagaggaggggatgggcggggcgcgcggccgttagcgcgcggccgttagcggtcggtttctactaacggtaggcgtcgccgcgattcccgaaggtcatagtccgcgtgacccacccccgtttgcgcgctcgcagtcttcgccggcgcagtcaccgcgcagggcggccgcccggaggtagctac

SEQ ID NO: 29724 - DNA, 2300 bp, Homo sapien
ccaagtagctgggaccacaggtgccatgccaccgcaccagctaattttttgtagagacagggttttgccatgttgcccagactggtcttcaactcctgggctccagtgatcctcccgcctcagcctcccaaagtgctgggattacaggcgtgagccaccaggcctgacctctcctatcaattcttttcacctaggctcaggtggccactgagatatggtctgtacccaacctttgtctccatctgagccgagtacaatagccaaaagtgcagaaggtaccttgtctcctatttccaatgtcagccaactccggctgttacctgttttcattagtaaacaaactgtaaaacaaatgtacagtttcactggttaacggggagatccctgaaagtgaacgggaacgaaagaaaatccaccgctgtgaagcaaggactgtctagtcaggggagaggagaaggacagcatttcttagaaggagggctgggtgaatcaggtcactccagagacactccagtatccatggcctccgatcacggctggagatcgggaatatcttcagggactttaaactattctgcatgaataaggacgactgaggaaattactgttcaagaaaccaaagccaccctgccctccccttctttgtgcttgttctgtctcctcctctaacccaggagttgcagaagcaatgacatctgatggcttcttccttaaggaaaacactggacaggctggaagaggagagagaagggcatgtcctgaccttgctattcccacaggggtccacgtgagcggactgcggagcagttcccagttactggggctaccccgaccatccagcaatagacataaaaccttgaaacttcagttctttgcatcgctgggccaagacgttccttgagtaggattctgtgcacacactgctagttacaagacgtcacgatcttcaaaacatctgaggggtggctttgcaaatgaggcttccacaagctgccaggcagtggcttcctaacccggcggacgcccctcgaaacgattatcaagttgtttcactggacaggtgctgggtaaaagcttgttgagaaaataaaaaataaataaacgtgttcgacccgccgccgcaagaatgatttatctgtaaaatacgtgtcggtgtggtcacaaccgttccccggaggttaacagccggagaaggggcttaaggagcatcccgcggatgccagaccaggctcatgtcgcgcctgccgggcggccagtgcagggccgggccgaggtcgcctccgccgctcctcctcgcggtagctcaccggccgccgctcccggccagagccaccctcccagctgtctgagggcgccgctgtactggagctttagtcgttgacacaggccgtggtagctacctccgggcggccgccctgcgcggtgactgcgccggcgaagactgcgagcgcgcaaacgggggtgggtcacgcggactatgaccttcgggaatcgcggcgacgcctaccgttagtagaaaccgaccgctaacggccgcgcgctaacggccgcgcgccccgcccatcccctcctctcgcgcctcagcgcccaacacccgcccccgccccttccgttcgccgccccgccccgtccctcctctcccaccatccgcgcccagccccgcccatccccgccttttcccctagcctgccccgcccctcctctcgccccacctgcgcccagcacttcccggccccgccttttcccctcgcccgctccgcccctcccctcgcagcacccgggcctagtactgcccgtcccgcccctcctctcgagcctcagcgctcagcatcgcccggaccccctcttcccttcgcccgcctcgtcccgaccctccccttcgcccccgtcccgccccgcccctccccttcgcccccgtcccgtcccgccccgcccctccccttcgcccccgtccctccccttcgcccccgtccctccgcgcgtgcgcgttcgccttcgagcgcatgcccgcatctgctgtccgacaggcggaagacgagcccagaggcggagcagggccgtcgcgccttggtgacgtctgccgccggcgcgggcgggtgacgcgactgggcccgttgtctgtgtgtgggactgaggggccccgggggcggtgggggctcccggtgggggcagcggtggggagggagggcctggacatggcgctgaggggccgccccgcgggaagatgaataagggctggctggagctggagagcgacccaggtgaggaggggaccgggagggccaggggctggggaggcc

SEQ ID NO: 29725 - DNA, 2300 bp, Homo sapien
tcagacagctgggagggtggctctggccgggagcggcggccggtgagctaccgcgaggaggagcggcggaggcgacctcggcccggccctgcactggccgcccggcaggcgcgacatgagcctggtctggcatccgcgggatgctccttaagccccttctccggctgttaacctccggggaacggttgtgaccacaccgacacgtattttacagataaatcattcttgcggcggcgggtcgaacacgtttatttattttttattttctcaacaagcttttacccagcacctgtccagtgaaacaacttgataatcgtttcgaggggcgtccgccgggttaggaagccactgcctggcagcttgtggaagcctcatttgcaaagccacccctcagatgttttgaagatcgtgacgtcttgtaactagcagtgtgtgcacagaatcctactcaaggaacgtcttggcccagcgatgcaaagaactgaagtttcaaggttttatgtctattgctggatggtcggggtagccccagtaactgggaactgctccgcagtccgctcacgtggacccctgtgggaatagcaaggtcaggacatgcccttctctctcctcttccagcctgtccagtgttttccttaaggaagaagccatcagatgtcattgcttctgcaactcctgggttagaggaggagacagaacaagcacaaagaaggggagggcagggtggctttggtttcttgaacagtaatttcctcagtcgtccttattcatgcagaatagtttaaagtccctgaagatattcccgatctccagccgtgatcggaggccatggatactggagtgtctctggagtgacctgattcacccagccctccttctaagaaatgctgtccttctcctctcccctgactagacagtccttgcttcacagcggtggattttctttcgttcccgttcactttcagggatctccccgttaaccagtgaaactgtacatttgttttacagtttgtttactaatgaaaacaggtaacagccggagttggctgacattggaaataggagacaaggtaccttctgcacttttggctattgtactcggctcagatggagacaaaggttgggtacagaccatatctcagtggccacctgagcctaggtgaaaagaattgataggagaggtcaggcctggtggctcacgcctgtaatcccagcactttgggaggctgaggcgggaggatcactggagcccaggagttgaagaccagtctgggcaacatggcaaaaccctgtctctacaaaaaattagctggtgcggtggcatggcacctgtggtcccagctacttgggaggctgagtcaggaagatcatctgagcctaggaaagtggcactttcatgcactcacccactgcactccagcctgggcaacaatgagagaccctgtctgaaaaaaaaaaaaagtgatagagcctagggggtgtttgtcagtgttacctcttgtctctcactagagggagttcttgcttttaggcagcccaaatctcacaggctcctttgcttaggaaaaagctaccttatctagctttcactgggtagaattaaggcacccatacttaggtgcaaaaggagcctttttttcctgagtgctacttcacgtatttttttgtaggcacaaagaaacaaccatttagctaggtcaagtaatggttctaagttcttttgctactgtgtgatagcagtataacatgagagttagtgttggcctctggagccaggctacttgagttcagatcccatctatatcacttactaactcttaccttgggcaggatacttaaacctctctgtgcctcagtcccccatcttgaaaatggggataataatggtacctactgcatggcgtgtttgtgagttaacacatgtcaagtacctagaacagtcccttttattccatcacatgggttgggaggtgaagtgcaccattgccttgaccctggggaacttgataaccaaatacagaattaaattgcttaccaaaccccatttatatttatagctggaagagcctgtattgtcctcacaatagtatagaagaattcaagagaggagagagagacagcaccgaatgaagactgtaaaagaaaagaaggaatgccagagattgaggtagaagtagttgacatagggaatttgggagaaattgtccaatggcctgtggtataggctgcactttttgccccctttgtcgtagtcttgggggttgaggttggacagtgtggaagcacacacggagctggga

SEQ ID NO: 29726 - DNA, 2300 bp, Homo sapien
ccggccccagtgtgccccgcctgcggctctcctaccgaggtaccagcccctgcgtgccctgtttgtgtgcatgtgccctgtttgtgtgtgtgcgctctgtttgggtgcatgtgccgtgtttgtgtgcatgtgccctgtttgggtgcgtgtgccgtgtttgtgtgcatgtgcagtgtttgtgtgcgtgtgccgagtttgtgtgcgtgtgccgagtttgcgtgtgccgtgtttgtgtgcgtgtgccgagtttgtgtgcgtgtgccgagtttgcgtgtgccgtgtttgtgtgcgtgtgccctgtttgtgtgcgtgtgccctgtttgggtgcatgtgccgtgtttgtgtgcgtgtgccctgtttgggtgcgtgtgcagtgtttgtgtgcgtgtgccgagtttgtgtgcgtgtgccctgtttgggtgcgtgtgccgagtttgtgtgcgtgtgccatgtttgtgtgcgtgtgccctgtttgggtgcgtgtgccctgtttgtgtgcgtgtgccctgtttgggtggcttgggctcttgggtgcctggtcagctgtaggggagggagcctctccctgcacagctctcggggagtgggagggaggcaggtcctgggagacaggaccagggtggcggtgggaggcacctgagggggagtgctgagaaagggacagatggagaccctgagagagctcaataaagatggggaggagacagaggaagggaccaggcaggggagagtgacagagagggtggggctgaagggtctgtctgggctcaactggcactttttgcccagggtggccaacgggagagcaggcagcatgctatcccttggtcctggggccacagagaaggggaggaccccccttgcagcccacttcccagagtgggcttgttcatgtgctcctgcacccaagaagcgccccagcccagggggagtttcacctcccctttttgcacatcccagcctgggggttcctgtgttctaccctagacatgtgagccggctcaggcctccacggatgggcccagggaaggcccgagacaggctcttggcagatccttcctgaggaaaccagaggggtgaccaccttcccctgggaagcccagtctgctgggggagatggcgctcgtccctggagaggctgaggggaatgtggtcttgttccgggagctgtggttttgcggggaggtcagactgctagaaaaagccccaaatagggaaagttccccaaggtactgtcatccatggagggcttcccggaagagaccgttgatgagttttgggggtggaatgggtgttgggtagaggtgcttccgtagggaaggcataggacactctgggccttcccaaaggtggccagcaccctcttcctgccacatcctactgcccccattacctccacctccctagccaagcccggaggacctacctcaggatcctcaactcctgggaccgatgtccccagacagctccccgctctcatctctggggtgggatagccagcatctgtggggagaaaattgtctttggccgcatccctggactggaggtgggagcccttcccggccataccttcccttttctgcacccaggccattgccaggggtcccctctgctgggaacagtttcgcctgctggcccaccctccagctgagccaggcggcctgcaaagactcccgcccttcctccaggatcttccagcactttgctctagtttctgctggttggggccttcttccctggggactgggtagggcacagatgggacagtgggaagatgttagctgcatgatgaagggctaaggaatggaggggtgggaggtaggccccagggtaggctgggccaggtgggaggctctgagcctcccgtcccacctgtccccaggagccatggtccgaaagccttccagcaccatgtggatggaaacattttccagatgtgagtgtgtcaggggtggatgctcagccggggcctccacctccactccttggctggggaactaggctgagctgtggccctgatctgcctccccatacatcctcctagacctcctgtctgccaaccgctctgccatctttctgggcccccagggctccctgaacctccaggccatgtacctagatgagtaccgagaccgcctctttctgggtggcctggacgccctctactctctgcggctggaccaggcatggccagatccccgggaggtgagctggactggcagggaagagggtctgtttgagaactgggcacctccagatgggaggccagatggggaaactgagcctgtgagatcagggga

SEQ ID NO: 29727 - DNA, 2300 bp, Homo sapien
gcaagcaggggggcctttagagacgatccctaccctctgcccccaggcctggaaaactgaagcccagagaaggagaggacctgactgaggccacacacattaacagtagagttcggactcccagcctgccacaggctctttccgcagtgtggagtaggctgcccccacacccttccccagtcgacccaggcttccctgcagcccctgctgggtgtctggctgagctgagaccccaggatgggctggcaggctgaggagtgttgggcctcctgcccgccgctggtggtcacatgctggctgaagggctgcctagctcagtctccagttagaagttggccccagcttgggcagtgtgctggccacacctccccagggaaacagagacagaagcagtccactccaaggtcccaggatatggtcaccctgacagcagcccctgcgcaagcccactcatcaggttatgaaggctgcttacacccagggtggctggtccctggccctgggaggaagaggcagacccagagatggaagggccttggccaaggctctccagcagggccagaggcagggctgggctgagctccatcactggcctctgtgggcagccccttgcccacctccaggccagccccctgctgaagaaggcatgtgtgagtgaagggagctggggacagggaggcagagttgtaggtctctgagacctgtcatgctgacccaagaagccaacctgtttccatttcaggattgaggtaggggaggagggtggggtccccatactcccaacaacgcccagaagcaaaggagggtcccaggaaggggcagagctgagctggacccattctcagcctgctctgtggcctgggccaggtccttccctctctgagtgccccgcaagttccctgaccaccatcagagggcccaggccggtccatgtgggaggcccaacctgcaggagctgttagaatcctgggaactcaaactccagctcaaaattaaaatctctttagtgcccagggcctcaggttctgagtgtagggttctggggtggggtgaggtggcgactgttctggggcagggagcatggggaggtcccgtcactcaccccagattcaggccctcagtcccatttcccctttggccctcttctgtggctttctgtgccccccgccacccagtcagtattcagggtgggggaagtgacctctaagagatcataggtgtctgtagggcctatggggcatggggtccctgggaagaaccatcactgacctggggaagctctggaccctgagtctctggaaggactggaggcctgagggaggcagggcaaggggaggttccctcggcatggagtcccctgatgcccctgtcccctaccccaaagcaagcctggtgagctgagatggggcatgtagatgtggggagaggctggggtgcctggaagccagatggggacaggcctgggtggaagaggctgggcagtcatctcttgctggctctatgaagtgttgccggacctcaaacacctgtctaggacatggcgccccttgggctgggaatggccctccacccttacccaggggagctggagagtctggccaaagcttcagggggctggaatatcctggaattggggcagggccagtttggaaggtctctgctgtgggcagtggaggggcagagaacaaggcagagcccagctaggcccctacccagcccatcaactttaacctctgatccctgacctcccttccaggctctctccccacttgtcactttgctggagcctggggacctgcatttgtggacatctctgtacacatggcctgtgccctagctgggaaggtcttcccaatggggagctggccagtgtggcacaaaagcctgcactgggccaacaaggtggaaggagaagcggcaggtggacggcaaggccccagcctccttctctcctccgcccctcttcccgcccaggactgggtggagccactgccttataagtggtggcctggtggcagcagagcaaactacaaccggcggccagcgggaccagagggcggctctgcaggcaggcggcagcggtgccctcagttccccagcatggccccctcggcctgggccatttgctggctgctagggggcctcctgctccatgggggtagctctggccccagccccggccccagtgtgccccgcctgcggctctcctaccgaggtaccagcccctgcgtgccctgtttgtgtgcatgtgccctgtttgtgtgtgtgcgctctgtttgggtgcatgtgccgtgtttgtg

SEQ ID NO: 29728 - DNA, 2300 bp, Homo sapien
tcagaagccaaaattagtccccaactccgccaggccttgtatgggcactgggtggagggctgtcccaaccccggctccatggactcccacaggataagcaggcgtgcccccagagctggctatagcacttccctgcccaggagtgagggaggctgagggaggggttcccctggggacagctggccatgccaggatgtccttgctctggggttgggggaggtcaccaccacccaggatagaatagcatctgaagaccctcagtgacccaggaggttgcaggggcttggggtgaccactctccagccctcattccctcgctctcacccctagctaagccactgagccctgagcctgccaggcatgatgggagctggggccccagttctctgttccttcttccttggttctccctcatgtccagaacttccctgcctcaaacttcaaagccccatctccagcccaggactcaggctctacagacccctcctctcacaccctccaccctccaaagcatcttcggcccgccaaggggctggagtggggtggcagattttgagcatgtgagaagcagaatgtgaggggcagaaatgggggttggggacagggagacagtaatggggactcagacagctcaggaggaagagatgaaaagagaaaggcaaaaacgtccagagacaaatgcagagacatgtggctgagcgacagtgccacagaccacagacacttggaaacagagagtgagacacgatgctgaaagctgcaacctcctccaccacccttcagacccggaaccccctaccccttctgcatcctcaaacaccagaatcactgtccctgtgagggcctgggttgaaggcacgtaggccttctccttggtccccaccacttccctggggctactaaccccgcactctcagctgagtgagcccccagtgggcctgcccaccccagccctacccagccctgtccctcaccgcagccttgtagatgtcatccatgctggcggctcacaggacagcttgctggggttgccagccggcccttgacttaaatagccctgccccgctgcattcctggcccagcccagcccagcccagcccacccctgcgtgtagtatcctccagcccctcctctggtcccagtgatctcaggctggcctgagtccccacgtcctctgcccagggcagggagcagacgaacggctacaaggaccaggtttctttccctcctgtcccccacactccccaaagggactctctgaaaaggtttctggaatgaatgaaaacataagcccagtgcaggacaggagctacaaagtcgtgggccccaggcaaggtgcaacacaacagctcaggctcccatccaaccaggttggcgggttgccatgacctccactttccagataaggaaactgaggctctggaggagtggtgacttgcccaagatctgactgacttggtaacccccgcctttaactaaacctctctggaatgggggtgcaatgtgcaaggagaggctaggagtgcagggccctgccaagagaagcctcgaatgccaagctcatagtaagatgctgtggaactggtgaaggaggaagtgactgacccaccttaggacagggtggccaggagcccttctgccagaggagcctgtcccagacctcccatctgcccagggagaagtacccacttcgggcttaagtcagctgctctcagttattcaacagcacccctatagatgccccatctgtggcaggctctttccctcctcaccctccaattaggttaccacctccctcttctaggtctcatctttccccggtttaggattcagcactgtagttcctgggtccagatcaacctgtctccctcgttttgaactttggcaggccaccccgtggggttcttgtgctcagtggcagcacacacccctccatccacctacaccttccttcgtacagagttcgtatcaagtttatccctcttgataaacacgctccctgcctcgagcactactgcgtgctgggccgcgcatcaatcaacccactcagttgtccagaagccccactgacaagagatctccgaatctcagagaggttcagaactggcccagaatcactctcgccctgctccggcggtaagcacaggtcctattttcccctccaacctgccttgccctaaagagaaagagcccaacagccaggtgaggcactattatggcctcctttatcaggaggagtaaactgaggccaggaagagcagtgacttgcttcgtgtggcctgggagactcgggaccttct

SEQ ID NO: 29729 - DNA, 2300 bp, Homo sapien
atcttcggcccgccaaggggctggagtggggtggcagattttgagcatgtgagaagcagaatgtgaggggcagaaatgggggttggggacagggagacagtaatggggactcagacagctcaggaggaagagatgaaaagagaaaggcaaaaacgtccagagacaaatgcagagacatgtggctgagcgacagtgccacagaccacagacacttggaaacagagagtgagacacgatgctgaaagctgcaacctcctccaccacccttcagacccggaaccccctaccccttctgcatcctcaaacaccagaatcactgtccctgtgagggcctgggttgaaggcacgtaggccttctccttggtccccaccacttccctggggctactaaccccgcactctcagctgagtgagcccccagtgggcctgcccaccccagccctacccagccctgtccctcaccgcagccttgtagatgtcatccatgctggcggctcacaggacagcttgctggggttgccagccggcccttgacttaaatagccctgccccgctgcattcctggcccagcccagcccagcccagcccacccctgcgtgtagtatcctccagcccctcctctggtcccagtgatctcaggctggcctgagtccccacgtcctctgcccagggcagggagcagacgaacggctacaaggaccaggtttctttccctcctgtcccccacactccccaaagggactctctgaaaaggtttctggaatgaatgaaaacataagcccagtgcaggacaggagctacaaagtcgtgggccccaggcaaggtgcaacacaacagctcaggctcccatccaaccaggttggcgggttgccatgacctccactttccagataaggaaactgaggctctggaggagtggtgacttgcccaagatctgactgacttggtaacccccgcctttaactaaacctctctggaatgggggtgcaatgtgcaaggagaggctaggagtgcagggccctgccaagagaagcctcgaatgccaagctcatagtaagatgctgtggaactggtgaaggaggaagtgactgacccaccttaggacagggtggccaggagcccttctgccagaggagcctgtcccagacctcccatctgcccagggagaagtacccacttcgggcttaagtcagctgctctcagttattcaacagcacccctatagatgccccatctgtggcaggctctttccctcctcaccctccaattaggttaccacctccctcttctaggtctcatctttccccggtttaggattcagcactgtagttcctgggtccagatcaacctgtctccctcgttttgaactttggcaggccaccccgtggggttcttgtgctcagtggcagcacacacccctccatccacctacaccttccttcgtacagagttcgtatcaagtttatccctcttgataaacacgctccctgcctcgagcactactgcgtgctgggccgcgcatcaatcaacccactcagttgtccagaagccccactgacaagagatctccgaatctcagagaggttcagaactggcccagaatcactctcgccctgctccggcggtaagcacaggtcctattttcccctccaacctgccttgccctaaagagaaagagcccaacagccaggtgaggcactattatggcctcctttatcaggaggagtaaactgaggccaggaagagcagtgacttgcttcgtgtggcctgggagactcgggaccttctgtcccctcttcccgaggacccaggggcgatgcccagagctgtcaccacccggggtctcagtttctagcaggctgtgcagggtaccgccggcggcgccacgcaggtagattacgcaagcgagcacctcgcacgcgcgccctgagtggcccctgtcagtcacgcgcgggggcggggcgagggcgcaggaagaaggcggggccaagatggcggcgcagcgcgcggcgggggcgacgggcggcgggggccggggggcggtgggacgttgaccccgccccctgctgctgctagtctgcgccgggcggcggtggcggcggagacccgaacatggcgaccgcgcgcaccttcgggcccgagcgggaagccgagccggccaaggaagcgcgcgtcgtgggctcggagcttgtggacacttatacggtgtgttgggggcgcgggcacccgaagcgggggtggtggctggaaccgggagtccgactcgggggcttggggaggggtccgggatctgcagcccc

SEQ ID NO: 29730 - DNA, 2300 bp, Homo sapien
tccatccatcagagaccctctccccatcgccttcctcctggacccctgtaacggtcttccaggccggggcccctccagtcctagaggatctagaggggttccgcctcatctagacacccccctccccaagccccctttatccccagatgccgcccccaacccgagcctccctttctgatcgcgtacccttttccaaaccgcctccccgggccccgagcaacccttctcccggacctgcggggcccagatccctttcctagatcccccgtcccagccccctcctcgcaatcgcagacccttctacccgctcctcggggctgcagatcccggacccctccccaagcccccgagtcggactcccggttccagccaccacccccgcttcgggtgcccgcgcccccaacacaccgtataagtgtccacaagctccgagcccacgacgcgcgcttccttggccggctcggcttcccgctcgggcccgaaggtgcgcgcggtcgccatgttcgggtctccgccgccaccgccgcccggcgcagactagcagcagcagggggcggggtcaacgtcccaccgccccccggcccccgccgcccgtcgcccccgccgcgcgctgcgccgccatcttggccccgccttcttcctgcgccctcgccccgcccccgcgcgtgactgacaggggccactcagggcgcgcgtgcgaggtgctcgcttgcgtaatctacctgcgtggcgccgccggcggtaccctgcacagcctgctagaaactgagaccccgggtggtgacagctctgggcatcgcccctgggtcctcgggaagaggggacagaaggtcccgagtctcccaggccacacgaagcaagtcactgctcttcctggcctcagtttactcctcctgataaaggaggccataatagtgcctcacctggctgttgggctctttctctttagggcaaggcaggttggaggggaaaataggacctgtgcttaccgccggagcagggcgagagtgattctgggccagttctgaacctctctgagattcggagatctcttgtcagtggggcttctggacaactgagtgggttgattgatgcgcggcccagcacgcagtagtgctcgaggcagggagcgtgtttatcaagagggataaacttgatacgaactctgtacgaaggaaggtgtaggtggatggaggggtgtgtgctgccactgagcacaagaaccccacggggtggcctgccaaagttcaaaacgagggagacaggttgatctggacccaggaactacagtgctgaatcctaaaccggggaaagatgagacctagaagagggaggtggtaacctaattggagggtgaggagggaaagagcctgccacagatggggcatctataggggtgctgttgaataactgagagcagctgacttaagcccgaagtgggtacttctccctgggcagatgggaggtctgggacaggctcctctggcagaagggctcctggccaccctgtcctaaggtgggtcagtcacttcctccttcaccagttccacagcatcttactatgagcttggcattcgaggcttctcttggcagggccctgcactcctagcctctccttgcacattgcacccccattccagagaggtttagttaaaggcgggggttaccaagtcagtcagatcttgggcaagtcaccactcctccagagcctcagtttccttatctggaaagtggaggtcatggcaacccgccaacctggttggatgggagcctgagctgttgtgttgcaccttgcctggggcccacgactttgtagctcctgtcctgcactgggcttatgttttcattcattccagaaaccttttcagagagtccctttggggagtgtgggggacaggagggaaagaaacctggtccttgtagccgttcgtctgctccctgccctgggcagaggacgtggggactcaggccagcctgagatcactgggaccagaggaggggctggaggatactacacgcaggggtgggctgggctgggctgggctgggccaggaatgcagcggggcagggctatttaagtcaagggccggctggcaaccccagcaagctgtcctgtgagccgccagcatggatgacatctacaaggctgcggtgagggacagggctgggtagggctggggtgggcaggcccactgggggctcactcagctgagagtgcggggttagtagccccagggaagtggtggggaccaaggagaaggcctacgtgccttcaacccaggccctcacagggacagtga

SEQ ID NO: 29731 - DNA, 2300 bp, Homo sapien
agggagtgggtgggggccttgggcctgcctgcacctcccctccctggccctcatcctaaccttccgctctgagggccattcttctggctcttttctcctttcctgaaggcaaggggaaggaatcaggcaggatgggaagaggagaggggtggatcttgaagcaacaggccagcctggagaaatggctgctcctcagggctggaggaggcttcagctccatgctgcagagaggagggggaaactaggtgcaggaggcgggtgaggtctctaagctgatggctgactggccatcagctatgggcacattcagccagagggccatcttcaaaaagctcaccctattctggactgcgcccctcctctgcatgtatgtcgggggaggtggtgatctagtttggaccctaccatcctctgtctccgggtgtgccgagttggacattattaacacacctaccttttgaacacttgccatgggtcaggcccatgtacaaagcattttacatgcattgccttacttggtccttgattctaagatggaggaactaaggctcagagagaacttaggctccaagttacttatataagtgacacataagctgcagccaggaaatggcagaaccaggtttttaacccaggccttccttaacctctaggccatattgcctcctgatagagcttagttgctaccactccctccccacatcagctgcttgtgccttgattcctggctcagcagcagaaatcacagccatgaaccagttgaaagggttggaaaatgacttgcttccaggaggtagtcagggcacctggaaagaagtacaacagagaagatgctcaggctagaactggccctgctctgcctcccttggaagaaatggccttgcctgcagctccggttgggttttgagttacctagaggcaggaggtaaaaaactaaagaggtgacttgtggtaatcacctttttcattccttactgatggatggagccacatgcttgtctcatgtgcctcccagccctagtgcttgggccatggaggaagctgagaggggccctgctggtcagcaagggtcaggtgcagaggctggtgggcaagggcagcctgactttggccttggggtgggtctgagttgcagagagaaagactgataaaagataattgggaaagataattgcagcttttgctgctgggggaggagactccttgttgctgggctcccttgccacaagggctgttggtttccccttttaggtttacatcatccaggtcactgatggcagccatgagtggacagtaaagcaccgctacagcgacttccatgacctgcatgaaaaggtaactgttaagagctgggagcacgtatctcagggctgggggacccgtaggccaactttccattgtgccacatattagttttagggcaaaacaggttccatctctatagttctttaataaaccactttgttaatataactgcgttcattaatatagcatgtaaatgctagccttcagctctagcatgagccactctgcaaggagcatatttgaatttcagttttaatatttccagtcctagcttgggtatgagatgctcagacagtttcctgggaaggggacaggtttgaacttgtttgatctagcgatagctattccaaagccttactttaatatctggctgtgattccatctcttttttttgcttttggagatgctgtctttctctgggtcatttgcagcataactgttttaaagacacaccgctgccctgattggtttttactctggcttggaaaagatggcaattttaggggcaaaaggtgttacttttctgaatgtctctaaagtctccagatggaattccttgtctagaattgtattggtatttctaatgctaattggatttaaagaggccaaatcccaggtgcactagtttggtcactgattttggtactactgcagggaggggctgtgcaagtgctgacaagcgcctgccctcaagcttcttgccttggtcttacataggcacagagcctcttagtctgtggttgatgtgcttatgtttttttacagctcgttgcagagagaaagattgataaaaatctgcttccgcccaaaaagataattgggaaaaactcaagaagcttggtggagaagagggagaaggatctggaggtctacctccagaagctcctggctgccttccctggcgtgacccccagagtactggcccacttcttgcattttcacttctatgtaagttcctcatcgggttttcacctgtgcctgcaaacccacaactg

SEQ ID NO: 29732 - DNA, 2300 bp, Homo sapien
ccaagccctaggtattccccagtgcacagagaccattgggagggacttgccagggctgtgtccactgctggccagttagggtcggaccaaatttgtagactgtctacctggacccttgcgtggcacaaggagcagtcagatgctggatccctggagagtggcgagaggctctggccctaggttgcgagtgggaatcccagccctgctgtgtgctggtgggataaccaagtgggtctctgcccttgggtcccagagtgggccccagggtcccagagtgggctccagggtacagcgtggggatggggagcctcctcagggcggtgatggagggcagaatgcccagctcagggtctggcaaccagtaaatggctggggctggctgcagtaggtggggactgactgtgtttctttctccatcaggcagcttccgatgatttaagggacgtgccaggagctgttggtggtgcaaggtaaggaagaggttggaaagggacctgggcctggccacacagccttatgcacacacactgctgtgggccaggggtggccagtcaggtttttttaaaaatccgttcacagaaggcctatagaactatttcttcctctaaagagacacagatgagatggacttttcaatctgtttccaaattctaatacctaaactctgctcagcacatgttgccctacaccaggggttggcaaatcaaggcctgtgtgtggcccacagcctgggagctaagaatgacagttacattcttttttctttttttgagactgagtctcgctctgtcgcccaggctggagtgcagtggcgtgttcttggctcactgcaacccccgcctcccagattaatgcaattttcctgtctcagcctcagccttctgagtagcccggaccacaggcgcacgccaccacgcccaactaattttttatatttttagtagagacagagattcaccatgttgcctagctggtctcgaactcctgaactccagtgatccaccaacctcggcctcctaaagtactggaattacaggcatgagccaccgcgcctggctagaataacagttactttttttttctttgagactgagtcttgctttgtcacccaggctggagtgcagtggcccgatctcagctcgctgcaacctccgcctcccgggttcaagcgattcttctgcctcagccacccaaggtgcccgccaccacacctggctaatttttctgtttttagtagggacaggatttcgccatgttggacagttacattcttaaagggctgctgaagatcgtatggacatggtagcccataaatcccaaaatgtgtactctgaccctttacagaagcttactaactcccactctacatgtgagggctgcggtggccaagaagagctggaatttaagtgtgaaggtcctaagacctgccccagcccacttccctgccccggaggccaccaggggtgacaagtagattcatgccctggagtgttccttctctccggggcttatggcagcaactgaatgacttagaagtccatgggagtgcttctgttgtgggaactcgtgtggtctgggcatagctgtgccaggcacctatggtccaagcccctagaagcatagactctgaccaaactggcgacccagccttccagcaggcagcactggctcccaccagggccctcatcctgggaactgacttggccatgtgggaggcttgggagacccatgggttggtttctcagggtcagggtgtagcagtgggctccagatgtggcaggtgggaggtgggaggggcccctcccagcatgccactgacctggcctctccctgcacagcccagaacatgccgagccggaggtccaggtggtgccggggtctggccagatcatcttcctgcccttcacctgcattggctacacggccaccaatcaggacttcatccagcgcctgagcacactgatccggcaggccatcgagcggcagctgcctgcctggatcgaggctgccaaccagcgggaggagggccagggtgaacagggcgaggaggaggatgaggaggaggaagaagaggaggacgtggctgagaaccgctactttgaaatggggcccccagacgtggaggaggaggagggaggaggccagggggaggaagaggaggaggaagaggaggatgaagaggccgaggaggagcgcctggctctggaatgggccctgggcgcggacgaggacttcctgctggagcacatccgcatcctcaaggtgctgtggtgcttcctgatccatgtgcagggcagtat

SEQ ID NO: 29733 - DNA, 2300 bp, Homo sapien
tgggcccaagcatggcctctgggcactacctcctccagggtcacagtcccacggatggctctgtgggccaggatctgccttaggcttcacccacctcaacatcttgctgtgttgttcaggctggtctcaaactttgggctcaaacaatcctccgcctcagcctcccaaagtgctgggattacagacatgagccaccgtgcccggccgtgctgttctgttctccaatagagaagctggtggaagtccccagtaacccagaggtgatgtgtgatgcacacagtctcctcactctgaagctgcacatgcgatgtgaatcttcatttggggtccgctgttaatatggtgtttttcgggggatacagcaatgaccagcgtccccaggaggtcccagcagaggctctggccccggccccagcggaagtcccagctccagcccctgcagcagcctcagcctcaggcccagcgaagactccggccccagcagaggcctcaacttcagctttggtcccagaggagacgccagtggaagctccagccccacccccagccgaggcccctgcccagtacccgagtgagcacctcatccaggccacctcggaggagaatcagatcccctcgcacttgcctgcctgcccgtcgctccggcacgtcgccagcctgcggggcagcgccatcatcgagctcttccacagcagcattgctgaggtagcggcccgggtgtgggtgccagctatggcacggccagtcctgagggcgaggccaagcttggcttcaggtcagcctcaggtccctggacttccctgatgtcggagtcctcagctgagctgctcacagctttgaggacctgggcagtgaggtcctgagttgccctcccctggccatttgtgctgtgtcaccacctcctgtgccacttccagccccaggtagacctcccaccaacagccatctcccacccctctcttcctctctgccttgaagcatacggattcattggtgagccaagaggggcttcccatgtctccttgtggaagctgtgggcatgtccctggtatgtgcaggttgctagggtggtggagctgacaggaggccccccgtcttcaggttgaaaacgaggagctgaggcacctcatgtggtcctcggtggtgttctaccagaccccagggctggaggtgactgcctgcgtgctgctctccaccaaggctgtgtactttgtgctccacgacggcctccgccgctacttctcagagccactgcagggtaggcacagggcctgctggggctcaggagcttggagtgtgtggttggggcaggcctggggggtcattctctggagccagctgtgtggcttcaggcagcagtcagcgacttggctgcagtgggctgagagttccttgtctgaggaagggagctgtcatgagggaggggtccatggccagatgtgaacgcagaatgcactgagccagggcctggtgactgcttgggaacagccagtgatgagaaggggttaggcagcctttgcccctggggctgcacaggaagccctagccagcgacctggtgactcccctgagctggaagaggctccgactccagagggcattgcctatggggctttgcacgggtggaagccaggccagccaagaggacctgttcctgctggatgtgctgcacacctaggaaccttgtgcttgcctgccaccgcctccctctgtccctttctccatcacacagatttctggcatcagaaaaacaccgactacaacaacagccctttccacatctcccagtgcttcgtgctaaagcttagtgacctgcagtcagtcaatgtggggcttttcgaccagcatttccggctgacgggtgggtgaccctctgtgctttgtcctatttcgggtgaaggccagcatcaccagtgggcttccaccttccgtacgtgggtgggttatcatagacagttatctctgtgctcaagagccacttcttaaccggggtgggaggaagcagcttcaggaactgctgagagagcagaactcacgctccagggctcagagcaggaggtagggtgtgcggcaagcgctggcccggacagaagcagagtgggccctggtctcgggcaggatgtttctgactcacatttcctgaggagagaaagctaagctctttgcctaatgtctctgtctccccttccagaaaaatgcctcagctcttccggcctgaaggaatggcctcctcccgggccccatgattctttcctgtgtgggccctcctggccctggcctctgggctgaggcttgctaggg

SEQ ID NO: 29734 - DNA, 2300 bp, Homo sapien
ccatggcctctctggacagtgccatgctgggctgtggctaaaccatgagcgcagggcaaacaagaaactcctcagggcacccctgacacaccagccgctgcccctctgcctgggtgcggggcatgccaccctcttcaggctgtcctgcaggtcttatgtgtcagtcacccctgggcccaaccccacctgtttcacaacccctgttgagagtgggggaggggcgaggaggacagagagatcccagagtctgaggtggctggtgggggccggggcatctcaccaaggtggcccttgaatggcagcaggggaggtctgtggggaggtggacccaggtggtggacagtggagggaggggcacatacccatctgtgtctgtcttcatgtccctgaaacatgaggctcatgggcccctccctgagggttgcttcagggagcctgctgaggtaggacctgggattttggtagccaaccccatgccacactcttccccaaccccattcctgctgccagagcagggcctatgagccccacataactcatcctggcccagccaggagcctcagtccccaggaccttggggcagccaggccaggcagggctgtggagaggtgggtggcgtggccagcctgggtcccaggcctgcttctgttcccccgtttcccttggtgccagcagagtgggggtcctgcctggaggacccttcacccccaggaagactgtgggtgtggggaatgtggggagggtttccccttgcaacccccatcccagccagatctcaggcctgcctgaaggcccctccaaactgatgggagtggaggtgtgctggggaggagaaactttccccaacctggcctttaccaaagcatttacagatggccaccgggctctggcccactcctgtctccccaactgttacgccgtctgcagttgggggtagtgacaactggaggcaaggcccaccacgtgcagccctggcacgcagaggccctcagcctgggcccactgcacctcttgggggtgctggctgtgcaggcagtggtggcttcagacagtagccctgggattggatatgaaaactgattacctcagacaagctacccagcccctctgagcctcagtttccccaccagtaacagagggatcataaaagtagccacctccattcatttattccttctgcacacgtgtattgagcatccactgtgcgaatcagccagacagcgcccctactcttccacagccaatgttccaggggagacaaatgaaacaagccaatgtcagctggtggctggtgctgccaggtgaaccaggtgcagggccacctgcaggctgagaccagggaggcgctctgaagtggtggcccttgacctgagaccacctgtgagaaggagccagagtgtgacaatctagggtagcagcacatgccgggagagctcactgaaggagcagagaggcctgcgcggctggagcagacctgtctggggagagttcagagagaccagccagctggagaggggtttggaggtgctgcagcaagctggctgagcatgggctgctgagtggagggcagatagggaggcagggagggtggatgggggttggcgggcaggaccagcggctcaggagtggctggggctagtgaggggatgtgggtctggtgggctagcagggtgcctgtagcgagtcagagccccatgagcgccctggagttggaaaggtggaggcaggaacagacagacccattcaggggctgccctgccttccgccgaccagcaccccaggagcctctgaatgaaacacactgggctcgcaggcgggggactcgttcacgtgtgcctttggatttgcttcagaacctctgatagagcccaggtcccggggctcatggtggcctggacttccaggttgtgatgccaggagggtcccagccgggaagccccgagcagggctcaggccgcccatggggggtcagtggccagcaccttcccttccgcctgcaggctgctgatatgcaggaggaaatcctggcgggttcctgtgggggtgagctggcggggcctccgggctgcttttaaggccactgcccgccccgtcccgcctgcctgtgctgtgcctgcctcctagagctcattccctacgccccgactctgtcctggacagcgtgcccaccagccatggcggggccccggggcctcctcccactctgcctcctggccttctgcctggcaggcttcagcttcgtcagggggcaggtaagtgtgagccagtcgcaggggcacacggcgtctgggccctgccgg

SEQ ID NO: 29735 - DNA, 2300 bp, Homo sapien
ctaatatgcccatccctgacctccaccccatccctagcaccatgggttggtgccccagattgaggctgccactgcctacaccatctttgtgcccaccaaccgctccctggaggcccagggcaacagcagtcacctggtgaggccgtggggatggggcaatggcagggagggcaaaggcatagagggcgagcctccaatcccaccacgaagggacacagtgggtgtggcgtgctgtccagggcacttggttatcctgcagtcccctgggttctctccttctcttccaggacgcagacacagtgcggcaccatgtggtcctgggggaggccctctccatggaaaccctgcggaagggtggacaccgcaactccctcctgggccctgcccactggatcgtcttctacaaccacagtggccaggtttgggggtcagggagcaaggagaccctagcccgggcccctacccctgaagatcccttccctttggagtttccctagctgtgagcctccaacctctaacctctgctccagggagccccccggccctggagtactgcctgaccttacagccctgccaggtgagggtggtaggtgggtggattcagcctccatccctctccccagcctgaggtgaaccatgtgccactggaaggccccatgctggaggcccctggccgctcgctgattggtctgtcgggggtcctgacggtgggctcaagtcgctgcctgcatagccacgctgaggccctgcgggtgagaggctggggccacaggaaggccggcacgggagttcagagctgggagggcctagctgacctgactagtggggaggggcgcatggtcagtctgtcctggaggaagggcagggatccaggcctggactgcctgatgccccaccctttttccctctaggagaaatgtgtaaactgcaccaggagattccgctgcactcagggcttccagctgcaggtgagactgggcttagcgcagctctgtccctgtgttgcctgccctcacttcttccaaggtgcccaatcccctcaccctccagcccagttttgcttggcccaggcatccaggctcagggaactgggtggctgacgtccccatagaggtctggagggctggcctggctctgctgaggggagactctctcagacttgcggcccgaggcttggatcctgtccgccctctcccatcagtctgcctgtcttggtccctctctgacccttctgctgttctgctcagctgcctgacacctgtagtccatctgtctgtctccccattcactgccctgcccctgcccaagccactggctgacccctcctgcctgtccccgtttccaggacacacccaggaagagctgtgtctaccgatctggcttctccttctcccggggctgctcttacacatgtgccaagaagatccaggtttgccctgaagcccccaccccaagcctgtccagagagaaggaggtgggagtgggtgggggcccagggaggagcccagtttggatcttaaggacagagactgggctgggactagggtgaggccagaacccagaggaaggagatgggagagaggtctgaagtcagagggctagtgtttgtccctgtgtccactcccccagggagagggagtggagacggtgagaggaagaaagggcagtccagagctggttccatcagcgaaaccccaggggcagcaacttggcctggcttggcccctcactgtgggatctgggtgcagcccttccttgcttgagcctcagtttccccaccctgccagagggagggttttaggaggtatctctgtgtctctttcagctctgagctgctcatccctgggactggggttctgaggggttttgctccatggctctgtggccccgagatgcccccgttccccttccccctgacaccttgctgggcctctctcgccctctctcccatccccacgccgacaggtgccggactgctgccctggtttctttggcacgctgtgtgagccatgcccagggggtctagggggggtgtgctcaggccatgggcagtgccaggacaggttcctgggcagcggggagtgccactgccacgagggcttccatggaacggcctgtgaggtgtgtgagctgggccgctacgggcccaactgcaccggaggtgaggactggggaggggcgggggtgggcctcctggcagcagagagcagcctggagaccccagccgggacaggatggaggcactgggcaactcctatcctcctttataccactgcagtgtgtgactgtgcccatgggct

SEQ ID NO: 29736 - DNA, 2300 bp, Homo sapien
ggactcggccggagcctccacctgcgcctgtgctgcgggatactccggcaatggcatcttctgttcaggtccagccacacggatgcccagggccctccctgaaattttggggtggctgtccccacagagcccccttcacttcctctaggcccagcccccctcactgtcccatctcaggactcacccttccctctgaccttttcctttctctcacgccctcctctcctgtcctgcctccggccccgtgcctgctcctgaggactctctggccatctccccttagaggtggacccctgcgcccacggccatgggggctgctcccctcatgccaactgtaccaaggtggcacctgggcagcggacatgcacctgccaggatggctacatgggcgacggggagctgtgccagggtgagactaggcccctaacctgggtttatgttgggctaggggtctggcttcagtgatctgagtcagattaggaagggctgaaggggcacatgggacttgtggggactgggggcgctgagagaggagggggtgggacagatgaaggtacaaaggacagaggaaggggggggccactaagggccacccccatcccagtgtctcttcccccagaaattaacagctgtctcatccaccacgggggctgccacattcacgccgagtgcatccccactggcccccagcaggtcagcatggcagggttggacatggggcatcatgccatgccctcacaggatggggcctcccttcagggcaggcccggggaggggggtgacccttttacccagggtgctggccagctgttggctcccagcagccccactgatcaagactggggacaggtctcctgcagctgccgtgagggttacagcggggatggcatccggacctgcgagctcctggacccctgctctaaggtcaggaccctagtcctgtcctccttcactgacgagaaggagaggggactgaggcaggaaccagcccttctcacctccagcagggtcctaagggcctctgcagggtgggctatcctcccgtcaagctcgagtttaatcagtagcaaataggatctggggggctgagcaggggccttcatggcctctttcacagggctgagtgggatagagaagtagtgaaagccactgataccttcctctcctgtccctgactcagaacaatggaggatgcagcccatatgccacctgcaaaagcacaggggatggccagaggacatgtacctgcgacacagcccacaccgtgggggacggcctcacctgccgtgcccgagtcggcctggtaatgatgcccaagtcagacccctgatctggtcttggctgtgccccatgggcctgacccatggtcttggcaaagatccgatttgatcctgattctggccctgaccatgacactgagcctgacccctgattgtacctgggcctgaccccagctatgacccatgaaactagccctgaccccaactcagaccccgcggctttcctttcctcatgtctgccttggctagaccttgggccgcaggtgctgggacaggcaccaggccctgaatgggggccgccccaaatctgagctgaccctcgcccccccaggagctcctgagggataagcatgcctcattcttcagcctccgcctcctggtgagtggccagcttgggcctctgtgacctgcaagtcccacccctctctggacttctgtccccatctggtcagggggttggctggtttgttctctctgagtccaggtcttccccaggagatccatggacgcctcaggcttctcccattccactcatgctgttgctgcctcccgcaggaatataaggagctcaagggcgatgggcctttcaccatcttcgtgccgcacgcagatctaatgagcaacctgtcgcaggtatgcagcccccagagcgaggctgggcagggctgggtgctctggtggtggccctgcgtgggctgaggcggcagtcagggaccccactcccctcgcgactctgctccaggatgagctggcccggattcgtgcgcatcgccagctggtgtttcgctaccacgtggttggctgtcggcggctgcggagcgaggacctgctggagcaggggtacgccacggccctctcagggcacccactgcgcttcagcgagagggaggtgagccctggccctggcctgccccgctccatcccgccccgccccgcccctgcgcgccattgccccaggccccacggcccacgcagtcaagaaccccacctcccctagccagggggcgcctcctgctgagt

SEQ ID NO: 29737 - DNA, 2300 bp, Homo sapien
cagggcagcatatacctcaatgacttcgcgcgcgtggtgagcagcgaccatgaggccgtgaacggcatcctgcacttcattgaccgtgtcctgctgccccccgaggcgctgcactgggagcctgatgatgctcccatcccgagggtatgacaagcacgggcctgggagctggaagacaggcaggtgggggcctgggatcctcccttcccgcctggcctagctgtttatgagagcctttcctcagagaaatgtcaccgccgccgcccagggcttcggttacaagatcttcagcggcctcctgaaggtactgctcccgtgtgggcctgtcattgtggacacacatgcacgtgtaagtgtgtgcaagtgtgtatgcgtacctgtgtgtgcatacccacctgtgtgcacactgtcccgtgtgagcctgtgtgaactcatgtgtgcacaagccacatctgtgtgcatgtgcaccccaggttgagcacatgggtgtgcttatgtgtgcccacattcctgacagcagtgtgcacagttgagatgtgtgcacacacatgcctgcctgggatggtcacagatgagtgtgggtgagtgtggagccccttcctgctctgtggcacagccccctgcctttgctaactagtctctgactgggcagcgactgccacatctttgctgcaccccaccaggtggccggcctcctgcccctgcttcgagaggcatcccataggcccttcacaatgctgtggcccacagacgccgcctttcgagctctgcctccggatcgccaggcctggctgtaccatgaggaccaccgtgacaagctagcagccattctgcggggccacatgattcgcaatgtcgaggtgggtgcagcccccaaccttggtcttcactgcctgcagctcagcctgcctttccacctccaaccatgactccacttgctcaggccttggcatctgacctgcccaacctgggcccacttcgaaccatgcatgggacccccatctctttctcctgcagccgaacgcgggccgtgagtctggggagagggcttggatgaagggagtaggaggcaggggccctggcagtagcagctggagtgcacctgcgacccttgcatacctcatattctctccttgcagggtgagctcatggtgggtgaggatgatgctcgcattgtgcagcggcacttgccctttgagggtggcctggcctatggcatcgaccagctgctggagccacctggccttggtgctcgctgtgaccactttgagacccggcccctgcgactggtgagggaggccagaggcagacgggcagaagcccaccccgcctgtggtgtccatccacctgactttgctgtattggcctccctcccttccagaacacctgcagcatctgtgggctggagccaccctgtcctgaggggtcacaggagcaggtacagggctaggggctgagtgggggtggtggggtgggggcaggcagagcccaaggaccaccaaactcagaaccacccaactgcggcctgactcctttggcccagggcagccctgaggcctgctggcgcttctacccgaagttctggacgtcccctccgctgcactctttgggattacgcagcgtctgggtccaccccagcctttggggtaggccccaaggcctgggcaggggctgccaccgcaattgtgtcaccaccacctggaagcccagctgctgccctggtcactatggcagtgagtgccaaggtgagcattgcagacactgttgactagctcctctgttccccaagagagccaaggcacagctctggccattgtccttgagagagtgttggggcgtccagggctggggagctctgggtggtgagtagattttactagcgggagtgctcgggagaggcatggcggtagtgtggacggtgcagaacctggggaggagtgctggggggtctggatgttctccaggacatgggcctggagggatcttagcagtgggcggacataggtcagggacagatggcagggctaggctggaggtacgtatatgggggtcctggtgagagcccctggccccacctcacttctcctaccccatccccagcttgccctggcggccccagcagcccttgtagtgaccgtggcgtgtgcatggacggcatgagtggcagtgggcagtgtctgtgccgttcaggttttgctgggacagcctgtgaactctgtgctcctggtgcctttgggccccattgtcaaggtgggccatccctgcctgccccacggcccgattcctttggcccttgtggg

SEQ ID NO: 29738 - DNA, 2300 bp, Homo sapien
gctgttctggctcaggactaccttggactgatggtatcttgggcctgctcaggggcctccagcctgtgccagacgaggaggtgattgagctgtatgggggtacccagcacatcccactataccagatgagtggcttctatggcaaggtactccataccccagcagccagcctgccccatggacatgtgcccatgtcccaaggcagatttggggccctcgtctccagcactgaaggggttggggtcccaaagggtgtctgagacaatggccccctccccagggtccctccattaagcagttcatggacatcttctcgctaccggagatggctctgctgtcctgtgtggtggactactttctgggccacagcctggagtttgaccaagcacatctctacaaggacgtgacggtgaggatgctgggcctgccctcggatggcaggaaagactaagtccagccacagtgggacagccccacctgggccctgctgtaccctcattgtcctccactgcccccaggacgccatccgagacgtgcatgtgaagggcctcatgtaccagtggatcgagcaggacatgggtaagtgtggacagaagccctgccgtggccggcctgagcaggtggcaggactgaccctcacagactcatctgccccattagagaagtacatcctgagaggggatgagacgtttgctgtcctgagccgcctggtggcccatgggaaacagctgttcctcatcaccaacagtcctttcagcttcgtgtgagtccagcccctgtggatggagggacagcagggccagggctctgggtggggagggcaggcacggagccgccctcagactacttgccacctgaaactcctccacacagagacaaggggatgcggcacatggtgggtcccgattggcgccagctcttcgatgtggtcattgtccaggcagacaagcccagcttcttcactgaccggcgcaagtatgggcatggtgggggttgcagggccagggaaggggaatagaggccccaccccaatgaggggactgaagcaggaggccaacctggcccttgcccactgcccaatgtgcttggggtgagaacacccccttgctggcatgggtccacttgagcaggtgggcctttacggaggagggatgggggttgcccggcccgtggcccagccacagactggaagtcatgccctttacctgcaccccaggcctttcagaaaactcgatgagaagggctcacttcagtgggaccggatcacccgcttggaaaagggcaagatctatcggcaggtaagggccatctggggagagcagcatgtggtgggggcatggggcctagctagggccccaggctgtgcagaggcagcctctgaagaagcagcacagctccttggccctgagcagcctcacacaggcaatggctggcagggagcaggtctgggtggcctcgagagcttgacctctgggtcaagcagcctggctttgaattcctaactccactactcagcagagggagcctggcctggttgcctgacctctgtgccttgcttcccttgtctgcaaaagaggtgtaatactctctactgaagctgtggtataaagctctcagaatggccagtgcgccaggcaccgtggctcatgcctataatcccagcagtttgggaggctgaggctgcaggatagtttgttgagctcaggagtttgagaccagcctggccaacatggcgaaaccccatctctactaaaaatagaaaaaattagcggggcatggtagcatgcacctgtggtcccagctactccagaggctgaggtgggaggatcacttgagcccaggagttcgaggctgtggtgagctgtgatcacaccactgcactttagcctgggcaacaatgcaagaccctgtcttcaaaaaacaagaatggtcagagatcgtgaaatgcctgatgaatggtgtcatttcttggggttgagcactctgctgcagccagaacaagtctggttgggggcagctcactgggtgatctagagaaactcctccttcctacctggctaggaaaatgagagggactggtgttgaggtgggattaggtgtctatgagcaggcagtgattaaggtttagccctggctggaatgcggaaatcctggctgagctgggcttcttcaggctaggggttctaaaggccttggggctggaggagggggaagccagcagctggccaggggagcaatgtggaggtggccaatgcccagcctggcctgcaggaaacacccccaccctctcagccctgccc

SEQ ID NO: 29739 - DNA, 2300 bp, Homo sapien
gctgtgataatttagtgcggtaataggaatgatgcactgaacacaaccctggagcatagtaactgattaatattagttagaatattcattatgatgataatgattggcagagccctcgctcttcacatgtattcccaaacatggtttttgtttgtttcttgagacaggacctcgctctgtcatccaggctgaagtgcagtggcgcaatctcggctcactgcaaccccctcctccccggctcaagccatcctcccaccactacaggcgtgcaccaccacgcccggctaattttttaattttttgtagagatgggggtcccactatattggccaggctagtctcaaactcctgggctcaagagatcctcctgccttggcctcccaaagtgctgtgattacaggcgtgagccaccgcgccgagtctgaacgtgtattgtttatatgtagtctcttaactgacagtttaagagactatgccaggtagaagcagggctctgacttaagagacttcacttgtaattgcgtcttctcatgctgctgtgcttgctgaagataactgaaaggggctgtcaccccattacctaggactaaagtaaaaactgcaggaacagctttgagaaaggagacaactattagacaatctaaggaaggtaaatgaaagcttagaaccaatgagacgatttggtgatatggacacaaaatatacaaaagcagactggagagagcaagcagggccccagaaagggtcatagggcccgcagtgagcagcctgagctgccgcctgtacaaccggctttggagggccagcccggaagcctctttctcctccgggtagactccgcccaagcatgcacacacacaggcttgatgctcgctcccgtttctacaggaggttttgacggctggatgctgcagggcatcccctcgcctggaggaggttcacttgtggccaggttcccagcacacccacttgctcactggggccctggggacaccgccacactcgagcccatcctacggcctcaatccttaccagtccccaggccatggactgccacactgtaggtcttcaatcaaggttcagtggagtttcgaatgtacacacaccctgaaagacagcgcggccacctcagaaaacaacgcgcgcccagctggctcccctccgacagggcccacggctactgggtcggcctcctccggaccctgagcacagcctggtatgcgtgcgggctcggaatacggatctgagcagaagaaatgcgagtggagagcggttctgcgcaggaaagaggaattttgttggaaagcctgtcgacgttgctagaaaagaccacagcatctcacgaggggcgtgcgccgggaaaccgggagttgacgggtcagtgcggccagttgccgaggtccgaaccaagcgggcgcagtgaccgtggcccacaaccctgcagcgcacggcccagtcacctggttagcggacgtcggctgccctgcaggcccctcggcctcccccagcgtgggcctggcaccgggaagcgcgggaagggctctttatttgttagaccagtgagtggactggcccgggctctggtcagtgggcagtcagtccgagcccagagaccggggaccaggaccccgggaaaggagagcaccaggactagggggaggagcggaggatctggggtcagaagcatccagaggcgcagggtagggcgggcggacccgggagcggagagggcggcagaggacccgggggcccggggggtacccgtcgcgctccggctgtctcctctcggcgcctcggccgtccggagcctctcagggacggccgctcttaggcccgctgacttccagggctggggccagggaaaggcgccgccatcgccggcgtgacggccgaaggggggcgcagagtcctcccggaccgcgccggagactggctgggggagggggctggggagccctccccgccccgccccgccccgccgggtccggggcctcccgccccccgggccgaggggcgcgcccattggcaggccgggctccgcgcgccgcacccattggccggccgccgtgaggagcacgaggccaccgtggcgggcgcgcagtcggagggcggcgggcggcgggcggcgggctggccgagggcagcgcgggcggcgggcggcgcgcggtgggcatggcgggtgcggggctgcgggcggccgctcggcgctggctgctgtgcggaggccacggcgggccgcgagccgcctcgtcctcgccctcctgccctgggtgcggccccccgggtcccggcgcccactg

SEQ ID NO: 29740 - DNA, 2300 bp, Homo sapien
tcggacctcggcaactggccgcactgacccgtcaactcccggtttcccggcgcacgcccctcgtgagatgctgtggtcttttctagcaacgtcgacaggctttccaacaaaattcctctttcctgcgcagaaccgctctccactcgcatttcttctgctcagatccgtattccgagcccgcacgcataccaggctgtgctcagggtccggaggaggccgacccagtagccgtgggccctgtcggaggggagccagctgggcgcgcgttgttttctgaggtggccgcgctgtctttcagggtgtgtgtacattcgaaactccactgaaccttgattgaagacctacagtgtggcagtccatggcctggggactggtaaggattgaggccgtaggatgggctcgagtgtggcggtgtccccagggccccagtgagcaagtgggtgtgctgggaacctggccacaagtgaacctcctccaggcgaggggatgccctgcagcatccagccgtcaaaacctcctgtagaaacgggagcgagcatcaagcctgtgtgtgtgcatgcttgggcggagtctacccggaggagaaagaggcttccgggctggccctccaaagccggttgtacaggcggcagctcaggctgctcactgcgggccctatgaccctttctggggccctgcttgctctctccagtctgcttttgtatattttgtgtccatatcaccaaatcgtctcattggttctaagctttcatttaccttccttagattgtctaatagttgtctcctttctcaaagctgttcctgcagtttttactttagtcctaggtaatggggtgacagcccctttcagttatcttcagcaagcacagcagcatgagaagacgcaattacaagtgaagtctcttaagtcagagccctgcttctacctggcatagtctcttaaactgtcagttaagagactacatataaacaatacacgttcagactcggcgcggtggctcacgcctgtaatcacagcactttgggaggccaaggcaggaggatctcttgagcccaggagtttgagactagcctggccaatatagtgggacccccatctctacaaaaaattaaaaaattagccgggcgtggtggtgcacgcctgtagtggtgggaggatggcttgagccggggaggagggggttgcagtgagccgagattgcgccactgcacttcagcctggatgacagagcgaggtcctgtctcaagaaacaaacaaaaaccatgtttgggaatacatgtgaagagcgagggctctgccaatcattatcatcataatgaatattctaactaatattaatcagttactatgctccagggttgtgttcagtgcatcattcctattaccgcactaaattatcacagcgtcagaacaaggcctccgttttacggcttagggaattgaggcacagatgggctaagggagcacctgtagagcagggatgtggtttggtaacagagtgcatgctctttatactgctcttctgcgattattgtgaataaagcgcctacaagtgcctgtggaactgtaagtgccccatacaagatagcttttattaattttagggttctcacggggcgcttacttagatttttgctgtgataattgataaagttcagctttcaacactccatatcaaattctgttactttagaagtctaggcaccaatcacgtctccgaaataaacgcaaggcattgcataattgcattttggaatgtggtgctgtacatagtccatcagagagggtcatcacttctatctgggtattaggaataaaaatggcggtggcagagtagggggcgcggctgccaactgcgagctcagacctgcactggggaggcagggggcggggccgggccggcgccacgtgggctgtccttcccttttgggccgtcccacctccagagctgaggcgcctgcgccagctccttcgaggccctgctcggcttcagggagcacgcgcgccctgccgtgctctgattggcggagctgcacgcccccgctgcagtctgattggcggatccgcctcgctttagaaggtcggcgcccagttccggcactcgtgcgcctaccagacagtggcggaggacggcgctcgctagtctcccaggtcgcggtacacggcgagaacgggcggggcggtctcggctgcgtccgggcgatccagtgcttagttccgtcatatccctctccacgacctcggtcgagcatgttcaccagggcccaggtgagacggattctgcagcgggtgcccggga

SEQ ID NO: 29741 - DNA, 2300 bp, Homo sapien
catgagagggctggaagaagcacgtgatctcgcctgtaagtgcagggaaggtcacaaggctggacgccaatgtgcccggcctacaggagagccaggccgccctgactgccaagcgaatggaactgcactcgcccagcgctctgagtggaatgcgcggtctgcaatctgagaatactccccagaaaaacggatccctaccgcctcgtgccttcctgaaaggaaacagagactgctaccccctcacttacagaaggtctcctggcccacgcgcactttaatcatgatccactccatcgttcctcccaggacaaaaaagaagggcaggaaccggtagatgccaaatcgctgcttcccgggcacccgctgcagaatccgtctcacctgggccctggtgaacatgctcgaccgaggtcgtggagagggatatgacggaactaagcactggatcgcccggacgcagccgagaccgccccgcccgttctcgccgtgtaccgcgacctgggagactagcgagcgccgtcctccgccactgtctggtaggcgcacgagtgccggaactgggcgccgaccttctaaagcgaggcggatccgccaatcagactgcagcgggggcgtgcagctccgccaatcagagcacggcagggcgcgcgtgctccctgaagccgagcagggcctcgaaggagctggcgcaggcgcctcagctctggaggtgggacggcccaaaagggaaggacagcccacgtggcgccggcccggccccgccccctgcctccccagtgcaggtctgagctcgcagttggcagccgcgccccctactctgccaccgccatttttattcctaatacccagatagaagtgatgaccctctctgatggactatgtacagcaccacattccaaaatgcaattatgcaatgccttgcgtttatttcggagacgtgattggtgcctagacttctaaagtaacagaatttgatatggagtgttgaaagctgaactttatcaattatcacagcaaaaatctaagtaagcgccccgtgagaaccctaaaattaataaaagctatcttgtatggggcacttacagttccacaggcacttgtaggcgctttattcacaataatcgcagaagagcagtataaagagcatgcactctgttaccaaaccacatccctgctctacaggtgctcccttagcccatctgtgcctcaattccctaagccgtaaaacggaggccttgttctgacgctgtgataatttagtgcggtaataggaatgatgcactgaacacaaccctggagcatagtaactgattaatattagttagaatattcattatgatgataatgattggcagagccctcgctcttcacatgtattcccaaacatggtttttgtttgtttcttgagacaggacctcgctctgtcatccaggctgaagtgcagtggcgcaatctcggctcactgcaaccccctcctccccggctcaagccatcctcccaccactacaggcgtgcaccaccacgcccggctaattttttaattttttgtagagatgggggtcccactatattggccaggctagtctcaaactcctgggctcaagagatcctcctgccttggcctcccaaagtgctgtgattacaggcgtgagccaccgcgccgagtctgaacgtgtattgtttatatgtagtctcttaactgacagtttaagagactatgccaggtagaagcagggctctgacttaagagacttcacttgtaattgcgtcttctcatgctgctgtgcttgctgaagataactgaaaggggctgtcaccccattacctaggactaaagtaaaaactgcaggaacagctttgagaaaggagacaactattagacaatctaaggaaggtaaatgaaagcttagaaccaatgagacgatttggtgatatggacacaaaatatacaaaagcagactggagagagcaagcagggccccagaaagggtcatagggcccgcagtgagcagcctgagctgccgcctgtacaaccggctttggagggccagcccggaagcctctttctcctccgggtagactccgcccaagcatgcacacacacaggcttgatgctcgctcccgtttctacaggaggttttgacggctggatgctgcagggcatcccctcgcctggaggaggttcacttgtggccaggttcccagcacacccacttgctcactggggccctggggacaccgccacactcgagcccatcctacggcctcaatccttaccagtccccaggccatggactgcc

SEQ ID NO: 29742 - DNA, 2300 bp, Homo sapien
tggggaaagaatatgggctttggagtgtcactttattatctgaatttatagagaaagtacctaataatagtacaacagtattacagccccccccaaaaaaagaaagaaaaaaagtagtgaataaatgagttatttttgttcatctagcagttctattttggaagtcttacctacatccctgatgtgatatttaatctccattttgtgtgtgtgtttaaatttttcacactgaattaactctctttaaagaaatatactcttagctgggcgcggtggctcacgcctgtaatcctagcactttgggaggccgaggcaggcggatcacgacatcaggagatcaagaccatcctggctaacacagtgaaaccccatctctactaaaaacacaaaaaattagccgggcgtggtgctgggcgcctgtagtcccagctactcaggaggctaaggcaggagaatggcgtgaacgacaacaacaaaaatatatatatatacgcacacacacactcttggaccctgttgttttccaaagtaatttatctcctagtaaagcatgttagtgcttagtcttcacacgagtattaaatctggagtttcttgtctcatttatgtgctatctgcaagatgtaaataccatgaaatagccaaaacagggaaaagggacagtccattaatttgtttagttctgaactttcattcagggacctaacatacttccaggctaaaatggaacagagtaggctgggcgcagtggctcacacctgtaaccttagcactttgggaggctgaggcaggtggatcacttgaggccaggagttcaaaaccagcctagccaatatggagaaaccctgtctctactaaaaattcaaaaattagccaggcatggtggcgcatgctgcagtgagccaaggttgcaccactgcactccagcctgggtgacagagtgaggttccgtctcaaaagaaaaaaaaaaaaggaacagaataatagcaatatttgtttgctcagtgttcagatgggatgtctagctatacatcaatgattgttcaaaatatgctcaggggcacagatgccggtactatcctaaattcaggagaacagaaccacagggatttgcaaagtgatattagaggaaaacagttggttgcttttaccaacactttctattaaaagcatggtcatgttttaagagtttataaagatgttaaagacacctgggccacctgtttcttctggccacagacaagctatttgaagtgggctatactgcttacatgctttcctcactttccgccctcagtaattctccaattttaatttcaacctgcatttctgcccatgctgaggacatgtaggaattccttgactgccagcctgaggcgtggcgtggggcacttcagtctgcagtctgactacatttggctctgtgttaatgcagcccgagccctgaaccagaggtctggacactgactttcatctccatctgtggagctttgttctcttaaattggcagtcacatacaaccttgtcagcatgaaatcagggcttgcaggagttaaatctgcttgaaacatctgacaccactttaacagaacaaccaaacctggttaatccaaatcactttgcaaactctgtatttatttggattaaaaagctttagatgaacaacaaaaaaaagatacatacatgttataagactagttaccacgtaaacctcagatgatatgatacagaaattagaataaaccaagttttaatcaggtatgaaaacattcaagctcaaaatcatcaacaccaatttggggattttacagaaataggtgcccctctcaattcttcctcataggaaggggagagtggcttaaaaaaaaaacaacaaccaaaacagttaaaggccttttaaatcagttggctgacaaacatactgttttaaacctacaggttcccctcagtccccccgtttgcaatataaacaattcttctccacaggaacttacattttgaaaacatttaggccattatactttctaagccacattactacagttcctaaaacttatgaaaaaaaggtgtatagtttacttgtactttcttgagtcaatttttttttcttttttgaagatggctgacctcaaatcttatatcctaaatattaacgatatcccccaagttaatatacagaaaaacatgattctaaaataaatacacaggctttttaaaaaaaacttaattagggcctgtctagtgatgccctgggccggtgctgcactgctttagggaagcccctggctggatctatgttt

SEQ ID NO: 29743 - DNA, 2300 bp, Homo sapien
tctcgctctattgcccaggctggagtgcactggggtgctcttggctcactgcagcctctgccttccgggttcaagcaattcttctgcctcagcctcctgagtagctgggcttacaggagcgcaccaccaagcccagctaatttttttgtatttttagtagagacgaggtttcaccatgttggccaggctggtctcgaactcctgacctcaggtgatccaccctcctcggcctcccaaagtgctgggattacaggcatgagccactgcacccagcccattttgaattaattttttttttttgagacggagtctcgctctttcgctcaggctggagtgcagtggcgtcatcctggctctctgcaacctccgccttccaggttcaagcaattttcctgcctcagcttcctgagtagctgggagtacaggtgcacgccaccacgcccagctaatttttgtatttttagtagagatggggtttcatcatgttggccaaggacggtctcgatctcttgacctcgtgtttctgctgcctcggcctccccaaagtactgggattacaggcatgagccactgcgcctggccaaattaatttttatatatgataggaggtaggagttcaactgcattcatgtgcagaagtggaaatccagttgtcctggtaccgtaccatctgttgaaaagagtgttctttcccccaatgaattgtcttggaacccttatcaaaaatcaattatccataaaagccctattatattggtttatttctacactttcagttctattccattgacctatatattctatccttatgccaatacatattgtattatatctttttttttttttcttgagatagggtctcactctgtcacccaggctggagtgcagtagtgcaatcacagctcactgtagcctcagactcagacttcccagactcagatgattcccacctcagcctcccgagtagctgggaccacaggcatgcaccacaacatccagctaattttttgtatttttttgtagaatttgggggtctcactatgttgcccaggctggtctcaaactcctgagctcaagagatctgcccacttcagcctctcaaagtgctgagattacaggcttgagccaccatgcctagcccctttcatatctttaaaattgttaattatatgaatgtattcatccaaaaataataaaatgttaaaacagttagtaactatgaccacagtttactcctttaatttctttctaattttctctttcaggaaagtgtgctgtgttgtcattcaaggacttcctctcctgcaggccaactgaaataccagaaaatgacattctgctttgtgagagccgctacaatgagagcgacaagcagatgaagaaattcaaaggattgaagaggttttcactctctgctaaagtggtagatgatgaaatttactacttcaggtaaagcttgaaaaacttaaggaaaaaagagcacttccattaactgatagcaacatagtgtagtccagtgtttttaattttttattagatcttaaactagagtagtaaatatttcaaatagaaaatatttattcacttaaagattaaaggaaagacttcataatctgctgggacctggtggctgctctaatagtgcccttggcgtagactccaataattgtggaatgaggcagaaacacttggttctggtttatatcctgtcaggagatttctcagttccacagattatgaaaactctttttgctgtgtataggcaactagatcccaactttggacacaatacttttgtggatattcagcataattatttaaaaacaagcatctctaagtacaagtaatttcataaatacacatttaaactctttccatgctgcctttagagcatatattgcagattgcaggaagtcacttctagttgttaaggtggaacactgctttccggcttattctggaggggcattaggtgattttaggttttttatgtcacttttttcagaaaaccaattgttcctcagaaggagccatcacctttgctggaaaagaagatccagttgctagaagctaaatttgccgagttagaaggtggagatgatgatattgaagagatgggagaagaagatagtgaggtcattgaacctccttctctacctcagcttcagacccccctggccagtgagctggacctcatgccctacacacccccacaggtgaaggtgacaggttcctgttacttatcttattaccacctttggtttgcagcagactcaaaaccaaagtaaagtgacatccag

SEQ ID NO: 29744 - DNA, 2300 bp, Homo sapien
catatggtaactcagtgtttaactttttggagaaactgcctaaatattttccacagcagctgcaccattttacagtcccaccaagatacaagggttccattttcttcacatccttaccaccacttgttattttctgttttgggttttttttttaatacaggcatcttaatggggtgtgaagtagtattacattgccgttttgatttgattttcctgatgatgaatgctgttaagcattgtgttttttttgttttgttttgttttgttttgagacagagtctcgctctttcgcccaggctggagtgcagtggcgcaatctcggctcactgcaagctccgcctcctgggttcaggccattctcctgcctcagcctcatgactagctgggactacaggcgcctgcaaccacaccccgctaattttttgtactgttagtagagacggggtttcaccgtgttagccaggacggtctcgatctcctgacctcatgatccacccgcctcggcctcccaaagtgctgggattacagacatgagccactgcgcctggctaagcattgtttcatgtgcctattggacattcgtatgtctttttttagagaaatgtcaatttatatcttttgcacattttttaattgggttatatatttgtcttaatgttgagttgtaggaatatatattctgtatactagactcttactagatatatgatttgcaaatattttcttctatggcttatcttttcactttcttgatagtatcctttggagcacaaaagttcttaattttgataaagcccctttttttttttttgagactgagtctcgctctattgcccaggctggagtgcactggggtgctcttggctcactgcagcctctgccttccgggttcaagcaattcttctgcctcagcctcctgagtagctgggcttacaggagcgcaccaccaagcccagctaatttttttgtatttttagtagagacgaggtttcaccatgttggccaggctggtctcgaactcctgacctcaggtgatccaccctcctcggcctcccaaagtgctgggattacaggcatgagccactgcacccagcccattttgaattaattttttttttttgagacggagtctcgctctttcgctcaggctggagtgcagtggcgtcatcctggctctctgcaacctccgccttccaggttcaagcaattttcctgcctcagcttcctgagtagctgggagtacaggtgcacgccaccacgcccagctaatttttgtatttttagtagagatggggtttcatcatgttggccaaggacggtctcgatctcttgacctcgtgtttctgctgcctcggcctccccaaagtactgggattacaggcatgagccactgcgcctggccaaattaatttttatatatgataggaggtaggagttcaactgcattcatgtgcagaagtggaaatccagttgtcctggtaccgtaccatctgttgaaaagagtgttctttcccccaatgaattgtcttggaacccttatcaaaaatcaattatccataaaagccctattatattggtttatttctacactttcagttctattccattgacctatatattctatccttatgccaatacatattgtattatatctttttttttttttcttgagatagggtctcactctgtcacccaggctggagtgcagtagtgcaatcacagctcactgtagcctcagactcagacttcccagactcagatgattcccacctcagcctcccgagtagctgggaccacaggcatgcaccacaacatccagctaattttttgtatttttttgtagaatttgggggtctcactatgttgcccaggctggtctcaaactcctgagctcaagagatctgcccacttcagcctctcaaagtgctgagattacaggcttgagccaccatgcctagcccctttcatatctttaaaattgttaattatatgaatgtattcatccaaaaataataaaatgttaaaacagttagtaactatgaccacagtttactcctttaatttctttctaattttctctttcaggaaagtgtgctgtgttgtcattcaaggacttcctctcctgcaggccaactgaaataccagaaaatgacattctgctttgtgagagccgctacaatgagagcgacaagcagatgaagaaattcaaaggattgaagaggttttcactctctgctaaagtggtagatgatgaaatttactacttcaggtaaagcttgaaaaacttaaggaaaaaagag

SEQ ID NO: 29745 - DNA, 2300 bp, Homo sapien
atatttccttctccttagcgtatatatcacatatcggtgttcattgtgttattgtcaggtttcacccttgtattccctgctcaaatcatagtgcatgaaacatagtagggcctcagatatttgatgaacaagtaaatgacaaaaggatgacagtatggttgaatggcaaacacagcagagtctggtatagggttgggtaggagaggatagtggctaagaacagtagttcattccctgagtcccagctctgttagttgtaggtccttaggtgaatgatttagccctctaggcttcagtttatatctgttcatcattcagtaagcatttattatacctactatttaccaggctctgtggatacattagtgaataaaacagacaaatattctttttcctggggagcttttttctagtgtgaagacaaacaacatcttgaataagtaaagtgtatagtatgttaggtcatgatacgtgccgtagaaaaaatagaggagaacaaggggagaagggggtcccatggtcagagcagggagaatggtttatataggcctcactgagaagtcggcagctgaaccaacacttgaagaaactgagaaagtgaataatgtgaatatccagggagaaaggattccaggcagtgggaacagccagtataaacacctgaggagaaacatgccaggcctgtttgttagtaggagagtgagccattaatgagttagtaagagataagtgccaggggtagggtgcatatcacatagggcctcagagaccattatagggatttgggtttttactgagttaatggagtgccatcgattgtttcaagcacagagtgacatttggtttagatcttaataggattgctctgcctattggttgttgagaatagactgtaaaaagtcaaggcagaagcaaggagatccaccgcctaggatgctgttgcaataatccaggcaagaacaatcatgcttcagaccagggtgattgcaaaagatagtattttgaaggtcaaattaatagtattcttgataaatggagtgtggggtctgagaaagataaaaaagtcaaggatgactcctgtgtgtaagcctgaggaacaggaaggttgcagttaccattaactgaaataagtatgatacttcaggtcaggaatcacgataatatggagcaataataatgtcagctttatgggttagttgtcaagaataatggctttcatcaaattctgaaggggtgaaggggcactagatttttttttttttttttttttttttttgagacattgtctggttctgtcacctaggctggaatgcagtggcatgatcttggctcactgcaacctccacctcctgggctcaagccatcttcccacctcagcctcccaagtagctgggactataggtgcacactgccagggctggctaatttttgtatttttagtggagatggggtttcaccatgttgtccaggctggtcttgaactcctgagctcacgtgattcgcccaccttggcctcccaaagtgctgggattacaggcgtgagcccctgggcccagccagggatattagatcttgaccttcaaaaagattataaaccactgtcttaaaggaatgtctgccactcatgtgatctgaccccaaatattgatgttttatgtctttgtttggttcacaagtccaatgacaaatgcttagttctgttttcatcatgaacgtctcaggaagaaaacctggtcattagataaaactattaagttttgtgccttgatattaagttaaaaaatttttttcacttggaaaaatagtcaaatgttcctttctctttttctaagtatcttttcatgtgtttaatgggggaaaaaattaatgaagttgtcttaccaaaacagccagtgaaactcctctgaatggtacacattactaagtttttggttaatgcgatttttgttagattaatccttcaagaaggaaactattttaatgtaatttatatattttcctccccaagaattgaaaaagtatgggttcgagatggagctgcatatttttatggccccatcttcattcacccagaagaaacagagcatgagcccacaaaaatgttctacaaaaaagaagtatttctgagtaatctggaagaaacctgccccatgacatgtattctcggtaggtatttgtgcttttttatttaatcgtgtttattccatcaaaattgatggaatactacttctgtggggcactgttctaggtgttaggtatagagcagtgcccaaatccaaatctctgttctcttatgttgg

SEQ ID NO: 29746 - DNA, 2300 bp, Homo sapien
tagacatgcccctgagccagaagggaacacgctgccttgaagagagggacccagtcttggtagaattcatcacctgctgactaaagagcccttgggccctgaataatcagcaacagtagccaggtagtaggcctgtaggatacatttcttttttttttttttttttttttttttttttttttttttttttttgagacggagtctcactctgtcgccaggctggagtgcagtggcacaatctcgactcactgcaacctccgcctcctgggttcaagcaattctcctgcctcagccccccgagtagctgggactacaggcgcgcaccaccaaacccagctaatttttatatttttagtagagacggggtttcaccatgttggccaggatggtcttgatctcttgacctcgtgatccacccgcctcggcctcccaaagtgctgggattacaggcgtgagccaccgcgcccagccacaatcctacaatttatatggaaccataaaagactcagaatagctaaagttattttgagccaaaagaaaactggaggaatcacgttacccgacttcaatttatattatagagctatatagtatctgaaacagcatggtgctggcataaaaacagacaaatataccaatggaaaagagtagagaacccagaaacaaatccatacgtctacagtgaactcatttttgacaacagtgccaagaatatacattggggaaaggacagtctcttcaataaacggtgctgggaaaactggatatcagtatacagaataatgaaattagccccgtctcttgccatgtacaaaaatcaaaatggattaaagacttaaatctaatacctgaaactatgaaactactggaataaaactggactaggcaaaaatttcttgagtaattccccacaggcacaggcaaccaaagcaaaagtagataaatgggattacatcaagttaaaaagcctctgcacagcagaggaaacaaagtgaggggacaacccacagagtgggaaaaaactatctgcaaactaaccatctcacaatggattagttaccagaatgtatgaggaactcaactccttaagagaaaatctaataatccaattaaaaagtgggcgaaagacctgaatatacatttcccaaaaggagacatacaaatggcagacaggtatatgaaaaggtgctcaacatcactgatcatcagaacaaacaatgagatatcatatcactccagttaaaatggcttttatccaaaagccagggcctgatactagtaccccagagttggggcacacagtccaggagtcctgagctgagccttggccccctaaaatcctctagaaactaagcccatcaactgaacccatcttataccacaatcaaacacccaaggtcatcaaataggataaaagaatgaaaaaaaaaatagccaaaggacagcaactttaaagattgaaggaactttagcccacaaagatgagaaagaaccagcacaagaactctgacaattcagaagccagagtgccttctttcctccaacattgcaattcaggaaactcagagaatccccacaaaatacttcacaagatcatctccaagacacacaatcactagattctccaaggtcaaaatgaaagaaaaaaatgacaggtcaccttcaaagggaagcccagaagactgactgtgcacctgtcagcacaaacgctgcaagccaagaagagattgggggcctatattcaacattcttaaggaaaagaaattccaaccagtaatttctgtccggccaaaccaagcttcataagcaaaggagaaatagagtcctttttcctcaagcagatgctgagggaatttgttaccaccagacctgccttacagtagctcccaaaagaagcactaaatatgaaaaggaaagactgttaccagacactacaaaaacacactgaagtatatagaccaatgacacaacacaaacaagattgcttccagctaacaacacaatgacaagatcagatccatacatatcaatactgaccttgaatgtaaatgggctaaatactccaattaaaagaaacaagagtggcaagctggataaataagcaaggtctaatgggatgctgtcttcaagagacccatctctcatcccatgagacccataatgacacccataagctcaaaataaagacatggagaaaaatctaccaagcaaatggaaaacagaaaaaagcaagggttgtaatctcatttcagacaaaacagactttaaaccaacaaagaccaaaaaagacaaagaagggc

SEQ ID NO: 29747 - DNA, 2300 bp, Homo sapien
atagtactagtattgcaggcatgagccacagctcctggcccactatgttgtactttcatgtgttcctctgtcctttgtatttcctataaattggtagttggagccagaggcttgatcagattgaggtctgatcccctgttctctcccttaggcagaaaaaccgacttcataggtaatatatggtcttccatcaggtacatgtgaaatctatttatggctttctgttaacaggtgttgttgcatacttcattaattattaattcatgaaagggatgtaaaattgtgatagtttttaattttattccttattagctatagagaaactttgccttatctaatatttgattagccagtggtacagtgttttttttgtgtgtgtcttgctttttgaaaggataaaggcttgatttttgttttattttgttttcacctttaccagttttcaaaatatgtattggtttactaacatccttcaatatttacccattttgttgtttgtttgtacgtattattaagaactaccagacttaaacatatggctgagttgtaattgaagttattgtccttattgatactcaggctggttcaggctcgttcctgtattctttttgttttgtttttttgagacagagtctcgctctgtcgcccaggctagagtgtaatggcttgatctcagctcactgcaacctctacctcctgggttcaagcaattatcctgcctcagcctcccgagtaactgggattacaggcgccaccaccacactcggctaattttttgtatttttaatggacacagggtttcgccatgttggccaggttgatcttgaactcctgacctcaggtgatccacccaccttggcctcccaaagtgttgggattacaggcatgagccaccacgcccagccggttcctatattctattgacatgaagtcatggtaagaagtcattgatagattctttactgtctagtgtttgaagatataccagactgggaatcagccatttaccaaggagccctacctttttcatgtttctgctgaaaggtgagggctcctcaacattactatttggaattagtattttaaaactctaatgtgggctatactgctactgaggtagtcattgtttgtacgattttcagtggacagagctaggaaatttgtgtgtttgtttgtatgtttatatttaaagataaattacatcataagttcatagtgatactttcaattgagattaaaggcctcaaggtaattattaatgtcctacgttttaacatccgttatctctttttatcccatgatgaaaatctcagttctccaggataccagaggtgatagaatgtcacatagctactcatttgctttattccttcttattcacagctttctcaaccttacagtagtctcccatcaaaaatataattactgaaaacagttaaaaaaaatttttagtacttttttgtctgcaggttatatttcactatagacatgctaattgctagattttacaaattacttggaatcgtcccttgtggttatgctaccatctgtatacaaatttaggttcatttattttattcatttaacattaaatatctctctttaggtaggaagagtggcatttctcctaaaaaatcaaaatacatgactccaatgcagcagaaactaaatgaggtctatgaagctgtaaagaactatactgataagaggggtcgccgcctcagtgccatatttctgaggcttccctctagatctgagttgcctgactactatctgactattaaaaagcccatggacatggaaaaaattcgaagtcacatgatggccaacaagtaccaagatattgactctatggttgaggactttgtcatgatgtttaataatgcctgtacatacaatgagccggagtctttgatctacaaagatgctcttgttctacacaaagtcctgcttgaaacacgcagagacctggagggagatgaggactctcatgtcccaaatgtgactttgctgattcaagagcttatccacaatctttttgtgtcagtcatgagtcatcaggatgatgagggaagatgctacagcgattctttagcagaaattcctgctgtggatcccaactttcctaacaaaccaccccttacatttgacataattaggaagaatgttgaaaataatcgctaccgtcggcttgatttatttcaagagcatatgtttgaagtattggaacgagcaagaaggatgaatcggtatgttttcaaagccatttttattttgaggatatgtgctatttaatacaa

SEQ ID NO: 29748 - DNA, 2300 bp, Homo sapien
caatgttgttcttgaagctcgagagccaggttcaggcagaagactttgtgacctatttatggttaaaccatccaaaaaggactatcctgattattataaaatcatcttggagccaatggacttgaaaataattgagcataacatccgcaatgacaaatatgctggtgaagagggaatgatagaagacatgaagctgatgttccggaatgccaggcactataatgaggagggctcccaggtaaggagggccagcggtcctgaagtaggcacattttgcgggagaggggtacttatagaataatgcattttgagagaccagctctagaggcttaacttagattattctttttggtgactaggttaattgatttttcttcattgtttacaatcagaggcagtacattataaagataaacgttcctactttgtaatctgacatcctagatttgaattttgctctgccagtccctgtgtaagtaatttatccttcctgagcctcaatttcttcatctataaattagggctaataatagtacttgcatcagggttgttgtaggatttaaaagagataatgtatactgagcatttagcagagtgcctggtactgaataagcactcaaaggaaagccaatagtattaaaatctttcatcatcatcattactacgatcctcaacgaccatacttctccaaagacagcctatatagaaaatgtataattatataaaaatcagcatgatagtcccataaatgtacctctaaataatttatttaattgattttgctacagagcatcttgatttttttttgagacggagtctcgctctgtcgcccaggctggagtgcagtggcgccatctcagctcactgcaagctccgcctcccgggttcatgccattctcctgcctcagcctcccgagtagctgggactacaggtgcccaccaccacgcccagctaattttttgtacttttagtagagatggggtttcaccatgttagccaggatggtcttgatctcctgacgtcgtgatccccctgcctcagcctcccaaagttctgggattacaggcgtgagccactgcgcctggccaaagcttcttgatttttagttctttatcgttgtaactgagatacagtctcccttctttgaaactttttctatttgatatctttttatccactttacatctcccagaaataaaataacatttttaagtcatttgtttccctctgcaattacatttgattataaaataaagtatgcattgaggatgcttatagataaaaaaatggttctatcttaagggtttacacagtcctcagtgtcattggctaatgtaccccttgtctatcactggtagaggaaaaagccacctttaagagaggtggccagacaagggaggtcacttattccctcagctcctctgctttggtgggtggccaagggaggacatagcatctgctgaggaggtaagaggaggggctgtggatgcaaagcataaggtgagtaaccttattcttgactacatattaccacccttggctcagtcctcagagagagatccctaagcaaggataattgtttttttatagattaagcttcagactgtgaactcagatttggaatttaagatattgagatattgctctccaactatcagatatttttagtttctaatttctattgggctaagtctgctaccttgagcgtccagtggagaagaaaggtttttgaagaaaacaacacatgtaaatgtgtttcaggacttttgttaaaacctgcagtgattctactacagtggttctcaaacattaacatgcatgtctgtgcattagaatcacctgggaagcttaaaaacaaaccagttaaggcctaggctctcccacagatagagtgattttattgctctgtagtgaggctggttttggttttctttaagctcccaactatcataaactgtctttttaaaacttctttatggatgcattttataccttaatgaaaagtttttagaaaataattgaagtatatttttggaatgtaggtttataatgatgcacatatcctggagaagttactcaaggagaaaaggaaagagctgggcccactgcctgatgatgatgacatggcttctcccaaactcaagctgagtaaggcagcctcacacttcattatttagtttagtctatcaagaagagattgctgatttttctgaaataatatttaattaaattatgaatatatttgaactcactgtactccagcatggagttctttgttcttgtcaagccctctcattta

SEQ ID NO: 29749 - DNA, 2300 bp, Homo sapien
gaaagaaagaaagaaaaaggcctttcaaatcacaatatactatttgatagtattgttagattgtattgcaatataagcattgcaggactttcttgggtatatactatctgtagcagatcattcagtggttgcatttcttgtgttgtaaatagagttatagttaaaattgttatagttaaatagagtacgtgttatagttagagtatgtcatatcactaaaaggtgattagtttgaattaacagaagagtttcaaaggatagtttgtacctctgtctaggtatagcaagtctcattaagtgttttccagggatatgtcttgtggatcctgttttaatgaatggagaacattcattttcagggttttaattttagagtacatctaaagtgctagaaggttaattgtcctctgtccccttacctttttgcactactcatttgtcctgggctctgcttcttgctcttttccacatgatggcccacctagcaaatgatcataattgtaaggcacatagagaagcagatgaggtgctgactccagaggtggataccttggggcctctgtaccccaggcctgcctgactgcctcatgggctgaaggcttaataccttcagcacactaatgtactgctacatataggttgggaaactctaggccaaatttggagccagaagttgagtcattcaagattgctgatatacaaatgaatatgcttttgttgaatttgtcccatcaaaattggaagtatagcattctggtaagtgaaagactaaaacaaggaagtccagggcttaaaaaaaaaaaaaaacttatagctagttaaactacaacacgttaaaatatcctcctaagtgagccaggagtttggtagcaggtgtccagctgaagacttggtgacagagtctatttaaatgtaagaacatggctgattatttcttatagaagaagttggattccatgggttccaagagaagaagagctacctccccttccagcagtgtcagcggggactttgatgatgggcaccattctgtgtcaacaccaggcccaagcaggaaaaggaggagactttccaatcttccaactgtagatcctgtgagtaacttggattacatggtttctgcctgctcttcccacaattcccctatcttccctttaatggtaaaattgttacgatgcaaggcatctccacttttttaagattctcttgattaatagtcttttcttttatgaacattatgtattcagctaagtcttagagtaatagtgtgatcttatgaataatttcagtatgttacatcatatattaattcagcaaataactgtgtgactatcatgtgacaagcactgttctcatggttgggatatagccatgtggaaacaagcccatttttcacatggaacttagattccaggcgggggaagtagaatgtaaacaagtaaacgaataaagaataatgtatccttagctagtaataagtgctaagaagaaaattttgggtgatttgggctgttttggcctgaattcgctggaagagagttccagacagaaccagtgcagaggggttgggtcagggatgagttttgtgtgtcttggttacagagcaggggatggtcaggaaggagaaggaaactggcaagctccacccattcagagtatgtagggcccacacaagcaatgtttggagtttagattttattctctgtgaagtgataaacccttctgtcagatggctttaagcaagagagtgataaactgatttagtttcaaagaagaaaacccttcaattggatgactttaagcaagaaagtgatgaactgatatagtttagaagacaaaatcaccaggagcataaatctgatgaaagataccaaaaagttagtcaactcagttgtttgaaaggagacatattgtcagcatatttcagactttagcatgtttggtaatattgagagtcatcatttttcttctctacttgccttttattgaagagtagaaaataattcttatgtctacactggctttctgttcacttttttagtgatttttttctcctttgctaatgtgtagattgccgtgtgccatgaactctataataccatccgagactataaggatgaacagggcagacttctctgtgagctcttcattagggcaccaaagcgaaggtgagttcgaagcacatcagtacagttgcgggggatttggtccagagtccatgtgtattaaagtgtttggaaattgagctttttgttggcaggaatggcttaaatgatactggggtccaattttagtcttta

SEQ ID NO: 29750 - DNA, 2300 bp, Homo sapien
atatactaacactgaatcagcacttctaaagcccttccttctcccactggcttcacttggctttcagacataatgaggagactggcttttcgaggcgctggttgtgctctggtaaagctggtaaattactgattatctacaccctttcccttttctgtccttccttgactttttccttccacctttcttaaatttttgttatcctttccacaaagattccctccttatgttcatcaaattcacttgtgtctttgtcatagattgtttaaaagggattggtccttaatttatcttaatgaattgagtcctgttgatcagctttttataaaatgaacaaaaatcagcaaaacttggctaagttttggctaagccttttgacgattttaactacttttagccaacttcaaactaataatactgtataacaaaccgaagcctagagtaaggaacatcatcgtggtagattttgttttaaacaccatgtggactttagtttggaaaaagagatctgagacttctctttttccttaattgctcaccaggattttcaaatgtgattcttttgctccttctttctgtttcctggagatccccaacctttctttccatactgctggcaaccagtgttctcctgttctaatcattcagctgctggtgtcgtagtgtcctgaaattcagtgtttccatgtgccttacaattatgaggtactctagttctatgaggttcctcataattgtaaggcacatggaaaagcagatgaggtgctgactcaagaagtgaataccttggggcctctgaaccccaggcctgcctgactacctcaggggctgaaggatcaataccttcagtgttgatgagtgaaactgggatctttttttttcttttagctttagaaaaaggcctttgacgggcggatcacgaggtcaagagattgggaccatcctagccaacatggtgaaaccccgtctctactaaaaatacaaaaattagctgggtgtgatggcacacgccttagtcccagatactctggaggctgaggcaggagaatcgcttgaaactgggaggtggagggaggttgcagtgagcagagatcgtgccactgtactccagcctggtgacagagcgagactccacctaaaaaagaaagaaagaaagaaagaaaaaggcctttcaaatcacaatatactatttgatagtattgttagattgtattgcaatataagcattgcaggactttcttgggtatatactatctgtagcagatcattcagtggttgcatttcttgtgttgtaaatagagttatagttaaaattgttatagttaaatagagtacgtgttatagttagagtatgtcatatcactaaaaggtgattagtttgaattaacagaagagtttcaaaggatagtttgtacctctgtctaggtatagcaagtctcattaagtgttttccagggatatgtcttgtggatcctgttttaatgaatggagaacattcattttcagggttttaattttagagtacatctaaagtgctagaaggttaattgtcctctgtccccttacctttttgcactactcatttgtcctgggctctgcttcttgctcttttccacatgatggcccacctagcaaatgatcataattgtaaggcacatagagaagcagatgaggtgctgactccagaggtggataccttggggcctctgtaccccaggcctgcctgactgcctcatgggctgaaggcttaataccttcagcacactaatgtactgctacatataggttgggaaactctaggccaaatttggagccagaagttgagtcattcaagattgctgatatacaaatgaatatgcttttgttgaatttgtcccatcaaaattggaagtatagcattctggtaagtgaaagactaaaacaaggaagtccagggcttaaaaaaaaaaaaaaacttatagctagttaaactacaacacgttaaaatatcctcctaagtgagccaggagtttggtagcaggtgtccagctgaagacttggtgacagagtctatttaaatgtaagaacatggctgattatttcttatagaagaagttggattccatgggttccaagagaagaagagctacctccccttccagcagtgtcagcggggactttgatgatgggcaccattctgtgtcaacaccaggcccaagcaggaaaaggaggagactttccaatcttccaactgtagatcctgtgagtaacttggattacatggtttctgcctgctcttcccacaattcccctatcttccc

SEQ ID NO: 29751 - DNA, 2300 bp, Homo sapien
aaaaacaaaaaaaaagtgcacttgagaccttcaaaaaaaaaagtttatttgtatagtttaaaagtcctcagccaggcacaggggctcatatctgtagtcccagcacttggagaggctgaggcaggatgaccgcttgaggcagagagttcaagaccagactggataacatagattgatcttttctctacaaaaattaaaattagctgggtgtggtgctgcacatcagtaatcccagctacttgggatgctgaggtgagaggactgcttgagcctaggagcacaaggcttcagtgagccatgatcactttactgaactccagcctgggcaacaaagtcagaccttgtctcaaaaaaaaaaaaaaaaaaaaaaaaaaaatgcctgtaagcatcccttcagcaattttgtctttccatgaagaggaaagacagattccagagttcaatgccaagttttaaaatggccttgattacagttacaagttcaaaagtctaacaatcaataatttatagtggacagttaagaatacttaataatgtgcaactgggagaatatcgacttactatagacaaacagtgtatttcgaccgtttatgaactttagccctctcctatatttctagtaatatttagcaatacaatacatgtttaaaacaaaatcttggaaaacaggactcaaaggaaaaaaaacacctataaacctacttccaagaaaaaaaccactcttaacgttgtcattcggtttttggtatttatgccttagttacctattattttttaccaaaatgttaacaaaccacatatattattctacagcctgtgttttagtgaaggttcttccaagtcaacattcttcctcatgatgtttgatgacttgatagtaatctatcatatagatacaccacaatttacttatcttgggaattttggtaggatattaacatttgaggtattttgtacattcccaaagccaaagaaagcggtcaaggcccttccattcatccacacataaactctttattgttttaatttgaaacacctcttcaaaacatattttccaatcttccattttggagctcaaaatcaaatatgggcgacctgtaagtaataaagcaaaaattatgctactcttttatgtgcatgagtccaatttgcactttttggggaaaagcacatagccaaatggagaaaaaaataatacctaaaattatttgtcaagaatcctgtgttggaaagtaagttaattaaaacaattcaccccaacatacgcttctataattattgtaagaatttctatatccactataccgtgtacttatttttcagggctttttctatatttttgcaactctttcttcccctttaaattaaaacttattataataacaaaactgtgcttccccaaaccaagaaatatacacagttcccaaaatcccggattctttgtggtgttgagaagctgaaatatctggcctctactataaatacaagtcccattgattaaaatacccggaaaaaatacggaaagaaaatcactaagagtttgtgtcgaaccgtcaagaaaccacaacaaaaaaaagaggccctgagcaacggaggaaatgaaggactttcccgacctgtcactggtattggggactgagggaaacgttgacagctttgaagctgccccgcgacgagcgggaaagaggagcgcggggagtttccgacccgtagtgcgcctttgtccctgccggcaggtgcgacaaggctactgggcccatccggaggccagccgccgcgccccgcccaaccccgcgcgcccggcccgacccgcgcgtccccacggccggggcggggcttccgccgcggctcccgcccgcccgggcccacacaaaggcccggcagctgaccaagggggagcggccccacccgccctgggcccggccttacccagccgctccgccgcctgcagccccggccgcggtcaccgaccgccgcgccccgccccgtggccgccacggctgctgctattgctcctccggccgcggccgctgccgtcgcttcggcacccgccgccctcacctcccttacccctcccggtgccgccgcaaaaccagtcccgcggccgccaagcgatccctgctccgcgcgacactgcgtgcccgcgcacgcagagaggcggtgacgcactttacggcggcagcgtaagtgcgtgacgctcgtcagtggcttcagttcacacgtggcgccagcggaggcaggttgatgtgtttgtgcttccttctacagccaatatgaaaaggcctagtaagtggggtcgg

SEQ ID NO: 29752 - DNA, 2300 bp, Homo sapien
ttctgcatcagaactcatctctcagccaggcacaacagcccacacctgtaataccagaaacttcgggaggctgagttgggtggatcacttgagaccagccttggcaatatagtgaaagcccgtgtctgctaaaaaaaattagccaggcgtgatggtgtgcttctgtagtcccagctacttggagactgaggtggtaagactgcttgagcctgggtggtccaggttgcagtgagttgtgattgtgccactgcactcaggcccaagcaaaaaaaccaaaatcaaaacccctgatctctcattcataaagagacctaatcataccttttccataggttccacatttgatggcttaatatcaggattagtttcaagttttcttttcttttctagttccttctgcctgtcaagtttctgctgctgttttagttcttcaagctgtcagagccataagggaaataggtgaaccagtgactagtgttgttaccttactctgaaaaatatcacacataacacactacaccactcaatgaaaattctggctaacataacttaccctctgtttccttagctcagcttccctaagaagagcctccttaaagggagcactgtttggaactcctgggtctttcctaggcttcttgtgaccccgctttttagcctcctttcttaattttcgatgatgttctcgaacctattaaaataaagagattttgtctgcttacaaaaatatctttatacttaagcagaattcaagtgagaaaccaatctggctgcaatttagttatgcctataaaatgtcctaggaaaatggagctttaattggaatcttacaaagtaatgcatatgtaagtataaaacagcaagaaattgtaactagaaggctctctatgcagagattaacatgctgaacaaatttagagacttatcaccaaatcactgcactttctcacagctgcactcctgatgcctaagagcttgtgcccatggtcagtctatccaatgccatttcccaaaaccaaatcacattaacccagactttcccgcaaaggaacagggcaaaatcagtttagcaatgtgtttggtacagctctctcaagcactacacttacctttttttggattttataccgcttatggcaggtcatgcgtttacttgctttctttaactctacaaagaaacacatcacaaatctgttaacccaaatgattagttctgggttaacgcactatggagttatatccttttcttgtgttattggctaccaaacctaacgttaagtctaatgcgaaatgcctaatgcaaacatacgtgctactttcaaatcccagagaattaaattcagtagatccagaatggagtcaaaattccctgcacttaccctcacaatattagaatgggatcatacacaacagcgtatgagacacaaaacgacaaccacttcgtgtcaaacagcacgaatcataaggcaggagaggaacactgagtctgggaggcgattctcagctctcacctgggccagtctgcacgtggccacggaaagaaaatattgggcctcaaacctggctcagacgctgcttccttacgaaaatctagcctagtcttccccaccctctgcccggcttcgttccgcagaatgagcccgcgcggttaacatgatcgccgtagggacttccaactctcggttctaccaggaaatagggccaaggcctacgcgtaggctcccacccccataccagcagagacaaagccgtagccgtagaagagcgtcgtggtggctgcagcaacttccagacgtgggtccctccacgcccgcctcccgaccccacttactaggccttttcatattggctgtagaaggaagcacaaacacatcaacctgcctccgctggcgccacgtgtgaactgaagccactgacgagcgtcacgcacttacgctgccgccgtaaagtgcgtcaccgcctctctgcgtgcgcgggcacgcagtgtcgcgcggagcagggatcgcttggcggccgcgggactggttttgcggcggcaccgggaggggtaagggaggtgagggcggcgggtgccgaagcgacggcagcggccgcggccggaggagcaatagcagcagccgtggcggccacggggcggggcgcggcggtcggtgaccgcggccggggctgcaggcggcggagcggctgggtaaggccgggcccagggcgggtggggccgctcccccttggtcagctgccgggcctttgtgtgggcccgggcgggcgggagccgcggcggaagccccgccccggccgtgggg

SEQ ID NO: 29753 - DNA, 2300 bp, Homo sapien
atttgtaatctggcctgtgatcccatttttaaaaaaaattttttttagatatggggttgggggatggtcatactatgttgctcaggctggtctggaactcctgggctcaggcagcctcccaccccagccacctgaatagttgggattatgggtatcagccacagtgcctggctgatccacagtttttattgctttttattttttatttttttgagacagggtgtcgctttgtcacccaggctggagtgcagtggcatgaatatggcttactgcagccttgacctccctggctcaggggatcctcctgccttagcctcccaaatgcttgggactacagatgcacgtcaccatgcctggctaatttttgtatattttgtagagatgagctttcacaatgttacccaggctggtcttgaactcctcagctcaggtgatctgcccgcgttagccttgttgttttcattttgggattataggcatgagccacagtgcccagcccccaattttttaaacagtttttcaacatatttctcttctttacaaaggccttgagaaattaagtgcctggtaggcacacaattttcccaggatgaagttaattcaaacttactttgtctgtagtccctgctacttgggaggctgaggcaggaggcttgcttgagcctaggagttagaggccagcctgggcaacatggtgagaccctgtctaaaaaaacaaatgaactaacttgcattgcaatacgctatgtttgaaagtgctttgtaaaattaatagccttatgtaagggttgggtactactatgggtgaagatgaagtaagaaagggttaaaaggtaggttcacgatatcttggttggtaaaatgtctttaaggaaacattttatccagagcttgttgaaggaatttattttttaaataaatttagttccacctactatcttgtttccactgaattgttttgaaaaagtgaaggtcagatgagctgaggaggaccaaccaggacattgtgacaattagacaccaccttcttaagagatgaatagctagctaacagagatggtttttgagaatagcaccttaaatgtttttttggccgggcgtggtggctcacgcctgtaatctcagcactttgggaggctgaggtgggcagatcacgaagtcaggagttcgagaccagtctggccaacatggtgaaaccccatctctactaaaaatacaaaaattagctgggcgtggtggcgcacacctgtaatcccaactattgggaaggctgaggcgggagaatcgcttgaatgcgggaggcagaggttgcagtgagctgagatcatgccgctgcactccagcctggacgacagaacaagactccgtttcaaaaaataataaactaaaataaacctttttttttttttgctagttacaatggctagaaatgtactccacacttttgatatcgattggattttgtgaatttttgtagctttttctgtgctgtgggtttgtcaagtgaatttggataatattcttttctctgaggacactcatgttaaaggtgaatgggatacaactctgaacaggcatgtttttactgatgaggctaagacctcaggttacttggtcatagacaacgtgaatccatgtctactttaggaattttaagtagaaacttaattatgttatgtaattttttattttaaagacagagtctcactctgtcgcccaggctggagtgcaatggcatgatctcggctcactgcaacctctgttgcccaggttcaagcgattctcctgcctcagcctcctgagcagctgggattacaggcccctgccactgcacctggctaatttttttgcagtttttagtagagacgaggtttcaccatcttggccaggctggtcttgaactcctgacctcatgatccaccccactcggcctcccaaagtgctgggattataggccagaccctgcctggctgaaacttaattcttaaatgtttcttttgcttttcatcttgtgatgtataatgtacaaggctaaggctgtttctccaacttatttttaagttttttattaatgagtaccacaaaaatttcagatcccaaattgggttcttgggaactgtgaattcaaaatgagtttctggcggaatactgtatatgcctcttgtttcttcctgaattaaaaaaaaaaaaaaagtgttagggcattttgatgtcccttctcatgtgcttactgactttgggggcttgtttttgttttgtagggttaaaaactaatatttatatgacagaagaaaaagatg

SEQ ID NO: 29754 - DNA, 2300 bp, Homo sapien
atcacaggccagattacaaattagggggaaaatacacatctttctttctttccttttttttttttttcgagacagagtctggctctgtcagccaggctgcagtgcagtggtgccgtcttggctcactgcaacctctgcctctcagattcaagcaattcttgtgcctcaacctcccgagtagcagggactacaggtgtgcgccaccacgcccagctaattttaatagagagagggtttcaccatgttggccaggctggtctcgaactcctgacctcaggtgatccacctgcctcggccttccaaagtgctgggattacaggcctgagccaccaggcccagcccacacacacctttccaaagcagtatatatgaagtacaacgtgtcagtgaacttcttctcatatacatcagggcgccgtggctcacgtctgtaatcccagcactttgggaggccaaggcaggtggatcaagaggtcaggagttcgagaccagcctgtccaagatggtgaaaccccatctctactaaaaatacaaaaaattagccaggcatggtggcaggtgcctgtaatcccagctatttgagaggctgaggcaagagaatcccttgaacccgggaggcggaggttgcagtgagctgagaccgtgccactgcactccagcctgggcaacagagtaagactctgtctcaaaaaaaaaaaaaaaaaaagagaagtatatacatcagtatataccctaagtcatatgcctctatcacattatgggctgaccttatctacagaagctggcagaggggagctgttcggacaaagccccaacatctgcctgcgatgaggcaacttccaccaccactgagaaaacgatcttgcactcaaataaatcccacttaattaatggtacaagagataatgtttttagtttcttgacttccagttagcagttacgggatcaagaggcacacttggctggaaacaagaaaaacacaattctatcaagtatctgacatacttaagtagactggcaaggcagaaaccagttgctcctaaaacttccacagttacctacatgcaaaacgccagttatcatggagtacgtctaatccatattgtctttcctggggctattcctggtaagagagctttcctgatctggttagaaggaattctcaaaacgaaattgcacacagacgctggatctgtaatagttaactacattttcgtaagagtatataattgtgtacaatttgattagcaacacagttggtcctcagtatcagtcggggattggctccaggactccccatgtatacaaaaattcacggatgctcaagtcccttatgtaaaatggcatattacagtcagccctctgtatctgtaatttcagtccgtggttggttgaatccaaggatacaaaactgtggatacaaaaaaaaaagaccgcactggccgggcgcggtggctcatgcctgtaatcccagcactttggaaggccgaggtgggtggatcacttgaggtcaggcgtttgagactagtctggccaacacagtgaaaccccgtctccactaaaatcacaaaaattagccgggcgtggtggcgcatgcctgtaatcccagctactcagaaggctgaggcaggacaatcccttgaacccaggaggcggaggttgcagtgagccgcgatcgcaccactgcactccagcctgggcaacagagcgagtcttcgcctcaaaaaaaaaaaaaaaaaaaaaaaaagaccacacagagatatatctatttatacacacaacagaaagtctcttcaaacacaccaagaaatacagagcatgagaaggaaacaggaataaactcttgcccatccctctttctgccttctacacgtcctgagtccttctgaggtcagaaaagtgtcaaacgtgtctgcattttactgtttggtctctgccacgtgcaaggatgaaagggcactgaggatatacaaacactttctcctaccctttcatctggctggctcccacttggcattcaaaggtcaaggtagcctcctccaaactccacgttgagctgcacctcccctgagctcccacatctgggcctccctctcccagggctaatccagctgtcatgtatttctggcgtgatgtggctgtctcccttgacacgctctgggctcttccaaggcaacagcctggtcttggtaacaaccgtgtcctcggtctgctgtctggcacaaacaaggtgccgtgaatatttgctggttgcatgaatgaggacagcagtcccaccctgtcccgggagtgcctagaat

SEQ ID NO: 29755 - DNA, 2300 bp, Homo sapien
tgccacggagctagagggcaagtgtgctcggcccagcgtgcagggaacgcgggcggccagacaacgggctgggctccggggcctgcggcgcgggcgctgagctggcagggcgggtcggggcgcgggctgcatccgcatctcctccatcgcctgcagtaagggcggccgcggcgagcctttgaggggaacgacttgtcggagccctaaccaggggtatctctgagcctggtgggatccccggagcgtcacatcactttccgatcacttcaaagtgtaaggggggccctactgacccttggaatttaggggggctaccctaggcggcatccacaacagagagaattcccttggagaggggaccctggtgctcggctgtccctctcatccgcgtagaaagtccctcatctgggggctcccgaactcagccctctcacattgtggccggctttactgaccctcacagacccaggctgggccctcccgatagaggccagccaaaggttcactcagcctctctttcaaggctggtgtatctctaaatcttagaccctcctccgttaccgtcagccaggtgggatgcccacgttttggagagaaaccgttctgaggaacccgggcctctgggtcccagctggctctccggcccccaggttatgtattctgggttggccacaaacagtggaattctaggcactcccgggacagggtgggactgctgtcctcattcatgcaaccagcaaatattcacggcaccttgtttgtgccagacagcagaccgaggacacggttgttaccaagaccaggctgttgccttggaagagcccagagcgtgtcaagggagacagccacatcacgccagaaatacatgacagctggattagccctgggagagggaggcccagatgtgggagctcaggggaggtgcagctcaacgtggagtttggaggaggctaccttgacctttgaatgccaagtgggagccagccagatgaaagggtaggagaaagtgtttgtatatcctcagtgccctttcatccttgcacgtggcagagaccaaacagtaaaatgcagacacgtttgacacttttctgacctcagaaggactcaggacgtgtagaaggcagaaagagggatgggcaagagtttattcctgtttccttctcatgctctgtatttcttggtgtgtttgaagagactttctgttgtgtgtataaatagatatatctctgtgtggtctttttttttttttttttttttttttgaggcgaagactcgctctgttgcccaggctggagtgcagtggtgcgatcgcggctcactgcaacctccgcctcctgggttcaagggattgtcctgcctcagccttctgagtagctgggattacaggcatgcgccaccacgcccggctaatttttgtgattttagtggagacggggtttcactgtgttggccagactagtctcaaacgcctgacctcaagtgatccacccacctcggccttccaaagtgctgggattacaggcatgagccaccgcgcccggccagtgcggtcttttttttttgtatccacagttttgtatccttggattcaaccaaccacggactgaaattacagatacagagggctgactgtaatatgccattttacataagggacttgagcatccgtgaatttttgtatacatggggagtcctggagccaatccccgactgatactgaggaccaactgtgttgctaatcaaattgtacacaattatatactcttacgaaaatgtagttaactattacagatccagcgtctgtgtgcaatttcgttttgagaattccttctaaccagatcaggaaagctctcttaccaggaatagccccaggaaagacaatatggattagacgtactccatgataactggcgttttgcatgtaggtaactgtggaagttttaggagcaactggtttctgccttgccagtctacttaagtatgtcagatacttgatagaattgtgtttttcttgtttccagccaagtgtgcctcttgatcccgtaactgctaactggaagtcaagaaactaaaaacattatctcttgtaccattaattaagtgggatttatttgagtgcaagatcgttttctcagtggtggtggaagttgcctcatcgcaggcagatgttggggctttgtccgaacagctcccctctgccagcttctgtagataaggtcagcccataatgtgatagaggcatatgacttagggtatatactgatgtatatacttctctttttttttttttttttttgaga

SEQ ID NO: 29756 - DNA, 2300 bp, Homo sapien
cttaagtagactggcaaggcagaaaccagttgctcctaaaacttccacagttacctacatgcaaaacgccagttatcatggagtacgtctaatccatattgtctttcctggggctattcctggtaagagagctttcctgatctggttagaaggaattctcaaaacgaaattgcacacagacgctggatctgtaatagttaactacattttcgtaagagtatataattgtgtacaatttgattagcaacacagttggtcctcagtatcagtcggggattggctccaggactccccatgtatacaaaaattcacggatgctcaagtcccttatgtaaaatggcatattacagtcagccctctgtatctgtaatttcagtccgtggttggttgaatccaaggatacaaaactgtggatacaaaaaaaaaagaccgcactggccgggcgcggtggctcatgcctgtaatcccagcactttggaaggccgaggtgggtggatcacttgaggtcaggcgtttgagactagtctggccaacacagtgaaaccccgtctccactaaaatcacaaaaattagccgggcgtggtggcgcatgcctgtaatcccagctactcagaaggctgaggcaggacaatcccttgaacccaggaggcggaggttgcagtgagccgcgatcgcaccactgcactccagcctgggcaacagagcgagtcttcgcctcaaaaaaaaaaaaaaaaaaaaaaaaagaccacacagagatatatctatttatacacacaacagaaagtctcttcaaacacaccaagaaatacagagcatgagaaggaaacaggaataaactcttgcccatccctctttctgccttctacacgtcctgagtccttctgaggtcagaaaagtgtcaaacgtgtctgcattttactgtttggtctctgccacgtgcaaggatgaaagggcactgaggatatacaaacactttctcctaccctttcatctggctggctcccacttggcattcaaaggtcaaggtagcctcctccaaactccacgttgagctgcacctcccctgagctcccacatctgggcctccctctcccagggctaatccagctgtcatgtatttctggcgtgatgtggctgtctcccttgacacgctctgggctcttccaaggcaacagcctggtcttggtaacaaccgtgtcctcggtctgctgtctggcacaaacaaggtgccgtgaatatttgctggttgcatgaatgaggacagcagtcccaccctgtcccgggagtgcctagaattccactgtttgtggccaacccagaatacataacctgggggccggagagccagctgggacccagaggcccgggttcctcagaacggtttctctccaaaacgtgggcatcccacctggctgacggtaacggaggagggtctaagatttagagatacaccagccttgaaagagaggctgagtgaacctttggctggcctctatcgggagggcccagcctgggtctgtgagggtcagtaaagccggccacaatgtgagagggctgagttcgggagcccccagatgagggactttctacgcggatgagagggacagccgagcaccagggtcccctctccaagggaattctctctgttgtggatgccgcctagggtagcccccctaaattccaagggtcagtagggccccccttacactttgaagtgatcggaaagtgatgtgacgctccggggatcccaccaggctcagagatacccctggttagggctccgacaagtcgttcccctcaaaggctcgccgcggccgcccttactgcaggcgatggaggagatgcggatgcagcccgcgccccgacccgccctgccagctcagcgcccgcgccgcaggccccggagcccagcccgttgtctggccgcccgcgttccctgcacgctgggccgagcacacttgccctctagctccgtggcagccgcgcagccccactacgcccagccagcccgcagcggtaaccgctagagcgtcgcgccaagcaggcgccgcggggcagccctgccgccggggtcctcgcagggaaaaaggccgtcgccatggagacgcgggggcgccggcggccgttgggccgcgcaagtactgtcaaggacagttttcgggacgggggacgcggctccaggcacccaacagcactgacggcgaacacttcacgggcgcgcgatgcctcgacaaggcggccgccaccaccacctcagctgccctcgcgggcagcacggcgcggcaaaagcgcacgtcgcc

SEQ ID NO: 29757 - DNA, 2300 bp, Homo sapien
ttaactcataatgaattataaaactttgatagttacattgtactatcatttatgaggcatttatttttcattatttacacctgaaagaaacttcatacttgtgtgttctgttccccatctcagagcaagattatgaagagaaggtctaaactacttatataaatcaaaacccaactgggctagaaatgaagtataaagagaactaaatctatacacagctgtgccataagagcattaggtggttttagctcttatctggggtatgaaagcaatttagctcatctcacagaaacaaaagcaggtgctgaatcatgaaaacctcaattatttttagcatgcctcttaatttttctttcccctggtttcttgtcgtctgtgcttgattcttgaacaggtaaccacttgagaggatgccggcgatagatgggccatggaggaagtgtcagctgggccagaaaagaggaaatgcataaattatagctattaaaagtttaaaaaatcattacgtataatgccaggttcccaaatgactcctatgctgagggaacaaaaaaacaaaaaaaaaaatccatattcctataaaggctctgtgccaccatccatgcaaaatactgtatgatgatgggaacaggctcactgcctatacaaatggctttaagacctaaaagaaaggtgggggccaggcgtggtggctctcgcctgtaatccaagcactctgggaggccaaggtgggcggattgcttgagaccagcctggccaacacagtgaagccctgtctttactaaaaatacaaaaattagctgggtgtggtggtgggctcctgtagtcacagctactcgggaggctgaggcaggaaaatctattaaacccgggaggcagaaggtgcagtgagccgaaatcgccccagtgcactgcagcctgggcaacaagagtgaaactccgtctcaaaaaatttaaataaataaataaataaaaggtgaagggacaacgtgagcaccatgaaaactcctgctggctttgaccttaagattattagccagagtagccgccaaaggaaataagctgtgtccttttatatagttcgcaccatctgacactattttggcattctacttttccaatgatagcaaagggaaacgctgtttggaaggatgagggaaacgttggctttgggtctcactactgagtaggtctaaccaaaccaacccgactcacaaaacccaagctgccactaatacccacaaatttcttaccaaacatgaaaaagcaaatccggccataactatatagacagtccacccgaactgttcagccacgtacccgtagataaatccaactatctagagacaaatgaagtatattaaacacactcaaactgagggttgggagggaggcgggggcggagattaaatgtaaaaccaatacttactgcagaaaaaagaataattccctgaaacatctgttcagctagcttctggcccttgtaatcctggggtgaagcagaggaaaaaaagaattggttccaccgccgagaacatacaattcctgccctgacctcacaactctggcacagggtaaccccaacatcagggtctcccgctctcctaagggcctgggcaagatattaaattctgggcttcccgggaggaactgaaacaccctcacggagaatggacaggagattctcgcggagtagaagagaaggggacccaggaggcaattcgggaaagagggtggacggtaaccatccgggcccggaacagcgcagcaccgggtcggtgctccaacatgggcttcgaagctgccaggcacaagaacggcgtgcagaggtccccgggttgcgccctcaccatctgcgtgggcagcgagctcagatgctccagcatggctggctgaggaggcgggcagctgagcgcgggtggcaggctgcgaggcgagggcgaccgagacttaaggaccgtgaggggtaaggtctggcactgcgcgtcagtagccgggccttctaagcccgggagagcgatggcggcggccccggaagcggaagtctccgacgggccggtacagcccgtgtccccgccccgcgccatcgctaggcgacgtgcgcttttgccgcgccgtgctgcccgcgagggcagctgaggtggtggtggcggccgccttgtcgaggcatcgcgcgcccgtgaagtgttcgccgtcagtgctgttgggtgcctggagccgcgtcccccgtcccgaaaactgtccttgacagtacttgcgcggcccaacggccgccggcgcccccgcgtctccatggcgac

SEQ ID NO: 29758 - DNA, 2300 bp, Homo sapien
gaggctcaactgattctcccacctcagcctcccaggtagctgggactacaggcatgcgccaccacacccagctaattttaaaaattttttgtagagaagggggtctcactgtgtttcgtaggctggtctcaagtgatcctcccaccttggcctctcaaagtgctgggattaggtgtgagtcatagtgtgtggcctctagagcactaactttaaaaagctacaattacaaatccttcctctgtccctctgagatatatacctatgtatttcctacaacctaggaatgtctttctcaaggacctgaaatccattcctttggaatgtaatcatcataaaggtagggctcatgtctcccagtctatgtgggagaatagaatcctaacttccctaattgccagctagcagacacagttggcctaatcacatttacgctaagcactccttttaatttttcacttcccagactctaagtgagcccctgcatgctcccctgcctactcccttattcttcctttggaatgcccaatcacccctgcgcaaatggaatggagttcagctgcttcccctactgtcagtagttactgaataaaatctattttcatcattttaatgcctggctttgtttatctttaataatatcattaactagagttcaatctttatttatggttctttttgtttggttttctagtgaagatgaaattgctttgagtaaaatgtgcaaatactaaatgtaccattagataattttgacaaattcatacacccaaatctcctatcaagatatatatcaaggatgaggagaaatttgaacccctgtggattgctaatgggaatgtaaaatggttcagcttgctgtaaaaaatggtgtggtggtttctcaatacattaaactagaattagcatatgatccagcaatttcacttctgagtgtatacccaaatgaattaaaaagaaagcagggactcaaacagatattcgtacacccatgttcatagccgaattattcacaatagccaaaagatggaagctatccgtgtccatgactgcatgaatggataaacaaattgtggtgtatacatataatggaatattatttggccataaaaaggaaagaggccaggcacgatggcgcacacctgtaataacggcattttgggaggccaacgtgggtgaattgcttgagccgaggagttcaagaccggtctggggaacatagtgacaccctgtctctgaaaaaaaataaaataggattagccaggcatggacgtgtgtgcctgtagttgggaggatggcttgagcccaggaagtctaggcagcagtgagcaccattgcaccactgcactccaagctgggtggcagggcgagaccctgtctcaaaaaaaaaaaaaaaaaaaaaaaaggaaaaaaaggaagcgctctgggaaagggaggctttggctggaacaaatggtgaattcttttggcacccctgagctttcttgggcaggcattttaaaggggcctaggcccacctagagatccgcccttaggctgttaacttagcatgatgccatgttagagtttagtcaagtctcttagtgcagtggttagggtagtcgttaaatgctgaggagtctttgtagttctcaattagcaggcgagtttttagggatgaaaggtactgataatttactttgaatgtatcaaaaaataggatggattgctggatgcagagacggcatgtgataaagcggatacagcaaatgttactggtagagagtctgtcacccagtcattagaacatgagctccaggagggcagggactttgttggcctggcacataggcggtcaacaaatatttgcagaatgaacgaacaatacttgtaacggccttaggacaaacaagtgcacaaaaagaggaagctttccctgactctgttgtggcggggatccggacggtggaacggacgcacagaaagtgcgcggagcctggcggagtcgctctggcctcctggagcctctgctctatggcgggtcctcccggggctgcggaacctctctggccgctcgtggcgtccgctctatggccgtcctttggggacgcaggagcatgcgcagaactgctcccggcccggatcgctatggcagcggcgtcgtcgcgggccgggccccagcaatcccgcccgggcccggctgcctcaacagccgcccccactgccccctctcgggcatgaaccgagcttcttgttgccgcccgctgccctacccgccgctgccgccgcatcccgactctgggccagcgctgggaacatgcccc

SEQ ID NO: 29759 - DNA, 2300 bp, Homo sapien
cgatccagcttctcttctacaaaggccagaagacaggccagaaggtgaccgtggcctaaggacaataaactcttcccagaagctgctctgtgagacaaagtccaggacaagcaaacagagatcagtgagggctctgggccccctcctcttatcagggtcacagcagccagcacatcccaacccaggtcacagactagactggccaggggccctgtctgcccagtatgctgtggtttttggggaacagggtgggtttggcaataaaaaaataagaaactgcaggtgcaagatgggtctctgggaactcctgtctctaggatcttcaagtctgcttctctgtcattacatgatggccttgggctttagagcctgagagacctggtttgaatccctgttctgtctcttggtatggggccagtgtcccaggaacgttgcgaggataaaattagacaataaagggtttagaggaatgcatgacacaaatgagtcctcgattatgaaaacatgtcattcatcttcagctcccctttatctgccaggcctccctgcccaggtgcaggaacgaggaagctcacttctgttctttctagaactgggtaagaacctcagagaggtgaagcaactggcctaaagcgcagatctcccatcatgcctcaccccgaccgtccagactgtctctgacagagctaataccaggttagcactgtgagaatcaccagcatggctggatgtcacacactttctaagccaccgtgtctgcctccctggccaaagcatgactgaaaagtgtgttgatgctgaaagaattttgaaacagtctgggcaacaaagtgagaccctgtttccctccctttcttttcttttttcttttcttttcttttcttttttcttttctgttctttctttctctgtctctctttcttttcttttctttctttctttttggagacagtctcgctccgtcacccaggctggagtgcagtggcacaatcttgcctctctgcaaccaccactttccaggctcaagctattctcctgcctcagcctcctgagtagctggaaccacagacgcatgccaccatacctggctaatttttgtatttttggtagagatggggtttcaccatgttgcccaggctgggctggaacttctggcctcaagtgatctgcctccctcagcctcccaaagtgctgagattacaggcatgagccacctcgcccgactgaaaccctgtttcaacaaaaaataaaaataatcagctgggtgtggtgccacattcctgtggttccaggtactcagaaggctgaggtgggaagatcagttgagtctgggaggtcgaggctgcagtgagccaagatcgcaccactgtattccacctgtgcgatagagggagaccctgtcttaaaaaaaaaaaaaaaaaagaaatttgaaagtaaagcctggccgggcccagtggctcactcctgtaatcccagcactttgggaggctgaggcgggcagatcacctgaggtcaggagttcgagaccagcgtggccaatgtggtgaagccgtctttactaaaaatacaaaaattagctgggcatggtggtgtgcacctgtaatcccagctactcgggaggctgaggcaggagaatcacttgaacccaggaggtggaggttgcactgagccaagatcctgccactgcactctagcactcaagaccaaaactccatctcaaaaaaaaaaaagtaaagcctaatgaagtttagaaatccatttttaactgttgcttcttgccacatgtcaccgtgtcactggtgctgccttgtgccagcccgaggatgagatgagccatccggggatcctcacagttcacataggctaagcgcagttctacacagagggacatggtctggagccccatcagtagtttaaccacccagagctgggaacccccctgaggcaaaaagcttccactgccaaattttgattcctctaaatgtgttaggttgatgcaaaagtcattgcggtttttgtcattaatatttgcctgcaccttgtctaatgtttaatccatgtttatccagcactgtattgattactggtctgactgaggtgacagggcagcaggagccttagagcatggacggtgccatggggcctcgggggctgctgttgtgcatgtacctggtatctctcctcatcctgcaggccatgcctgccctgggctcggctacaggcaggtccaagagcagcgaggtatatggctaagcccacagggcagaaataggcagctgaacctggatgaggccccgggc

SEQ ID NO: 29760 - DNA, 2300 bp, Homo sapien
ccagtcccagtgcctcccctccaggacccttccctggccatcccctagaggactatgggacatccctgctccaagccccaagccccctgagggcctgctttgtcatgaccttatgttgaggtggatgtgctcaggtctgcctgccccctctgcacccagagctcctgggggctggaccatgtcatgtttccctctgtgcttccagggcccagccagggacttggctgccctcagccttttggggagtcattgccctaaaagtcgtagtgaggctgggctccagcttccaggacaacaggagctttagaggcaggacctggtctcagtgggggctgggacctcctgagccacctcaggaccctgccagcctagccccatcagggcagctgttgcacacccaccatacccatggcttctctgagccaagctgaccctgtgaccctcccactgggcagcccactactgaatggagtcgacaaggacggctgggtccaggacaactaacttatggggagttcagcggcctcagctgaaagctctggtgctgactgggagatgtgcagagagagttgttgggagcagaggaaccaagaaggcaaaaggcagatgccacggggcagcggaagccctgaggagggtgtggtctaatggctggaagaggcagcagccacagagcaatgatggagagttgccaaatcagccaggcactatggctcttgcctgtaatcccagctttttgggagactgaagctggaggatcacctgggcccaggagttcgaggctgcagtgagcgctgtgttcgtgccactgcgctccagcccggatgacagggcgagacccccgtctcaaaaaaaaaaaaaaaaattgaaaagagggagtttccaagccagtgaaatgatggccaagtggcagatgctgcctgtgcttggtgtctggctgggcggtgcctgtttccctcgggcctcctgaacccttacaccaacctcactggcagcaggcaccaagctcgggcctgatggaggccaaacccagcaggtgctggcgcctgggtgtggagagaagacccctcagagctgccgtgtcctcatttcctggcttctgggatgttttcagtcctgtggctgctggcactgggtggctggcactgttgcccaatggctcctcctcacggacctgcagctgcctgcagagcttctcctgtactctctcatctggaccactgcctcatccccaagtgcctggagtttggggagacggacaactcgaaatagggattctgtagctgctcaagcagcctcaagggatggctggggacttggaggaaccagagtcgtcatgcagactttataattagacggaatctaagagatctttgggttcaccgcctttccattctacaggagagggagatgaggcccccattgggcaggccttgccaagggtgaccccgacagctggcagctcacagctcttcctggagaaccccaggatacctgggaaggtgggctggccgccccacagcctgccgctaggggctctgtgttcatagggcctggggcagcctttgagctcagcattggtgttattgatccaggccctcaaaaccagtccttgttctgtctggtcccttgtgagcctcatttatagtggaaactggacagaaactagcaagaaaaagcagaaagcctctggaaagcagtgggtggaggcctgtgcgcattcacacacagagctctctgacgtgtggctcacctccctgcacctgtgacattgtgttttgactgggccccaaggtcaagccaagggaggggaccctgatggggtaattccaggcattcacatgaggagatggtagggtgccactcctggccccctgaaatcacagcttctgggcagggaccatctctgcctttggaaaataccagcctggctgccagacgttacaaaccctcagcagggaaatggtgtgagctttcttcccagcctctgacctgcttctcctctccctgggtctgttgtaaccccttagtccatctgaggggcagcatcttgggctgcctccctgccatcctccctccccaaaatcagccagctcagggtggacacggcctctctttaatggaaggcatgaggtgctttgacacaaggaaccagcttagtcaaggaggtacagcctcagcagcaggtcaggatgtcgtcctcctcctctgccttggccccgggggaggacaggcgtgctggccagagggctcagaagatgtcggggacgatataatcagtgtaggcaccatcgatgagt

SEQ ID NO: 29761 - DNA, 2300 bp, Homo sapien
tgtgagctgccagctgtcggggtcacccttggcaaggcctgcccaatgggggcctcatctccctctcctgtagaatggaaaggcggtgaacccaaagatctcttagattccgtctaattataaagtctgcatgacgactctggttcctccaagtccccagccatcccttgaggctgcttgagcagctacagaatccctatttcgagttgtccgtctccccaaactccaggcacttggggatgaggcagtggtccagatgagagagtacaggagaagctctgcaggcagctgcaggtccgtgaggaggagccattgggcaacagtgccagccacccagtgccagcagccacaggactgaaaacatcccagaagccaggaaatgaggacacggcagctctgaggggtcttctctccacacccaggcgccagcacctgctgggtttggcctccatcaggcccgagcttggtgcctgctgccagtgaggttggtgtaagggttcaggaggcccgagggaaacaggcaccgcccagccagacaccaagcacaggcagcatctgccacttggccatcatttcactggcttggaaactccctcttttcaatttttttttttttttttgagacgggggtctcgccctgtcatccgggctggagcgcagtggcacgaacacagcgctcactgcagcctcgaactcctgggcccaggtgatcctccagcttcagtctcccaaaaagctgggattacaggcaagagccatagtgcctggctgatttggcaactctccatcattgctctgtggctgctgcctcttccagccattagaccacaccctcctcagggcttccgctgccccgtggcatctgccttttgccttcttggttcctctgctcccaacaactctctctgcacatctcccagtcagcaccagagctttcagctgaggccgctgaactccccataagttagttgtcctggacccagccgtccttgtcgactccattcagtagtgggctgcccagtgggagggtcacagggtcagcttggctcagagaagccatgggtatggtgggtgtgcaacagctgccctgatggggctaggctggcagggtcctgaggtggctcaggaggtcccagcccccactgagaccaggtcctgcctctaaagctcctgttgtcctggaagctggagcccagcctcactacgacttttagggcaatgactccccaaaaggctgagggcagccaagtccctggctgggccctggaagcacagagggaaacatgacatggtccagcccccaggagctctgggtgcagagggggcaggcagacctgagcacatccacctcaacataaggtcatgacaaagcaggccctcagggggcttggggcttggagcagggatgtcccatagtcctctaggggatggccagggaagggtcctggaggggaggcactgggactggcagagagatgaaagatgtgacatgtgcagaaggggagggtgtgctggtgcaagagagtgagctcagaaaaacaagctggggtcagatcacagagacagctgggcttccgggatcgttgtgtgtcctttccctggggctttgggggccatagaagggtagtgagcgaggggctctgctgtggaggtcccagcctgaaggtgacagtctagtttcacgccctggctgcctcaagaagggaggggctgcaatccaggaggccagagagaggctgtcccagtggtagggataagaggcaacaatgctgagatgccctttgccctaaatgcaactccacaccccatctccatcatccacgccagggagtcccagggtccatttgttggcccacagcttctgctttcctgcgggcctcttccgagtcccccggtctctcaggaatgaagccccaacgctgttggcaagacccaccaggccttcttcagacagacacatcgagggacccgtcattccacccatgcccagcttcccggaggcccttcctgcctccactcctcccacccccgctgcaggtcactgaccctgcttggaaaacaccaggcttgctcatataaggagcgtgggccaggcctgagtattcagcgatggcatttgcatggtggccctgtctcatcttggctctgctctccagcttggcagcctctggcttcccgagaagcccctttcggctgcttggggtgagtctgccccctctttgccatctgggtcttggtgtggaatgggcagaaggcatcatgctgggcaaggcctctgagtggagtgaagaggaggcaga

SEQ ID NO: 29762 - DNA, 2300 bp, Homo sapien
gatctggagacagaggagggagggaatggggtggtcgccctgcagaggtggagatgccattacctgcctagagaaggaacaaaattgctagattcagcaaatgcaaagacaggacgtgcagctacattgaaggtcaaataaacaatgaataattttttagtgtaggtatgtctgttatgggttgaatagcgtactcctaaagttcaaccttatttggtgatagggtctacaaaataaggtcatgagtatgggccctaatccaatatgattgatgtccttattaaaaggggagttggacacagacatccagagggaagacatgtgcagacacagggagaagacagccattgataagccatggagaaaaggaaagaggcctagaaagatctgccctcatagccctcagaaggaaccaacccaccgccacatggatctgggatgtccgggctctggaactgggagacaatacgtttctctcattgaagccacttggtactttggtatggcagccgccatacactaatacaatgtcctgtgcaatatttggggcatacttacactacaaaaattcattatttatcagaaattcatattgaaccagatgtcctgtgtttgctctgataatcctgttgaagaaacgggcctgttgtgtagcccaaggacaaaatcagaatctttactgatgggtaagagatagtcagaggtggattttgacccaagacgaagctcttcctaataactagaactgtcaccttatggagcagctgtctgaggaagtagtgagctccttatgcccggaagtgtgcaagacaaggcatacctgcaactgcaaatcggcatcagagtcctcataaatgcgccgggcaaacccatggttctccagggccatgttctccaggaagttataattcagattgttgccaaagcccaggttatacaaggggaacttgcccccgatggcattccgcacattctcttggattttttcgggtctgctctcacctgttggagaagggggtgttcacagtccagccccagccctggggatggtctagaccagctctgtctggggagaccggactcctgcacatgcagagttgctggagtcacgaccatgagcccttgtggggcaggtggtggagagccctggcagagggaggcaggaccctgcccttgaggggctcccagaccacagggaacccagggaagagctgccccaggttttccaatgagccagctacagagccaggagcagcagccaagcactccagccctagctcaaaaccatgcccgtgctcctcaccaacattggcatccccatcagtcagcatgatgacaatggaggtgctcctctctgggattctgtgctcctctcgggccttgttcagcatactgatgcccctcagcagcccgtcattgatgttggtcactgggacacagacagacagcaccgtgggagggtgtcctcagggtgccagtgtgcagacaggctggagcggaggaggccgggacagccggccccactcatgtgcccaaggaccctatctgccagcccatggtggtactcagcaaacaatgaatgaaccaccacatgaacaaacaaacaaacaacttccactttcaaatggggatgaaaggcacatggtgaagacgaaaagcacatggtgattgtgaaagccctttggcagagttggatggactcccagtacctcttgctgggaggagaggggagcagtgtagacatcgtgccattttccatatgaaacagggccaagaagaagggttctctgtggccttatcttgctgggacttgtgagataccaggatcatggattagaaacagaaagaatgggtttccctggaccacggagaagacagccgatattctgtcttcaagcctgaggaccatccactcccacctctaccccagctcagatctgaagagggcctgagaccagcagagtccctaagaggggggttgcaggctgctcagggacagagggaggcaccgctaggaggtgtgtgggctccagctccgctcttacttcctttatcctccatgctcttcacaaacgtcctggcctcctggaggttctcgggcgtggcctggactaagtgctctttccatgtggacacatctccactgaacaggatgaaattcagatagtcttcctcttgcatatcttccaggattctgagaagggcctcctttgtctggaggagagacaaagagctgggagaagccgcagcagagagtgaggtcccttctcagctcagcaggcggtgcagcccacgccatc

SEQ ID NO: 29763 - DNA, 2300 bp, Homo sapien
aaggagatggagaaggccctgcaggagcgggactacatcttcgggaattacattgagcggctctgggcctacctcaccattgagcagctgctggagaagcggtgagcagagtcccagcccccacctgtgcctacccctggctgggctccaatgcaagggcacccccatacgcagtcccagcggtcctgccctcttcttgggccagcccaggaagtgtctgtagagcagtctgtaaggaaccccaggccgccactccccatcctgtcagccccaaggctcaagctggcaagtcccctggccagcagcctgggagtgccccggggtaggggggacttcagcaccctgctgcccacactgggcatggcccaggggtggtgaggctgagtggaactgaaggccgggatcccagccctcagtgcccagagggcagagctgagcccactgagagggtcagtgttggtgtgggtgggattagactgtgaagccgttagtacacaatctagcacatgctgagtgctctgcacatggacaccattgcgagtggctgttgtagccccttattttatttatttatttatttatttatttatttatttatttattttattttattattattatttttttttttgagacggagtctcgctctgtcgcccaggctggagtgcagtggcgggatctcggctcactgcaagctccgcctcccgggttcacgccattctcctgcctcagcctcccaagtagctggaattacaggcatgcaccaccatgcctggctaatttttgtatttttagtagagatggggtttcaccatgttggccaggctgatctcgaactcctgacctcaggtgattcacccgccttggcctcccaaagtgctgggattacaggcgtgagccaccatgcccggccggtccttacgttttataggtggggaaaccaaggtccagcaaggaaacagggcttgttcacatgccccagggagttgtgagccagtcttctctgagcccaactgggctgtaccctgggggaccccacaatggggaaggtggagtggggatccccagctgtgtccactgctccagtgcaggggaagtgggcagggtgctgctctccaggctgtcctcctgactggcccctcctcacagcaagaacgcccatggcgaggagaaggagaacctcacggcccgggccctggacctgtccctcaagtatcactttgtgactccactgacctcaatggtggtgaccaagcctgaggacaacgaggatgagagggccattgccgacaagcctggggaaggtggggatagggatggaggccggaacccggaggcctcctgtgctgggcaccctacctgggtgtccagtggaggagtgggccaggctggggagacccagacctgctgaagtagggcatctgaaggaaaactggccacgggatggggaaagtggggtggagcgtgaagcagtcagcatggacagtggggtgtggggtgaataggagcctctgcacctctaaagggaagtgagtaaagggggcacactgcccatggggcatttcaaggaaaaggactgaggctgcagcatggaagggcttagttagacaagaagaagcacttccaacatgaaaggcctggagcaggctatcaggcacctggagattgttaggggaagagtccctgagagctggaggctgggaccccctcaaccagaccccagattgccctactcaacagggggtcccaaatgcccactgcaactaggtacagggtctgtgtgtggtggtggaggattggcattgggagacatgggaggcaaagagctgggcctggccaggccaggcctctggcttccaagaactcctagttccaggggacacccagtgggggaagagctggctgctgggaggcccacagcctagggctggtcggccaagcagccagctctggtccctgctcacaagtgccctatggcttctaatgcatttctcttcttcctcccttgctgcacctgcagatgcagaaggtaagcctttagccagccaccgggttgggcattatggaagggagacaagagagaactgaggaggcctttccaagcaagataggacccccagccatgggggcacacttgggacacctgggctcaggcccagccctattgccaaatcatgaacgtgcccctctctgagcctgaggatccctgtgagttaattgggggtggcttcccttgcccagggagacacaatcagtatgacagtatctatgacctgcaaaaatgagcaatttagcatgtc

SEQ ID NO: 29764 - DNA, 2300 bp, Homo sapien
gctgaggcaggcagattgcttcagctcaggagtttgagaccagcctgggcaacatggtgaaaccctgtctctcttaaaaataaaattagctggacatggtggcatgtacctgcagtaccagctacttgggaggtagaggtgggagaatcacttgagccgaggaggcacaggttgcaacgagctgagatcacaccactgcactgcagcctgggggacagagtgagaccctgtccctgccccaccaaaaaagagaaagaaaaaaaagtgatggggaaactagacatcattaagttaactttggtcctattttaccaatgaggaaactgaaatcagaagatttaagggccttcccacccaaggccactccgtgacttcctggacaagaggggaagcccagcccactccccaccctgactactgaggttctgtgcacacgtctctaccttcctgctcaagacactgggtctttccacagcctgaagatgaccatggacaagacgggtctcctgctgctcagtgacccagacaaagtgaccatcggcctgttgttctgggatggccgtggggaggggctccggctccttctgcgtgacactgaccgcttctccagccacgttggagggacccttggtactgagcccattaccggggcccaggccttcctcagaaaccagctgtgcttgggaacaggcagcgcccctcccctgcgtgtgtctcccaggcttcctctgtctctgacccttactgatccaccctttgtatctcaggccagttttaccaggaggtgctctggggatctccagcagcatcagatgacggcagacgcacgctgagggttcagggcaatgaccactctgccaccaggtgacttggcacaagcagaccgctgagcccagctggggtggggtggggactggcaggccaggagccaggctctccagggccccactcctgtccttgcccaggaactagacacagtccggtggaaggttgatgctgtagaagtgtctaagccagctttcagtgaccccacaaaagatggatggccatctcagacccacagaaaacacatgggccctgagatccctggggttggttggggacagtcggaacctctccctgtccacaccctgaactcccagagcctaaaccctggagacctcacgtactggcttctctagggtaatgctctgggtgactgggccttgttggcctatgctggagggaattctaaagggacgccaggactccctgccctccatgttcctgtccccagctgtctccctcttttcgcaccacacctgagatttgctgaccacctgcctatctgtctgtctttccatttcagagagcgcaggctggattaccaggaggggcccccgggagtggagatttcctgctggtctgtggagctgtagttctgatggaaggagctgtgcccaccctgtacacttggcttccccctgcaactgcagggccgcttctggggcctggaccaccatggggaggaagagtcccactcattacaaataaagaaaggtggtgtgagcctgggaagtgggtgtctccagttccatgtggccaaatcctagggcctcaacctcgcatcctgaaccttagcatcgtggaacacagaagcttccactgtcagctctcaagagcccatggccaggaaggcccatgctgagctttcagtccagccccttcattttacaaacaaggaaactgagctcgaaccacccatttgagatgtcactgtggcccccagctagaggcccagggctgggagcattctccaggagcagaggttcagtctgcttcatggtctcttggaccagttttgactacaaaaaaaaaaaaaaaaaaaatagagtgaactgggttggaattctttctagtccaactcctaaactttctcagtgagcttttggacttctctgcaatgggatttgctttacacaatttgattttcacacctgtgctgaggagcaggcctgtctgctcattggcttgtaaggaagcactggatctttgaaggagacacagaggcgaggccccaggtgcagcagggaaatagggcctgtttccaggaacctctagtctaatggggctgatctgggtcccaactctgaatcctgtgcttgagggtctcctttcctgttcttgccccagggttaggcaccccaaagattccaccaattcctgtacgggcaacatatactttaaaaaatttacggctgggtgcagtggctcacacctgtaatcccagcactttgagaggccaaggccggaggattgat

SEQ ID NO: 29765 - DNA, 2300 bp, Homo sapien
gctctgcagcacctagggacctcaaaaacccctctccctgcactgcactagggacctcaaaacccctctccctgcactgcactagggacctcaaaacccctctccctgcactgcactagggacctcaaaacccctctccctccctacacttttgttcacactgcctcctcccggcttttgtcccctccaagtcagagccagattgagattcctctctggcagtcagtttcctgagctaccgtctcttccaaacagcaggggtaagactcccacattctgctccaaccatgctgtctggggcatggaacaccagattctcagcctgcatgacccttctctctccagtcctctgtcccctgtgtgcctggaagtgccaggttcaaaagacccatagaggcctgtcccgttgtgatggcaagaccatgaccatggacaggctgacagtggctcttttcggagctggactggcagagcctgggcttgtggtgcctggctcggggctgatgcctgctggggatgccttcctgtcccaggaggttctggctgcccagaacgtttcccacagtcccggccagcctggccaccttatatagccctgagtccgggctgggcctgtgctctctgccccaagggagcagccctgctgtgaggaagggcccagtcctacttgctggactccatggggagactcttcccccagacactgaaaggagcgtgttcccctgtgtaatcccaatcgtatccagagccaaaagggtgagcagtggagacgtgcgcagagatgaggcttctggccagtcatgctaaggaaggggaacgtcttccttgcagctgtagaaatagctccagtctatggcacctttgccccaggcctgccgccacctctaatggagacaggactggtggagaaaccctccccagcctctggaagccactggctgccccaaggcccccgataggttcccaaggcagctggccccctcagggctggtgtcacggagccgccgtccttccctgatccaggacttggcatctggccacacttttatgactcatctttacccatctgtggccacagactcaggagctggcttccccagagccaccagggaacacgagccccagcggtgcccagagcgcataatatgtactcactcgatcccactttacaaggagcagagcgcttcaactttagcaaggccgggacccaccccaggcctttgggcagcgctcccctgggtctgggctgtggcagcatcacactgctcatgacaacagcattctgccctctctcaaccagcgattcctgggctccctctgctccaccaaatgactccccagtcacccctcaggagctgctggcactgtcaggtctgtcttctgttccatgctcttctgtcaataaactccccgcatggagacctctgtgccacaggatgtggcaggtttatgactcagttgtattgccattcttgttttgggggccttgctggggttgaacctaaagccctggctagattaatggcacccaaacagcaacctgggaccccaggagagagaaggaggcgccccgtgcccagcacctctcacttcagaaatacggcgtatctatcctgactctagatctgccccacacagacacctcccagagtcactccatgcctttgggccctcccatcagccagacacacttacctggtggccaagcccccttcttccgggaagccgctagggtagccctgtagccctagtcttccccaccatcccccgctgtttctccccgggctggacttagggagagcagactgacatcttcactgtcaattccctcccagccctgtggagcttggtggaatgcctggtgtgaagggtcctggtgaaggtttcgcacttttcagaaggggcatgtacccccactccaaactgagcctacctttctttggtatacattcctgcccccagccaaggtccatgggacgttcgtcatttgcttatctgaggtcactgtggtttttggcttgtagatcccaatttcccagaacctgcccccatgtgggtggggcagcaaacaagttactaatccattccccacttgctgtcgagttcagaagcctcctggcagacactggagccacgatgaagcccccaaggcctgtccgtacctgcagcaaagttctcgtcctgctttcactgctggccatccaccagactactactgccgaaaaggtagccagtgtccatgggtgtggcgtgagctgggggatgagagaacgcctgggaagtggggaagagcctccgca

SEQ ID NO: 29766 - DNA, 2300 bp, Homo sapien
ttcccactggccagagcagctgccttgtagaatgtggggctggcttttagaagtttcacacgcttgcagctaagagtgcagagctctctgttttacttcgtgaaacattagcagctctgaggggcttggcttttggtaagggacttatggtctgacttgccacaagcaccttgagctcctgggttggttggtggttggttggttgggttgttttaaatttgatttttcttttcctgaagtttgttagaagtcagacctatgcaaggaaaaccatggcccacttcagcagccatccagtgggggtgcttaatcggtggtggtaggattcatggaaacgtttttttgaaatgaaagagaagatgatgtacttacattgtaaaatggtttacaataaagtttggcatcttattacagttttttttaaaaagaaaccatcacatttgtggttgtggttgtgggttctctggagttgaaacagcttggcagggtcaaaaaagattcccctgtgaattagaaggttctccccagggaccagagtgagaaggaaccttacgaagcctcatggcaggagtgggagccagcaactgcccagtgaaaagccaaacatgctcttgccatgtccatctccacttcttcgctagtgagaattaaagcaagtccgtctctgaggaggacatcgtgttggggaggtagagtataagcagtgagtagcccacatccttgtccctgaggctgcggggctggaaggaggtccctgggcagagccgcagcatcaggtgccatctgcaggggcacccctggaactagtggaaggcccccacaaggcctggcctgccctcagctgcctcttggcccatgtgccacatcctgggcattcctcatgtcagcacttgtctcagatcaagcctggcagtcctctcattggcctcctggagccagggtgtcaggagggggattggggtggggttcaaagtatgacagcaatggagtggcatttgggataaccaaatgtcagtgcctggttgagttccatctgcctggagccttcgaggataaaaataatctccatcataaactgaaaaggacttagatatgtgtgttactgggagggctgcgacctatgcacacctattccccatacccaccccaggcgtaggctcctggcctgtgccctgggggatcttccccttgcaaggaggggtgtgttaggagcttctagcaaaggagagctaagtgaccttccggggagcccttgggcctgttcttgtctctgcagctcagtatctggagtgggcttcactctcccccaccctctttgagcaactgaaactgtcctgcaggccagcccccctgcggtggcctcacctactcggaggtgagtaggctcaggcctgagcctgagcctgtttcacacctctgtctcatcagtgctgtcaccatcgagcatggtttcctccctggtcctttccagaccccttactcccccctctctgaacttgcagttggaataggatagaggacaaggacatcagcaaaaacatgagcaactccccaggctccctttacctcactttctccacctgtgaacctgtggtagcccctctctgagtttgctgcaagggcccagtgagcttgccataatcagacgcagcagacacgggaagctcctgctctgccaccatgcagggatggaaaatctgtccactggaatccaggggaagggatggaagaggaagaaaaacaagcttggagcagtccaacccagctagggccctccattccctcagggacaccccacacccaccccacacactgggatgaacccttgcagaggaacaattcagatggtcacacattccaggacccaaatccgtaaacacaaagcatgtccgtcagtgccagcacctccccccggcgaatcaagcagctgtcccagagggcaaagggtctctgcagccatctgctttcatcagggctgcagcccccaggcagcagtactgggagcccctctcatctccgagaataaactctgaagccagcgaccctgcggacctgaatcatcagggagcctgtcagaggaggggcagtgactctgcgggacaagcaagcaggctatataagtttcagaaggctgggctccactcagatcttttccagcagctgctgcctgccagagaggcgccttcagagacccagcgcttacacaatacccaccatgtcccaggtaggaggacccagcaagggctgtgttgatgccagagggagtggaggtggagtcctggacactttcggctctggca

SEQ ID NO: 29767 - DNA, 2300 bp, Homo sapien
ctaaggctccctcagggcctatgggtaccacccacccaccccaggcacactctcggtggcctctccctacctcactgagtctgcttctctttacaggtggccctgttgaatcccattgaaaacccagacttgaagctggccatcgtcatgctgatcgtccccttctttgtcaacgtcagtgccatgttgcatttttatcccgatttgctccctgtctggcagggttcctgtccaaagttctgagtctgacagaaagctcacctgtagccctcaggtctttttgcgtgaccatttgccacctctcccacccccagacctggaaatggcaggattaccccctcaaaaggcagggccccataccagggctcccgtccaggatggaggggcctgggagctttgtcttgtcctccctgccgaggggcctcccaccaagaagccccacccatgtgtagcgccagcctctagttcaggattgttccaaacgtacccatcgttcattcctgaccacggatcttgagaaactcccgagcacaatggctcgaagttaagaaacagaagtggtgagggaagctgggacaaacagatgacagcagggtgtgccggccacccacatggagtctgtggggaggggcctggaacgcgtgtccagagaccttgcttccaggccccaaacaggctgttccccctagttaccacaacaaaaacccgtcagggcacgttccttgcacactctgatcagaaaactgaacccgaggatgtggagactgggaatctctttctaagctttgggagagagcagggtgattggattgggtttttctttccatagctctggatcttataacctggaatgggagtgggcggatgggggctgttcggctttgctttgaaaaatggtttatcccaaagtaacctgcacttttccttcccacaggctttgatgttttgggtagtggacaatttcctcatgagaaaggggaagacgaaagctaagctagaagaaaggggagccaaccaggactcgaggaatgggagcaaggtccgctaccggagggccgcatcccacgaggagtctgagtctgaggtagggcctccctgactctccaagggcccaagccgtcgtatcgctggcccaagggggtctctggtctcatgtctgtgtatgttcttcccttgagtgcagagtcacagtgcgagccagagggcaggagaagaggctgagccagagatgagcgaggggcagacagctctgtccagccaggacccattcccactgtcccttgggcctgcctagggcaggagggcagagcagatgggagtggcttgcctgcgacagttcctctgtcagtggagatgacagacaggagagggaagttctgccttgtttggtgagctggcaaggaccgtcatgggcctaatggttgatcttcaagcattaggatatttgaatctctgcccaacactaaagagcaagggaagtgttggctcagacagctggaaacttctaaaatataggggtagccagaccttgcaggaggaaactcatcccccccttattttctggtcttctgagttcaagggtttggacctcagggaagaacggtggccatgaatagcagccctgaggccaggatatgtgttctggcggccccgcagcactcaccccacatctgcgtgcagggccagctcgtgggaggcatgggaggcctaggaagtgtgcaggtgggagctgcagaaaagctgagacaaacgtcttccccggagaggctgtcagacacgtgggtgaggtgcaggtggacacataagtatttcgtcatgacaccgtaatatgttctaagattgaggcataggcagaacccaacgagggccctgggacagcctggagggagtttcagaagacgaatagatagtaggacagaggggaagccgtgtcttctctaggtgcttgtctctagaatctggccagcacctgtcatatgagagcttggtgaacattaggtgagtggcaaacagtgttatgggcagaagcagcagctcatgagcattcacagtcacatggtttggtgtctgggccatagtgtgaaatgcactgtggcttgtattctggagcataggacagaaggacaagaagtgaggcacaggctgagctagatcggcaatgccctgtgatccaggctgaggcattgggatgtgctcgtacaggcggtgaggagcagtgggagtgtggtggtcgggaccgagactagaggcaggaagccccgcaagggaacagtgcagggaagaggaggtgagactgcctg

SEQ ID NO: 29768 - DNA, 2300 bp, Homo sapien
ccccttcttcatgccagttgcaagtagtggggtcctcagggtatccacatttctgtccaactttgctataaagtcaggggttcccacaacccccacttccccgctaaggttcagtaatttgctagaacggctcataaaactcagggaaacatttacttacatttactgatttattataaaggacacagatgaacgctagatgaagaggtgcatagggcgaggtccagaagtgtcctgagcacaggagttggggtgtgcccccttcccagcacatggatgtgttcaccagcccggaagcgctccaaatcccattgtttagggatttttatggagggttcatcatgtaggcatgattgattgttaactcagtctccagcccctcccttctccctggagggtgggggattagggctgaaagttctaagtttctgatcatgacttggtccttttggtgactagccccatcctgaagctatctaggagcccactaagacttccttcattagagcaaaaggctcctgtcttccgggaaattccatgaggtttaggtgctcgtatcaggaccaaggccagagaccaaatactagaacaaaaactcctcttagcacctgtgttactcaggagattacaagtgttttaggagctctgtgtcagaaaccaggacagagaccaaatacatatatttcttaaatagactttgatatatacatcaagcatatatttatttcacagattatgatcctgcagtcacaatttttccttcgtgaaatggtggtaaagcttcagaagtaggttctaaagacaaaactccaaaataatacatcacttggaaggatacagtcagctcttcaagacagcactgtgtccacaagaagctgcctgttttaggctgccttgggcttctacatttcctaacaaaatagccattttatccttcagaggaaacgtcagtaatcactgtgataaaattattaagcgtgtacttgttcttaaacgtgttgctggcgaatttgataattctttttattttccccccgttgatttttctcaaaccctgttaactttagaatgtgtgactcccacctcagggctggggcaggacctggtgggagacctagctttggggctctcttgagtcttacatacgttgtcctttggtaactcctcctttgcagtgagtctagggaatgattttccagccaccgtcgctgggttggtctggataatctctgcagtcctgagaccctgcccagctgggcggctgtgagagacagccatgaccaagaggtgcctcgaccacagaggagaatggctacctggtgctggtggtggaggacatactgaaggcacacgctgtctccaccatgctcctgtcacatgggtcggggttagctcctctcagagattaacacccttgttttttcttttttgaaatgcttaccatctagtccaggggctggcacactacagccctcaggcccggtgtgtatgattggaatagctgtgtctatgactgcatcattctctagcggcagggctgaggaattgagacagagatcatatggcgcacaaaacctcaaatatttattctttggtcctttacagaaaaaatttgcctaccctgatctagcccattgtttaaatggcagcagctgaaatttctttagggatccagctgcagtactggatttgtgcacgtcttgttaatttcacacataatttagctcattgtgagtgaagttgaatgggagctctttaaaatagaggcaccttgggcttcatcacaaagcagcgattgagcattttattttgaagtaagaaaaaaatttaaaacgtattttaaatatcaatccttgaccttttagggttttcaaaggcagtgttattgaaggctttgaaaggtggctgagatgccaagcctgagttagtgctcaaggccccaggaagagataaccagtgattggaaggttggggtggctttcttcctgtttcagtcttctcgttttcctcaaattggatattgcgctcctgtcaggctaataaccagtgctggtttattttgtacaggtttttagacacttccaaacaagccataggaatgctgttcatccactttgcaaatgtatacctagcagatctcactgaagaggacccttgttcactgtaagtgttccctatttgagtgcaaacatcagctgcccctccattgaaaatataggctggccttgctttctgctgctggtcctgctccctctggcttggggagagggtgctccccttttcctctgtgctcctctgag

SEQ ID NO: 29769 - DNA, 2300 bp, Homo sapien
catgccctggtctagaagtctgatggtcctggctgtaccacctctgctcccgggcctaggaaccctatggtccaggctgtatcacctctttgcctggtttaggaatcctatggtcctggctgtatcacctcattccctggtctaggaaccctgtggtcccggctgtaccacctctgctccctggtctaggaaccctatggtcctggatgtattagttttgtttccttgtgtagaaaccctacattcctggctacactatctctgttccctggtccctttggatgacaaagacttttctccctgattgtctcgtgagcctacctaaatgcatttttattctgatagcatcgaacagaaacatctccactggttttccaagggcacacacctacaaccaagagaagctggctggttatgaagctacataaagaagtcaaggacaagtccaagttcagaggaccagctccccagggttccagaaggccatatctaaccttctcaacagataagagccgataggacactgccttcaggagtgggtgggactgccaatagcatggcagatgagcagtctactgagaggctccaacggcagtgcaagtgcacggatgttgcgatagcatccactgactttgtgagggtgttacacctttactcaagcaaaaaaactcttcttctgggaacactgggctttaccttagaattttattgatggaagagaattaataagcatgctaggcagaacaattaaaggaagaccagttcttctcatgatactagaattattaaattacacataagacctttgccctagctcctcagcccaatgaagttggcacccagagtcttctcctttcaaaccatacaagttgtgtaactaggcagatctgagaagagaaacaacagagctcatgtcctcagtccccaggcctacgagtcaggtggccagagacagggcagcagacagcagccaaggcagcctttgaccaccaggaggcttgggaccttaacaaatcatcacccgctatgagctaaaatacctgtagccctacttggccggcagtgggaatcccttccagagtagtctgatggatacttcaggagccttgaggttcttctcacagctactgacgcctctcctccacttaggaagaacaggaggaccaggagggaagaacaagtgatacacgagaagcatgtacaccagtacagggggatatacaatgtaaataaaccaagactctgagaactgggaacaccggctgcgtgaggaaagggagagtctcagtcagaataggattcctcaactcccaatgctcactttgttcatctctctacttagatctctcaaattttccttccacaaaggagctggaaaaaccaccatcacatggcatggaagtcataaaaggcaccatgaaattaagtttttctgcccctcttgtcctatcatgcagagtgcatggtaagcaccccaaggcatgaggctggcagagagcttgcttaaagaacacgtggaaaaggagctctgcctcctagccagcctccttccctgagggctctgaaccctagctacatgaagtgaggggaagccaccagagcctctggaattctggagacgggcttgctgggtgatgtttctggggttgtatcacaatgatgtcttctttgattcctgccttcctaaaattctagaaagaacataaatcaaccccagagaatcagcatgctctggccctgctatttctcatttgaaacaggtttgctatgccagctcccactcagaaaggccaagcatagttcatgagatcctagataaaaggaggcttagggcccgggtggggccctccaacctgtcctcagactctccaaccaggcaacggtgtgcatcaagagagtcccaatcagcacgcatccttctgacgtgctcttcaccaagccacctgcaggagacttagcttcgcacacctgatgctatacaagagggaccagatgtgggtggggcaagcacagaaccagagaaagcagagttaaaacactgtcaagagtggaccaaacaacaaatatgtacaattattacatattcattataagtaaaaagaaaaaaagaccaaatcatctgctataagaaccaggagagtggtgactgagtctcagcacattctagggacaggagaaaagcaggtggctggggaaaaacccagtgggagtgctcacagcagagaacgaagactcagccaagctccattcgcacttcctttcccgtagcattggagacagagctcctggggctgctggta

SEQ ID NO: 29770 - DNA, 2300 bp, Homo sapien
tctggatttaggtgctttttaattccagttcaggaaagataggaagagtagaatttccccacagcaaccttgctcctgacattggggattccgcccctgatctctgaagactgcttcttgtttgttcctctgtgagccttaaggattcctccacagctggatgtgcagaacaattctttgtcaaaaacatcacttttcagctctatgtccaattttccttgagctgtctgtgtcttcaagcaatcaatagtctccttatgcccaaccacaatctattctgctttaagacgtagcctcttgtttggttctctctaaacatgtactgttaactgttgagcatcctcataagatccctcttagactaaaagacagtcatgcaattttaattttcccttatccatttatttttttaatctgattttctgtatttgcccacggccagtacttgtggagagtttaaaattttataaattaaaattccatttaaattaagcattttgtcgcatgttctctgtaccaggcaccatactgaatttgaattgaagggtaaataaaaataattcctgccctcaggaggctcacacttagctgtgggagagagacatgtgtacagctgtcaaatttagcagtctgaaaagttttggtggaacagtacacactaggtaatgtgggagcaagagggagagggaggtcagaaaggctttgacacatgaggagcagttcatggagcagggaaaagggaatggcatccatgcagctagaatgctacataaaggcacagaggtgtgaaaatgtaagagaaggctggagaattgcatttttattctctaatcaggttaatattcctgttcaccaagaaagcttttagctagcatataaccctcttaggtaattggaatttggggggctatttaataggaaactttttcctagagatgatatttaccgttgaaaacacgtagctcagtatcaactggacttacaccatatgttcactgacattctgcagcaggaaggtcagcggctctagagcaccaacaagaaggtatccagagagagcccagattgggctgggagaatgggtgagtgtcaactggacttacaccatgtgttcactgacattctgcagcaggaaggtcagcggctctagagcaccaacaagaaggtatccagagagagcccagattgggctgggagaatgggtgagtgtcaactggacttacaccatgtgttcactgacattctgcagcaggaaggtcagcggctctagagcaccaacaagaaggtatccagagagagcccagattgggctgggagaatgggtgagagaatggggactcagggtcttgttaaaggcagagcacaggttctgagaagttggaaagggttagatgggagtgtgtgtgtgcagggggatgttggagcctggaaaataccaaccatttgtcttttacactctaaaggtagttgtgctccccaagtgaataaggtgggacatgtgcacgtcaggttttcagtgtgaaacctggtatatttccaaatgaaagtgattggattcaggtgaccatttaaattatgtctatgaaaaaagaaaatagacttggggccttgataagcctttagctagggaagtaggaaaaagactcaaatgtctgggttggagggaagactcctgtactcagtctcagattgttttccttattcacttgcttcagaataatccaggctgcaaactattgggacccaccccagaactactgaatcacgatctctgagggtggaattcaggaatgatgataatttctccaggatatagggattttccttagagggaaaaataatttgaccacaggccgtcccagctcctacctccggacctggagctcgtgattcccaggctctcattccggtctgcggtggccggctcacctggcctgtctacctgcgggcgtggcggggttggagaggggagcgggacccgcgaccccgccccgtggcccggccggagccccgcccctcgggggcgggtggggagagctgccgcggccgaggcccgccccaaccttggctgcgccaatcaggcactgcgatctcagacgtcgggttacgcgcggcgcggagtcggcggccgggcggaggtaccggctcaggcttgggatcccggctgcgggtttggcggcgctgcgccggcaggcagcgaggccgggcgggccctgggccctcgcgcccctcccgcgaggcctgtcatgcagggccccgccgggaacgcgagccggggactgccaggcgggccgccctcc

SEQ ID NO: 29771 - DNA, 2300 bp, Homo sapien
gtggttgcaactatacacagtatatatatgtttcatgtcgtgaaaagttgcatttctttgtaacaatatggattactgtattctttttagatttttctttctccggttgtcatattgttttttcagtggtgctaaaaaaaatctggattcaaatccagccagcagcgtgactttgagcaagtttgtgaagtgggatatttctcagagcggttgagggaggtggcttgagctcgcacctggcacacggtgagaaccccagactttcttcttgctgtgggggcgcctctgggccctgtccgataacgcctttcacggcctgggagtctgatcgggagctcccgggtctcggtggcgcgggaactcccttctggagggaactttccggagcaggtgggcgggtgtatgtcccacgggcacctgcgctcaggaggagggggcgagctcgggcaacgtaaccgcccacggtcacctcgggctgcggggccgacttgaagccgccttcgaggttctgatccttcccggggctctgggctcgttcgtcccaattcgcagctgtcctgtgccccctcgctgcaggaagactcaagatttacagggcgcctcctgcggaagcctagagacatcgggggcgccgaagggcccgcgccggacttcgcagacagggggcacttgggtgccctttcaggtctcagagggagcgcccgatccccgacgaggggcaggcaaacgggcgcagtgcccgcggcggcggcacgcgcgcatctgggatccggccgcttctccgctcatgccatcttgtccgagccagtcacgtgcgggcgacagcggcgcgcttcgccgggccggtactccaggtccgacccgcgaacccctctgggatccccgccgctctgtctacaacccgaggtgaggcgcaggctggatcggggctgggccagggcgggcactgggttcccggggacgcgtctcctcttccgggccgttccgctcggggccacagcgccgtcgggggcccgaggcgccgccgcgtgtcctgcgccacggcctcggggccgtccgcgccgagttgctggctgggggcgtgggtggcccgcggcgccggacccccggcacaccagcccgcggagtccttgcctcccgcgcggccccagccaggagggatggcgctggggcgggagcggggcagccgggcccgggagctccacgggcgcggcgcgaggggcgcaggctgcctggaggaccgcggagctgggggtgggggggcgcgggcgcatgcgccctgcgtccgtgccatattggaatgagtcggagcgcggagcgccgccgccgcctccgccggagcgcgggtggaggggggcggggagagctgccggccgccccgctccgccgaacccagcaggaaggagggcgcgagcgggcgagcgcgggcagcacgggaggaaaaagcttccgcgcgggggagcgaaaagacggaaagaaagaaagaaaacgagcgcgagagggggaaaagcgagcgatcgagcgagcgcgcgcgcgaaaactccgggcaggtaaaaaagcggggccaccggctgggccttcccgcgcggcggcctggaggggcggcggcggcgccggggcgggggaccgtacggcgtccccttcgaagcggccgcgcaactttgccaacgggaaaccgccgggcgccggcgggcgcgcgggctgaggcgccaacgggcggcggcggcggcacgttgggggcgggggcggggcggggggagcgcggcgcccgcgcgcggccccgcggtcccgcgcgccggccggccggctgcaggggcgcgcctgggcgcctcgccgcggcggagagcggcggcggccgtcagcccctggcaggcagcgcggcgcgcgtcagcccgcgggaggcgtgaaaggaaagtggccgggcggcggcagtggcgggcgcccaagttccccggcgcgccgggcccgccgcgcgcccctccccgcgcgcgccccgcgctccgcccgccgagcccccgcggacccgccccccgggctcgctccgggcggggcgcgaacccgcagctggggccgggcgcgcggccggtcggaacttcggagggcccgggcggtcgctgcgcggtggcggagcgtctagtggccgccgcaaccggtggctccgggccgccgttgtgaagtgagcgggcctctcccgcgccgcggcccgccgggcaccgccgctggaccccgcgccgacccggcagcgccccgacctgccgctcgggaggtccgcgaccgtttcgatttctgttcctaaagtc

SEQ ID NO: 29772 - DNA, 2300 bp, Homo sapien
gcagaattaataacaaccgatgacagtggtagtgagttatgtccatattttactccaaataaataagccaaaataaaatcgggatagtcatcagagaatgaaatatgaaatgaaattgtacaaaactagcagaaaaaagactatcagatgggcagcagaaagctcactttgtcagcactgaagcaattaaaacattagaatgacacactgaacattagaataaaacaagaaagaacaacaggctagaaaatatttgcatcaatgacgacaaagaagtaatatctgtaacataaaaaaatgcttgttcaaagttagaagaggttcaagtccccagaagatggatatgaatagattattcacaggagagggaatgcatatagtaaatgcatggaaaaacattcatttttgaatgttgtgtcacctaagaaatgctaagtaaccttgaactagcaatagactattaaagtaggggggaaatggcactcaatgtttataagtgtgttaaactccttacacttgttccttggaggcggtagaataattggggcagctcttgggaaaaatatgacgctgtaagccaagaccacttggccattcatagccttctacctgggagcctttccactcccaggtatttgtcccaagtgcagaattcaaggatacgttagcaaacaaccgtaaagaaccaaaaacattagggggctgagtgaatagttaaggacacctgcacaccttaaaaatgaatcgtgaacaaataaaaatggtagtgaaagtagtaacaaaaaaagtgtggttgcaactatacacagtatatatatgtttcatgtcgtgaaaagttgcatttctttgtaacaatatggattactgtattctttttagatttttctttctccggttgtcatattgttttttcagtggtgctaaaaaaaatctggattcaaatccagccagcagcgtgactttgagcaagtttgtgaagtgggatatttctcagagcggttgagggaggtggcttgagctcgcacctggcacacggtgagaaccccagactttcttcttgctgtgggggcgcctctgggccctgtccgataacgcctttcacggcctgggagtctgatcgggagctcccgggtctcggtggcgcgggaactcccttctggagggaactttccggagcaggtgggcgggtgtatgtcccacgggcacctgcgctcaggaggagggggcgagctcgggcaacgtaaccgcccacggtcacctcgggctgcggggccgacttgaagccgccttcgaggttctgatccttcccggggctctgggctcgttcgtcccaattcgcagctgtcctgtgccccctcgctgcaggaagactcaagatttacagggcgcctcctgcggaagcctagagacatcgggggcgccgaagggcccgcgccggacttcgcagacagggggcacttgggtgccctttcaggtctcagagggagcgcccgatccccgacgaggggcaggcaaacgggcgcagtgcccgcggcggcggcacgcgcgcatctgggatccggccgcttctccgctcatgccatcttgtccgagccagtcacgtgcgggcgacagcggcgcgcttcgccgggccggtactccaggtccgacccgcgaacccctctgggatccccgccgctctgtctacaacccgaggtgaggcgcaggctggatcggggctgggccagggcgggcactgggttcccggggacgcgtctcctcttccgggccgttccgctcggggccacagcgccgtcgggggcccgaggcgccgccgcgtgtcctgcgccacggcctcggggccgtccgcgccgagttgctggctgggggcgtgggtggcccgcggcgccggacccccggcacaccagcccgcggagtccttgcctcccgcgcggccccagccaggagggatggcgctggggcgggagcggggcagccgggcccgggagctccacgggcgcggcgcgaggggcgcaggctgcctggaggaccgcggagctgggggtgggggggcgcgggcgcatgcgccctgcgtccgtgccatattggaatgagtcggagcgcggagcgccgccgccgcctccgccggagcgcgggtggaggggggcggggagagctgccggccgccccgctccgccgaacccagcaggaaggagggcgcgagcgggcgagcgcgggcagcacgggaggaaaaagcttccgcgcgggggagcgaaaagacggaaagaaagaaagaaaacgagcgcgagagggggaaaagc

SEQ ID NO: 29773 - DNA, 2300 bp, Homo sapien
gatcacaaagtatcgcttaactaactaattattgtcttcaaaaaacatacatctcctgagttgtttcttacctttctgctcagggtaaggggacagggacattcccatggtctccaggtagcattcgatgttatgaaaacctggattccaggagctcaggttctttctgtgagttgatgttcatggccgctgttttgggagcagccttgtccagggcaaggtcaccactgccctccttttcctgtctcctccccaggtacaattttgtgatgctggccctgtcctcctcattcctggtgttatcctatctcttgacccgttggtgtggcagcgtgggcttcatcttggccaactgctttaacatgggcattcggatcacgcagagcctttgcttcatccaccgctactaccgaaggagcccccacaggcccctggctggcctgcacctatcgccagtcctgctcgggacatttgccctcagtggtggggttactgctgtttcggaggtgagactccctgagccatcatgccacatgcttctgcagctgccccgctgtctctcccgctaggcctcctcttcccaggtttttgcctcctcctgtcccctccccaggcctctagggcagcatcttctgataatgtgacaagagaatgttgccaatggggaaacaatggacctgcagtatggctgttatgccttttatctgacttagaagctggaaccacagctgtcttccctggctggtcccagaggaaggaggtatagactgaggaacaggcactgacaatggtttctttccccaggtattcctctgctgtgagcagggctggccagccagactggcacacattgctgtgggggccttctgtctgggagcaactctcgggacagcattcctcacagagaccaagctgatccatttcctcaggactcagttaggtgtgcccagacgcactgacaaaatgacatgacttcagggaagcctggacacccgaggcacctggaccagctatgggtagttctgtgggtggaacacattctgtgtaagagccccactgagggctctgcagcggagtgacagcaaccccagagatgaggcaccagagagtgccactgcatgagacacctgtgaccattcgaagtctgaaatgcggggggggagtttcatttttaagtgaagaccaaaagccctttaaaaataatagttttttatcattttatagtaatcagcattttctcttttactaatatactcattccttttgcgtatgattggcctttggagctacatgctccaacaaactatatcttaattgttaactgttaataattatctggcccagaaaaagagatgcagtgattttacccttcacaggaatattgaacttcttctgtaaaagagagagagaaacctctctctctcatgcaccacatggaaacagagtgtggccctgaagttgtggctttctttgtgtcaaaactgtggtctgagtttttagagaaggaaaaatgctactcagtgagaaatccaagaaatgaaaccaggaaggttttcagatcacatttcccagagtgagttcgggagaatcttgcctgtcgtgatcacactgttccccgccgccccaggtcagcacatacttgacccagagtgggctctcaggatttgttgattgaagggtgggtgaaagctggctggagactcctggcctggccacctgcaagaggcggactttgaagaaaactgtgatccagttgagccactttgtccctgaggggaatgctgctttgcagctttctgtaacttctcacatgggaattgcactggtgacagataaggtttaacagatgtacttttttatcctcagaataagacaaggcaaactctatatggctagtattactgagtcaggtccctcccgttgacccattaattccagcattgatcaatacaaccaaattccagccccaggacaagagtggcaggcatgggggcctggtactccaggctacagtgtgagcccaggtgttctgcaccttgcagcctgcacactgcaggtgaaatcatgagcagtgttctggagtgtgaagtgtttttatttttttgttaatgtattaattccttttagatattaacccccctcagaactatatgcacaaactataacttggatgttaataatcctgtcactcagtgccccaaaccttctgtgtctacacctagagagagggccagtaagggcaactcctatcatgcattaaaatgcatgtatttaaatctgcttgcccagagccagtaccc

SEQ ID NO: 29774 - DNA, 2300 bp, Homo sapien
taactgggactacaaatgcacaccaccacgcctggctaaatttttccatttttgtagagacagggtttttccgtgtttcccaggctcatctcaaactccctggctcaagcagtccacccaccctggcctcccaaagtgctgggattataggcatgagccaccgtgcctggccactattacttcttataactctgtgtgaatctataattatctcaagataaacaaactttaatgaaaatattaaataattttaatagtgctataaaaattaaaatagaaaaaccaacatgattgttgtttcttcttttttgttttgtaggtgtgtatgatatagtgaataatcttggctcccttgtggccagattaattttccagccaatagaggaaagtttttatatattttttgctaaggtgctggagaggggaaaggatgccacacttcagaagcaggtaatgttggttcttatgtcatctctcaagtgaattctccctttaattgcaagacagacaggagtgtgaagcagtctgtttctcttctgtttgatcaggaattttcttatagatttcattcttctattacattcttcatgatagtgggacccagggctcacctcttctttcgtggccttcttgctttgctcttggctgtcccttccttctcacacctttgttattcgttgtgaccttactctttttgggggggggggcggggatagagtcttgctctgacgcccagcctggagtgcagtggcatgacctcggctcactgcaacctccacctcccaggttcaaacgattctcctgcctcagcctcctgagtagctgggactacaggcatgcgccaccacacccagctaatttatgtatttttagtagagatggggttttgccatgttggccaggctgctcttgaactcctgacttcaggcagtctgcccacctcagcctcccaaagtgctaggattacaggtgtgagcccccatacctggccatgtgaccttactcttgatccagccctctcaggactctaaagctgtccccattgccctgcagatgcccagccatgggctagtcttaggcgtaagaatgcttcccttatcctcagagtctcaagagccaaaggatgcagaagttggagccaggctaatcaagggcatagggaggagaggaagtggttgttggctttcgctcaccacaccaattatttaagcttcttacaactgggacatgcccagagctacactctgactgtaagattctgtatactcgggttggtaaatacagaagaagagattttaatctaggagtattttgttgtaggagcttcactttttccaaaaccactgaaaatgtctgacttttcttagaatagcaagctagttcagcctcttgcttgtcttagaagaaatttagtaaaatacagtttatgcacaatatctcaaaatgagctaatctggtactcagtctgatttaggaatattttcctaagagtaccttcacagtatcatcataattttggaatgtttagcaggagaagcacagagctggctagtgtatatgaaaacttgctgcacatttaagaataaatattagtggtctggtgcagtggctcatgcctgtaagcctcacgctttgggaggccaaggcaggaggattgcttgaggccaggagtttgagattagcctggtcaacatagtgagactcccttctctatttctatttaaaaaaaaaaaaaagaacaaatatcagaggggaaagtgagtgtttcctaagcaatatttgaaacaatttatcccaagtgaattgaaaactaaccctcccccttacgacctaaggagacacacactttttccttcatttgctaactgacgtgaaaacaaacacactacaaaaaaatagtgatatccatcacgctgttggaagagtgaactgtaaaacagtgaagggagaaggccagacgtgaaggatgaaggttttcttcagctcatgattcatccaacttccttccctcttccctggccccaggaggacgttgctgtggctgctgcagtcttggagtccctgctcaagctggccctgctggccggcctgaccatcactgtttttggctttgcctattctcagctggctctggatatctacggagggaccatgcttagctcaggatccggtacgcacaagagtttttctggattttttctgatttcccaacataaatagaagagtcacgaaattcaagaacttgtgcacacacagttgttatctgtgtcagtgtagggaaaactgtctggtggcagggg

SEQ ID NO: 29775 - DNA, 2300 bp, Homo sapien
tgaggattcaaggtcagttctctctgacagacaaaagctcacattcttgggcagggtgcagtgcggtggctcatgcctgtaatctcggcactttgagaagctgaggtgggcggatcacttgagtccaggagttggagaccagcctgagcaacgtgggaaaaacccatctctacaaaaatcacagaaaaaatcagccaggtctggtgctgcacgcctgtagtcccagctaatcggaaggctgaggtgggaggattacctgaggccaggaggtggaagcggcagtgaaccaagactgtaccactgcaccctagcctgggagacagagcgagaccctgtctcaaaaaaaaaaaagaaaagaaaagaaaagaaaagaaaagaaaaagaaaagctcacattctgggcctccacactaagacagagctcatttcacctgggaagatgggagtgataggctttgagttccacagtctgtttccagcagcagtagcagcagtcatgtgtcaggagacatttataggagccctaagaatgttctgtaccgctacttcaggaagcaaaaccaggcaggctgcacttctgccctcttggagctcatgggctgattatatagagacacatattctagtctttctgctataatgcagattgcattaggaactataaaggggtacagagtattttaggggtactgtcttgatttgcttgggctgctgtaacaaaataccatagactgggtaagtcaaaaacagaaatttctctcacagctctggaggctggaagcccaagatcaaggtgctagccagtttggttcctgttaagtgtatgttgggcgccttacattttacaaagccttcttcgtggttgcagacagctacattcttgctgtatcctcaaatagtaaacacagagatcatttttctgacatctctttttataaggacatgaatcccattatgacggctccactttcaggacctaattacttcccaaaggccttacctcctaatactatcacactggggattaggcttcaacatatgaattttgagggtacacaaacatttagtccacagcaggtaccagctgtggttggccaggaaagtcaggacagtgtggtctaggagggcaaggggtgctgtcagggaagacactttggacaaagagggtggaggagcaaaggccagtgagtcaccgcctgtttgaggaccagtaaggactcggaatggctatggcctagatagtgttgggaagggcaatgatcgtgtgaaaggtagtagaagataggttggggccaaatcatgtgaggactgaaagagattggggaaagactgggcttcctacagcctgcttggtagataataagaacactgacagaacagcagctgattgtgtatgttgggcgctttacatttttttacaaagcacttccagtccttcttccactctgccctcacaatttctagcatacaggcaagagtgataagtttaggatcaggagcctggtatccacttagtcaggaaacaagttgtgtagattcgaacaagtcacttcccatctccaaggctttactcatctctaaccacaggggccaattctcagagctttcggaaggatttcacaaaaccatacacataacagtgctatatctaacttctggtcctcagttctttctctgttaaatgaggacaattcctgtccagcctaattcagagggtctgtggctgtgattctgtaagcaaaggtcaatggtgagaatcttcttaacgggccagtgagaagtttgttccccttttggcagatgaggccaggaaagttagtgcttcttggttggtggctgaaagcctcagagaaggaactttggattctttaacggtatctcttagtactcgccacactatttcgtttatacggggaagagagggacagacagcgcacaagcgacagacagcgcaaaacctaccgaaatagaaagagccaggcgccataacagacggcccgagacaggcccacttaaaggaccagaacttctcgtgccccgcccccctctctcaaggccatcaatcagacagcgaggcgcgccgtgacgccatcttatcgcgactaaacggagtggcggcggcatttcctggtgtctgagcctggcgcggaggctatgggcagccaggaggtgctgggccacgcggcccggctggcctcctccggtctcctcctgcaggtactctctgcccttcaggttccagcttgtactgcagccgggattcgcgggatggcagcccttgggcccttgagagcctgcccc

SEQ ID NO: 29776 - DNA, 2300 bp, Homo sapien
cacaagttaaagcagggaggtactattggcatccactaggcagaggccagggatgctgctcaacatccttacagtgcacagggcagcccccacagcaaagaatcatctgtcccaaaggtcagtggtgctgaaattgagatccctgatgtaaactatgggctttggagccagacagacctcggtctgaatctgcgtctgccactgactagctgtgtactctggggcaagtcgcttctcctttctctgagcctcagtttgctcatcaccaaaactggcactaacagcagccctcacctcttgagaactgttcagactgcccacatccagcacccagcacacagcctggtgctgggtagcccctatcagcgatagccatgattattcatttccttcttccatggtgaaccacacggagtgggaacaaaggtctggtggctggacctggagctcctcaagggtcagtcctccctctggctgcagtccctggcacagggtgggcctattgtttatgttgagggagagactgggttggcttactgtggacctgaaggaggagccagaaggaaacccgatcccaagtgggcaaaggtcacttgaggctcaccttgtttaccctttcctccagtccaaccccagggaagccatggggcatgatgggtggggtgggatgggatcaggacacagaacatgctaatgaatatggtccttcactcagggaagtgccgtgcattacaactgggcatcagggaggagggacatttgaatggacacaaccagggcaggtagaggtttgggggtggggtgggaaatggcattcaggcccagagaacagcatgctcaaggcctgggtgtgaagagaaagtctttcccaaaggatagtccttgaacccacctggtctggccttttctccccatccatcttccgcaatctcaaccagggtcctcccacctgaacaacgtggcagcccttctgtcccccatccagcctctcctctgccctgctgtccctctgccccatctatcccgcaggagcccccttgagcctgtcatcctgcctggttgtaatagctttcaccaccttctcattgctctgtgagaagaccaaagtccaatggcctgtctctgtcacaagcccctttctcagctcaggccacctcagggattgtcccccacttccatcccttgtgtctcagctgggaagagctgtctagactttctctatcccttctaggtggttccccaggacctggaaccctcttttttgtctcctgggaagtgacatttctttggatgagtataaggctaatgtcttggctttctgagctctggggacaggggaatggactccctagaaccccaactggtccctagactttgagcctaggggacactcggtgaatagatgaatgagtgaatgaatgaatgaaggagttatggctgacaaccaagttccatgtctggaaaggaggctcaggcgcctgccaggagcaatagagaggtctcaaaggtgggggcaggaaagcagaagactgccaatcggggtaggggcaactgccagtccgagtaggggcagttcccagaaccgcctgaggagcagtgcagcgcccgaccagcgagaacctccgaccctggagtctaaccagctcagtctttggggcagagccgggacagcgggcttggcggcgggcaccgcgcccggccgcgtccgagctccagccaacaggaagagcaggagtggggccaggagaggcgggccagctggccagtggggagtcccgggcgtgggtgtggggagcgggggaacccccgccggcccctcccaggccccagcgggcggagggagcctccccaccgggcctcagcgtcctcctctgtaaaatgggccccttctgagggctggctgcgcgctaatggcgggaggatgcgaagagggccaggcagggcagagggaccgggagactcggtgtcccgcgcaggcagaggcggagggacgctgtccccgattgcagctggcggggcgaggcctggcagggcgaggcctggcgggggcggggcctggcgggggcggggccggcggcacctgggtgaggtcgctcggccccgccccctcgcacttccgtgtgccgcggcgccggagcccgaggcggctgtagcccacatctcccgagcgacccccggcgcccgcccgccgcgcggaggcccgggccacacctcactggccgcttggcccatcccagtcagcgccgcgccgaaccccgtccgcgcgcgccggggagcggcgcccccgccgctgccgccgc

SEQ ID NO: 29777 - DNA, 2300 bp, Homo sapien
aggtagttctgtgctctagaggacactggggaaccacagcaggccctcaaggcaggagagtcgggcagattctgccaggggaaggccgtggaggtctacgagggagggacagaggggccatggcccaaccttctctgcctggccttgttgcagagcgtgggaaaacactggtgcagaagaagccgaccatgtatcctgagtggaagtcgacgttcgatgcccacatctatgaggggcgcgtcatccagattgtgctaatgcgggcagcagaggagccagtgtctgaggtgaccgtgggtgtgtcggtgctggccgagcgctgcaagaagaacaatggcaaggctgagttctgggtaaggggcgcacgagccgtgccgtgtgtgtgtgtgtgtgtgtctgtgtgtgtgtgcatgcgtgcatgtgtgtgcgtgcacacacgcgggcttggtcagtgagcacagctgaagagcaccgggccctgtgctggccaccagtccagccctgtggccaacatgtcctgggtgtgaatcctggctctgcaattcaccagattcccagcctctctgagcttctgcttccgcatctgttaagggaaggcgctactaaatgtgcctacctcagggtcagttgttcaaatgaaaggagcagctggatgtacagggcttattgcagaacctgacacatagcaggtgctaaagacggccaacttccttattgtgactactttttcctttttaattttggaaaggcaggatatgcacatagtaaaacatttttaactgcatgaaagggtgtgtccctgccccaacaccaggccaccaggcctccttcccagaggcacccattatcccagttctttttggaatcttcgcatatattctaggccttggcagccattgagggggcaacatagtgatctttaacagcaaggaggtgggagaaggggaggctgacggtctcatctacttacctgctgaaatggagactctgcacaagcatgtggccacttggccatgtgcagctgtgtgttctgggtggccacaggatgccagtgctggcagaagtcccctggggttacatgtgggatgtaaccaagatgtctccaccaggaaaggccctgtgaccattggaggctctgatcagcctcctgcgaggggtgagggggctgggatgggagagaggttaacacagggctgtactgacccttggccagtcaggcagggacacagaggggcctctggctgtgctgtctccgctcccccaagggaggatatcagtcaccaggtctaggtcttgggggaggtgaggggatagaggctcaggtcccaccctcgagactgtccaatctgcatgaggagccctcggcacagagggaggagcagcgtgtgtgcacgaggatgagtgtgtctgtgtgtctgtctctctccgcatgtgcacacgggtaggggcctccattctaagatccttgctaagggagctgcagcgggtaggggtggggaatttcccttcccgctctattccccagctatgtgtctgggctgggtgtgggctggaccctttcacttccctaaatgtaataatacccctgggtacagggtgggggtggggctcaggagtggggctcaggcggggccctgcccacactgggcagacaagtgtctggctaggccttggggggctgccttggccttgggggaccagccatgggggtgggttctgagtttggcctggcccaggctgccctcactgaccttgttctcccctggcctctggcccccaacagctggacctgcagcctcaggccaaggtgttgatgtctgttcagtatttcctggaggacgtgggtaagaactccctgggggtggagggctcccttgccgggttcagaggcagagccagcactgaggtgtagggaagctgctcccttcggcagagctgtccaggaccaccctgggagggactgtaggggtgccaccccttccagataccagggctgacttccctactccatggtcaccagattgcaaacagtctatgcgcagtgaggacgaggccaagttcccaacgatgaaccgccgcggagccatcaaacaggccaaaatccactacatcaagaaccatgagtttatcgccaccttctttgggcaacccaccttctgttctgtgtgcaaagactttgtctggtgagaaccggccatgcccactggtggtggtgcagggtagtgggggccgatcccggtccccgctcactcactttgcctgggttttgcctttcaggggcctcaacaagcaaggctaca

SEQ ID NO: 29778 - DNA, 2300 bp, Homo sapien
catgtgcagctgtgtgttctgggtggccacaggatgccagtgctggcagaagtcccctggggttacatgtgggatgtaaccaagatgtctccaccaggaaaggccctgtgaccattggaggctctgatcagcctcctgcgaggggtgagggggctgggatgggagagaggttaacacagggctgtactgacccttggccagtcaggcagggacacagaggggcctctggctgtgctgtctccgctcccccaagggaggatatcagtcaccaggtctaggtcttgggggaggtgaggggatagaggctcaggtcccaccctcgagactgtccaatctgcatgaggagccctcggcacagagggaggagcagcgtgtgtgcacgaggatgagtgtgtctgtgtgtctgtctctctccgcatgtgcacacgggtaggggcctccattctaagatccttgctaagggagctgcagcgggtaggggtggggaatttcccttcccgctctattccccagctatgtgtctgggctgggtgtgggctggaccctttcacttccctaaatgtaataatacccctgggtacagggtgggggtggggctcaggagtggggctcaggcggggccctgcccacactgggcagacaagtgtctggctaggccttggggggctgccttggccttgggggaccagccatgggggtgggttctgagtttggcctggcccaggctgccctcactgaccttgttctcccctggcctctggcccccaacagctggacctgcagcctcaggccaaggtgttgatgtctgttcagtatttcctggaggacgtgggtaagaactccctgggggtggagggctcccttgccgggttcagaggcagagccagcactgaggtgtagggaagctgctcccttcggcagagctgtccaggaccaccctgggagggactgtaggggtgccaccccttccagataccagggctgacttccctactccatggtcaccagattgcaaacagtctatgcgcagtgaggacgaggccaagttcccaacgatgaaccgccgcggagccatcaaacaggccaaaatccactacatcaagaaccatgagtttatcgccaccttctttgggcaacccaccttctgttctgtgtgcaaagactttgtctggtgagaaccggccatgcccactggtggtggtgcagggtagtgggggccgatcccggtccccgctcactcactttgcctgggttttgcctttcaggggcctcaacaagcaaggctacaaatgcaggcgtaagtgtctccacaggccagtttgtacgtatgtacccatgtgtgctcacgtgtgccagtgcctgtgtgtatgccagtgcctgtgtgcgctcagagagtgtatgcacgtgagttttcccagtgtagatacagcagctgagttcagtgagtgctggggctggcttgctgctgctctggaaaaccagttctgcgcatctcttcccagctccgcattcagtgacggggagttggtggatggcaattgggcacagtagagtattcacgcagaaaccagcccaggccatgcaccaggcctcttttcctcggagaggcaatgataggtcctttactggcacatagtggctgcatgtgcttctgtgtagatgtgggtgtctctgagtacacaggtgtgagcacactctgtccctgagggtgtatacacgaggcgccgcaggctggagtcagactgcctgggtttgaatcccagctctaccacttcctagctatagggccttaggcaaagttacttaacctctctgtgcctcagtttcctcatctataatttttttttttttgagactgagtctcattctgttgcccaagctagagtgcagttgtgcgatctcagctcactgtaacctccctctccaaggttcaagcgattctcttgccttagcctcctgagtagctgggattacaggcgtgcaccaccatgcccggctaatttttgtatttttagtagaataggggctttgtcatgttggccaggctggtctcaaactcctgacctcaagtgactcacccacctcagcctcccaaagtgctgggattataggcgtgagccatcgtgcctggccctcatctataaattagatataactataatgtataatagggtcattgtgaagatcaaatggaataagatatgtaaagctgtattttaagtgccttccactggtagccgctctgtgtaagaagtctgttatcattattacacatgctttgtgtgtatgtacaggtgtct

SEQ ID NO: 29779 - DNA, 2300 bp, Homo sapien
aagtagacaaacctgaacctgggggtcacttctgctgctgactgctaggggaccctgggcgagtgacatcacctgtttgagccccatttgggcttcaggaagtagggcagtgtatgcccagcgtttagcacacagtaggggacttgcaagaagcacctgtttttaggatctctttctccttctgcttccttttctgtttctcattcccttgtacccttggggacagtcctggactaatacggctgaaaattaggacatggggggcagggttggaaggagaagaaatgtcccctgctgactcttacctgtcccctgtccttagggacctcaaactggacaatgtgctgctggaccgggatggccacatcaagattgccgactttgggatgtgcaaagagaacatattcggggagagccgggccagcaccttctgcggcacccctgactatatcgcccctgaggtgagccgatacccttccagccccccgctcagtcaggcaccttgcctccccacggtgggccagggaaggattcccaagggcagtgatgtccaagccaaagcccataggctgaggcggcctggctaggcttcgtgcccaggggcccctctcagcctcagcacctcagctcctgctgacctgctgctctccccaccgccagatcctacagggcctgaagtacacattctctgtggactggtggtctttcggggtccttctgtacgagatgctcattggccagtcccccttccatggtgatgatgaggatgaactcttcgagtccatccgtgtggacacgccacattatccccgctggatcaccaaggagtccaaggacatcctggagaaggtggaggccctgggctgggctgggctggtctgggctgggctggggcaggggctggcagacactgggctttgggtgaggagcttcctgtctctggaatggcagcctcagtggtgctgcagtcctaacatacggggtattgctctctcaccatgttcccaggaactcctgtctgagtcctgtgcatagaatcagcctgacatggtgactaagggcccagggtcaggagacagacccgaggccaaatgctggctctgcctgggactagctggtcacttaacctctcagagtttgtctccttatctgtaaaatggggctatgagcagacttgactcacagagttgttgggaagaaaatagaaacatatgatgctcagctgtgggccaggcagatagtaaataataaaaagttccaccagcagagtcgcagatgtccagcccagagcctgtcatctccgggggagctgggagcactgcaggccagagtggcctccctcagccccaccgttccccaggctgactggggctggggcaagcctggctttgcatccctgggcctgctggggatttgctgaagctccaatttcccatggcccttgggtgctaaccagggtccctgctgggttgcagctctttgaaagggaaccaaccaagaggctgggagtgaccggaaacatcaaaatccaccccttcttcaagaccataaactggactctgctggaaaagcggaggttggagccacctttcaggcccaaagtggtatgtgatcctgccctgtgctgccttcaggctgagctactcctctcctgccctccctctctcctgcatcattcacacgctttccacctctcccttcttccagcaatctccatagcatgttcagtcacagccgctgcccttgtattctcatcctctccctcctgactcagtcattcagcacacactggggactgtggatcccactgtatgcagaggaccctgttttgggaaatagagttaagacctcactttatcgctccattcaatccattttccaatacatatggggaatcctgagtccctgttgaatgcagagcacagtgctgggctgcacagcaaagtgggagatgcagtcccagaaccggaggagctctcagctagttggagagataagaaacttgcacacctatgacaatttgtgatacgagatgacagtataagagatgccccaggacacatgatccgttgctattgagtgggtctgtcagcaggaacccaggtggcagagaagagggtgggtctgagaggccccgttggaagaagtgagacaagggacagctgggaggcattccaggtggaagaggggctggttcactcacaggcccagaatctacagggctaccaaggaaccagcctgagagcagaggcaggtggggccactaagaaatttggggctgtgtggcccctctgtgacca

SEQ ID NO: 29780 - DNA, 2300 bp, Homo sapien
aagttccaccagcagagtcgcagatgtccagcccagagcctgtcatctccgggggagctgggagcactgcaggccagagtggcctccctcagccccaccgttccccaggctgactggggctggggcaagcctggctttgcatccctgggcctgctggggatttgctgaagctccaatttcccatggcccttgggtgctaaccagggtccctgctgggttgcagctctttgaaagggaaccaaccaagaggctgggagtgaccggaaacatcaaaatccaccccttcttcaagaccataaactggactctgctggaaaagcggaggttggagccacctttcaggcccaaagtggtatgtgatcctgccctgtgctgccttcaggctgagctactcctctcctgccctccctctctcctgcatcattcacacgctttccacctctcccttcttccagcaatctccatagcatgttcagtcacagccgctgcccttgtattctcatcctctccctcctgactcagtcattcagcacacactggggactgtggatcccactgtatgcagaggaccctgttttgggaaatagagttaagacctcactttatcgctccattcaatccattttccaatacatatggggaatcctgagtccctgttgaatgcagagcacagtgctgggctgcacagcaaagtgggagatgcagtcccagaaccggaggagctctcagctagttggagagataagaaacttgcacacctatgacaatttgtgatacgagatgacagtataagagatgccccaggacacatgatccgttgctattgagtgggtctgtcagcaggaacccaggtggcagagaagagggtgggtctgagaggccccgttggaagaagtgagacaagggacagctgggaggcattccaggtggaagaggggctggttcactcacaggcccagaatctacagggctaccaaggaaccagcctgagagcagaggcaggtggggccactaagaaatttggggctgtgtggcccctctgtgaccacagttcttccttcccactccccttctgtcctttgattcccctcctccaccagggcacacagttcccactgggcagcctgtgtaatgcgccccacatttgtgctttgaggctacagagcacttcccctacaccagggacctcaaactcagacgtgtcctggctgagcatgtaactgacaggctaggccagctgcaagaaaatcacacagcctgctttcagtctcacttttgatagatttccttctccgcactaagaaacacaaagcaggtgtgatgtaccccttgtcagtggggcaggggctgtccagggggctcttagcaccaagagtgggcaggaagtgggcccagggctgctttaatctgccagttttcaaaagaagctggaaatctggatttttaggttgcattgctcaattttaaaatataagttcaggccgggcacagtggcccacaccagcactttgggaggctgaggcaggcagatcacctgaggtcaggagttcgagaccagcctggccaacatggtgaaaccccgtctctactacaaaaaatacaaaaaaaattagccgggtacggtggtgcacacctgtaatcccagctactcaggaggctgaggcaggagaatcgcttgaacccaggaggtggaggttgcagtgagccgagatcgtgccactgcactccagcctgggcaagagagtgagactccatctctaaatgaataaataaataaaaataaataaataaaatataggttcaaattccattaaaacccagtacaagccgaaatgattgtacttgccagttcagtttggctgaagggccaccagcttgcggtctttctatattaccatcccatcatatcctcaggagcagagaatcagcaaatttctcctgtaaacagcctgatagtatatattttaggcttttcaggcttgatggtctcaaagcaggcatagacagtatgtcaacaaatgggcatggttgtgtattacaaaagctttatttatggaaagtgaaatttgaatttcacctaattttcatgtcatgaaatatttttcttttgattttttttccaaccatttaaaaatgtgaaagccattcttagcttgtggtccccacaaaaacaggtggtaagtgagcctccctgggctgtgattcggtggtctctgagcaagaggctaccacctctcctaacccaggcccagagctccctggtcactttcctcatcctcttggggaaatggcagcctcct

SEQ ID NO: 29781 - DNA, 2300 bp, Homo sapien
gggaggggctttccctggtgccaggaaagtttgtcctaggctgctggggggccatgctgccctcctgctcagctgtctatgccatgaggcaccgccaggccttgctagctgacaggtcaggccacaccagcctccagtcaggcctcaggcactgtcttggcttcccgtatttcctgagcaggggctgagggagaaatgacaagttcgtcaggctcccatgaggacccagtgatggcctccagcacactccgcaccaagcacgccctacactaagcacattatactctaagtcttctcgccaaaaaggaggcagagtttttcagctctgggattcctgaatgtcccagcttcctgtagccttgatgtccccggactgggtctgggtgactgggtcagggttcttgactctcctccctcatcctgcccaggccccggcgcctgctgcccaggctctcgtcttcttcttcacaagctgtgtgggcctgggagaggccaggcaggctggaggtgagggcagctgcccctcctgtccctctactttgggttagccaggcctcccaggtccttggggcatggctagccagtgtagatgggctcaccaggctgctggctgggcctgtgcctatggctcaggtgtccttgtcccagtatttgcctctagattctctgcaggggcctgtgggctctggagacgcacaggacctgagccccaggctgttcccatcatcctatgggaccagggccctcctgggagcctactgcatgattcctcttttgagggccctaggggcagtagggtacagaaggtgggatctctagactcacagagacccaggttccaatcccaggtctgccctcaacacactggtgaacaggcatcagcccagggcacccccctgggaccaaaccacatcaccccatgcctggtccctctggaattggtgttgaggcaaacacaggcacagcctctggcactgctagacctggctgggtagctaagtggggggcaattgcctgaccttggctttgacaggtttattctctccagacggtcaggaggacaggtggacgtgtccacaaatgtgtctcatcctcgcaacagctctgaggatttcctggggactccaccagtggccggggcacccagccctcctcccccagcactagtttgttcttggccagtataaggttttgcacagttgaccttataagcagggctgaccccagctgagcccgagcagcagggggagaaatccactgtggtcagcagtgtgagggcagtcacctaggaacagcagagcaggtcggggctggagcttgggactgcagaattctgtgtgacatcagaagctcctgggccagttgtcacatggagtcccaggccccattggcaagacccagaaatctgcattttaacaagttgagggggacagttccacacttgggattgaggacctctcatgccatcctgagggtcccttttcccccaggacgaaggctgccctgtctctgcttctctgagatgcctagttaaaaggatatgacaaggacgagggacaacaagcaagtgaacctccctatcccaggagacctgactgcaaggctgtggggacttgggggaggtggggcggccctgagagtgcctggtcagcttccagactgaggcagttccccagcccgctcagggccaggtggactgaggtcacaatgagggatgtaggtctcagcctctcagctagaaggcaggttgcagtcaaatgtcacctggtgatgaatgggaggcagcgatagttctggaggttgagggcagttgcaggtgattccaaggggacttgggacacccaggtcctggcccaggaccaaggacaccagcctccctagcgcaccctccacgcttcttccccagaacctgcactggctgcaaacacatcaaaaaagaaaacatttcagggccaattcatttttctcaaaacatatatttacccctcctctcagtacatctttgagcacctttcccagaatctcaggaatgtatagacccccgccccacacttcatacccgccctaggccttggtgatgaggcccctcacagcttgtgcaatggcatccctgtcgataccaaacatcttcagcagctcagccggcttcccacttcttggtacccggttaactgccaggtgggtgacagtgatgccaggctcgcccactactgcactggacacagcctcaccaatgccacctagaaatgaaaggaggggagtcagaagacgaggcctcagggtgagcagtggtgggccca

SEQ ID NO: 29782 - DNA, 2300 bp, Homo sapien
tgctctgcacaggggcccagcattggctgaggaggctgtggaggggagggagcagggcaggtgccgtgcaaggctttgagactcaggtcaggcctccaggactgcgttttgcggatgaacccatgcctgtgactacactaagtaacaggatgcttggggttaccttgcagtagcacagcatacgcaggcctgtgttccctgatgactgacctcagaaagggagaggaggaagggaggaaataatctctgttggacaggcgaggaaactgagccacagggtcctcaccccacaggcctccccaaggccacatctatctggggactcagagtacaaccccagcagcacccccaggacctgtgtccataacctcgtgactcaagccagattcctgaagtcctggctccaccgctaacttgctttgtggcgtgggtcacgttacttactccaccttcggtgtctcagttgatttgtctgtacaatggggccagctcagcacccaagcatggcgtggtgaggcttcagtgggctaatatgggtagtggttggcatggcactcagtttgagaagtgctatttttattcttatgtcaaaaagagtccccaaaaggatagcttttcaagagaaagggtgctctgccccagctccttcctgtatatttgactccatggttcatttcaaaaacatttccagcaccacatccagcatctgtggagtgatcaaatgtgttccccaaataagaattgggccaaaaaattcatcaagaatctaatagcagacagattccaaacccagtgcgctgaccccagaacagctttcagtaggaaatgagcagatcaggaatgaaagagacaataaaggaactgagctctggattacttaagaggaggaggaaaacctgttcagaggcaaacaaaaggaagtaaaataatgtgaaaaagaaaaggatttaaaaaacccaaactggaaacaggaatgttgcaagctttctactactccagctgaggccgcagttgtggggtggagcctgggcagaccccagctgccaaggcagacctttccctggaaggctcctcggtgttgtggcccctgggaattgccccttactctctgccccctgtccccagttggcatgccatcatcgtggatggacacagcgtggaggagctgtgcaaggcctttggccaggccaagcaccagccaacagccatcattgccaagaccttcaagggccgagggatcacgggtcagtatgcacaagccgccctccccaccttcacccctcgcccagacactgtggctacgtagctctgacccgcacatccagggaaacagcccttgctgctcactgagctcaccaggctccagggaaggggagcgggagatgctgtgactcagtgacccctgtggctgagccaggatttaaactcagatccgtctggcctctgccggtgggggcatgtacaggcaggaggagaggagggacttggagggtctgtgggtgagaggaaggtcgtggagtgaggcagcccccgtgccccaccctggctggtgcctttcagagctgcagctgtgtgtgctctgccagctccggccacctgctccagctgaagggccgacacagagccaggcagggcccggagagaactgttccctccaggaggtgagtggggtactcctcaagcaatggcagatgctgagcaaggcctgtgtgggccaagagccttggggggtttggaacctgggttctgccccaggccggagaatgaggcaggcgtaagtcactccctggcacccaggtgtgggcttcagattcctaggcctgggatggcctcacccattttaaagatgggaaaatgagactacaagtggtcagggacttgcccggggacagaggaagtctatggcacgaggggggctgatcccagggcctgggtcggcttccctgccaaatgcccctggctgcccacctgcctgctctcaggggttgtggcttgttctgcccatgtagactcaggtatatgaggatgttctgagtgggggtttggcagtgctgggaggtgtctgggagggggtggatgtcgaggaaagggctctgggatattgtcatggctttggtgctgctgcctggcactgccctctggtgttaaaaatgggcaggatctggaccacttgcagcttcttgggggctcctgctagtctttcgggctgctgggtgctacctgggagttcagtctgttcttggctctggccagactctagtgactactgaggtgacctccagggagagggatattcagcc

SEQ ID NO: 29783 - DNA, 2300 bp, Homo sapien
ccctcgagtgtaaatgccatctgttctgcatatccatgcgtggctgctcctttacccagaatgcaggctccttggatgggtgggggggtgggagccagctgggtccaggtgagagggactggcctgattcactctctgtccacagctaccgagtctattgcttgctgggagacggggagctgtcagagggctctgtatgggaggccatggccttcgccagcatctataagctggacaaccttgtggccattctagacatcaatcgcctgggccagagtgacccggccccactgcagcaccagatggacatctaccagaagcggtgcgaggccttcgggtatgtacgaggctgtggcctgagtgtggtcacagcacgggagagtggtctgtgatcacagctttgcaggtgcaggtgcaggagctgaagctgggaccttaagcaccatctaaaggtccctttctttagcatttgactcacaatttcaaactctaggcatttggacttaatggctcaggatatgtgggccaggcccagttttaagtgagtttccttgttttcgtggttgtggcatggtggctctcggagcttccacacaccatctcacgtcagctcgctttgttcttgaggaaggagggttcttgagggatgggggcttgctcggtaaagctaaaggatgtatagctgcggagaggtttgaacctcagtttggtggccacgtcctgtgcccagccccgcccagcctggggaggaggaacaggctcctggtgaaatgggagatagggtttccagatgccccccttcggccttgattggttacaaattcagggtcaaagggcacaaagcagggaggtcaatctgcatgggtgtcagccagaggggctccacctcaaagcctccaccggtgttgccaaacacaagctgctctgcacaggggcccagcattggctgaggaggctgtggaggggagggagcagggcaggtgccgtgcaaggctttgagactcaggtcaggcctccaggactgcgttttgcggatgaacccatgcctgtgactacactaagtaacaggatgcttggggttaccttgcagtagcacagcatacgcaggcctgtgttccctgatgactgacctcagaaagggagaggaggaagggaggaaataatctctgttggacaggcgaggaaactgagccacagggtcctcaccccacaggcctccccaaggccacatctatctggggactcagagtacaaccccagcagcacccccaggacctgtgtccataacctcgtgactcaagccagattcctgaagtcctggctccaccgctaacttgctttgtggcgtgggtcacgttacttactccaccttcggtgtctcagttgatttgtctgtacaatggggccagctcagcacccaagcatggcgtggtgaggcttcagtgggctaatatgggtagtggttggcatggcactcagtttgagaagtgctatttttattcttatgtcaaaaagagtccccaaaaggatagcttttcaagagaaagggtgctctgccccagctccttcctgtatatttgactccatggttcatttcaaaaacatttccagcaccacatccagcatctgtggagtgatcaaatgtgttccccaaataagaattgggccaaaaaattcatcaagaatctaatagcagacagattccaaacccagtgcgctgaccccagaacagctttcagtaggaaatgagcagatcaggaatgaaagagacaataaaggaactgagctctggattacttaagaggaggaggaaaacctgttcagaggcaaacaaaaggaagtaaaataatgtgaaaaagaaaaggatttaaaaaacccaaactggaaacaggaatgttgcaagctttctactactccagctgaggccgcagttgtggggtggagcctgggcagaccccagctgccaaggcagacctttccctggaaggctcctcggtgttgtggcccctgggaattgccccttactctctgccccctgtccccagttggcatgccatcatcgtggatggacacagcgtggaggagctgtgcaaggcctttggccaggccaagcaccagccaacagccatcattgccaagaccttcaagggccgagggatcacgggtcagtatgcacaagccgccctccccaccttcacccctcgcccagacactgtggctacgtagctctgacccgcacatccagggaaacagcccttgctgctcactgagctcaccaggctccagggaaggggagcggg

SEQ ID NO: 29784 - DNA, 2300 bp, Homo sapien
gagccactgcacacatcctgagagctggttttaatgatcacataatattctgttttatggagatgctataatccatctagccagtcctttgttgttggacacgtaaggtagtttccaaatcgttctacaacaaatgtcgaccttctgtttagggttccctctcttcaaattagttcatgaatggatgtttgcagccccccacccctaactctaacagctcaggcaataccaagcctcagggttagcccaggctcctgtaggccccttccctgttcacaaccccttccttggcatctcctcgggacctcagcacgccctctgacctgagcctgatggccctgtagggcttagccttgtccctagtctcgaagccaaagctgtgctgggcctccagtgctagcctcggttcgacttccctggaagtgggtgtgggcttggggtggcagccagttgccttccctggaatccctttctgggaagtcgagttggcttctctggctcagccccatcatgtggcccctttctggagctgctgtgccagaccagagtccctgcagggtctctgggccccctcaaaacctacaggggaaagaggaggcaaggctgggacaggatagggcctctgaagtgtgggcctgaggctttgtccttctggccatggtaccccacaggggcaccacctcctgtggtggaggccacagaagagcagtatgaggcaggagaggctgcagggagtgctcctggcctgctggcatgtggaagtgctgagtcatgctgacagctccgtggctagctgtcccagcctcttcctgctgcccctgccttggccctgcggcagggaggcctggaggcttggactgctgagcatgcagccgggttgagggccttttcctgcaggagcaggagggcagccatgtcccctctgagcccaaccaggcaccagcctcatttcctagggctacacagctagacactgggcagggtaaggggaggtccccaagtcctaccactcctcaccctacttgcatgcctgcacggcaaggagcggacagtctaggctacagtcagacctgcgtttgaatcctggctcagcaacttcctgacagcgcgaccttcagacaagtcctgtctgttgctgccgtccctctgctacccccatcccctcacatctcccaggccgggaacgttctgtttgctgggtaatttatcccaagttcagtgttctttttaacgtctcactgtcttgaaaagatcacagttgcctgtgttgaggggaggagagggcccctgtggtagagaaagagccaggtgcagcttcagtcttggggtcaagagctagtcttggaagcttggggagagcctgtcccaggaagcgcctggtcctcaagtgccctctgctctatcctccccagagccctcttgctccagggtgttgcctagagtgcctcaggcctccttggcccacctccctcctccgggcagaagcagagcttggttcccaaggttcccctttcccactggcccacccagccagtcccaaggcctcctccaacctctggttcacagcggggtctgtcccctgcagcaggtggctcaagcctattcacccacccttcctcactttcctctcattccaacaacccccatttttctagatcttattagccagatccctgttgtcctagacctctgtttcttaacaaccagtacttcttcctgagctcctgacgtcttccttcatgccattttctcttggggtgtggcttgtggtaggctgcaggaacctggtgacactgttgcccctcgagtgtaaatgccatctgttctgcatatccatgcgtggctgctcctttacccagaatgcaggctccttggatgggtgggggggtgggagccagctgggtccaggtgagagggactggcctgattcactctctgtccacagctaccgagtctattgcttgctgggagacggggagctgtcagagggctctgtatgggaggccatggccttcgccagcatctataagctggacaaccttgtggccattctagacatcaatcgcctgggccagagtgacccggccccactgcagcaccagatggacatctaccagaagcggtgcgaggccttcgggtatgtacgaggctgtggcctgagtgtggtcacagcacgggagagtggtctgtgatcacagctttgcaggtgcaggtgcaggagctgaagctgggaccttaagcaccatctaaaggtccctttctttagcatttgactcacaatttcaaactctaggcatttg

SEQ ID NO: 29785 - DNA, 2300 bp, Homo sapien
ctcccgggaggcctgtgccctgaggctgaacttttaacaaaaccctgggaccagagggcttcagggctgatcaggacctgcagcgcttcctgctgggaagcaggaagcaatagaaagtttacgctttctattgctcaggagccgctcagtgattaaaacaagtctaaaaagccaaggggactccgtggccccaccactcccaggctggaaggcaggttcttgctttgtcagcccttcctcagcccttgtccataggcagaaggggtttttattaatacatgattgtagccttgtaggagatgagattatgtgtcttgctttgaaaattctacacaaaagcctgtttcctagttgctacagcagccctcaaactgcccatttctaaagctttcaagtagcccagtgatgcaattggaaagcccaaggcccagtttttcaggctaccacaccccatgcgtggaggctgctgggaggtctgtggtaactccatgagcctcagtcccttcctccctgccccatgggctcagaggcccagcacccctgggtgctgagagggcagggtgcccttcacaagtgggcagtgtccgggcagtcctgtcaggatgtggggtcagtcgtaggaatgccggcaccccttggctgctgagtccttagactcctgggggccactaggtgggaactgggttctacctgacagcagctgcccccagccgcagtgctagccttgggctgagtcttctgtgctagatctctcctgggcccctccttccttcttactcaagtccaaccccagatattttcagttgccgtgattctgaggatctgatgcccctggaaaggtacaacagtccccagcacccactagctggcccaggccccaaactgccaggagtggccttcttgagaccatgtgtcaccctcccagggaacaagagctcgtggctgtctgataagccaggcctgtgtgactcctcaggacatgcacccccaggtccctgtacagctgagcacaatagctcaggagtgcagggccatgatgcctgtgtctgtcttctctcctgggccacagccaccccacgtcatgctgcagcgccgcagagatcatggctgtcctctttttccacaccatgcgctacaagtcccaggacccccggaatccgcacaatgaccgctttgtgctctccaaggtaagagcccagctgcccactgccagccacaccttgcctgggactagggtcacacgggccctggaatggtgagtggtctttgaggagacctggctgggcccacctctcccaggtgccttctccctgctcgtcctggcctctccctcagtgtcctgctctgtgctgacccagctggctaaggaatacaggactgaattgatgggttgctctgccatggagcccaggtacataaacaacgctttaactcaaagaaatggagtaggggactacggaaacatctgttgtgtgttctgcccagtctgggtgttgacaggcaggactggcatctcggtctgggttgtggctccctacctgctctatctgtgttgtgccagcgctcccgaggccacggcttgccccctcggggtggtggtgtgctgtagcagggttttggatggggaccccctgaccccccccttctgggtggaatcacagccacagatccctgaaatccacctgtgctcaggcctgcctccgtggcgtttggtctctcgggcaggctttagagcttagaagtctgtccaagttgttcccatgccacaaaccagggattagggcagccggctgcctgctggggttttggcttcgtccagcctcacagctgtgccccctgcacctgtcttagtgcctgcctggccttggcagtgggaactttgggctgaaaaccaagaggctgaagagggctgaaaggggagaagtggccttcacttgcttcctcccctgaaatggatgctgcagttggccggctcggccgggccccaggggtcagtgtgaagtaggcacagcccgaagtagaaccgctccccacctgacctcaccccaccatccatctcccggcagggccatgcagctcccatcctctacgcggtctgggctgaagctggtttcctggccgaggcggagctgctgaacctgaggaagatcagctccgacttggacgggcacccggtcccggtaagtgctcctgccagagcctcccatgcctctgcctccacttcctatttcccagacatgtgggacgggggtagggggtgcccactgagaagccaaaggtgttgaaaggcggaggagggc

SEQ ID NO: 29786 - DNA, 2300 bp, Homo sapien
gtatatgcatatcatagtatcacaggccccattcatgtggaacaccaggaggagagagagcctccctgaggtccctggagctccaggtggtggggaggggacaattttctttccattactcctaggtccccagagccatggtgagttctgtgccattgtcagagaccagagtgataaggatgagtcccattaggcagatggggaaatggagtccactcccttagggagccactgctctaagggccacagagttggaaggcacagagctttcaaagggtttcaagggtttgccctttttccagacagtgagcagcttgagggcagaggtggcacctgccaggcatctgagggtggcacactgtggggcccccctccaatcctagcccatagccctcaccagccagacaccatagggccagcctctgcgggctgggccagcaggagccaggtgctatgggatgccatacttagggtctgattgggcatctgggggtcaggccagcagaggagcacctggaggcgagctgggggactcactcaaattcagtcaatcgcctcatgagccagagctctctgagtatgggcaatgcagggaggacacagaggacacagggcggccactggtgcctcttggatctctcagggttttagctccctgcccagccatccgtttgagggtcttgcctttatctttcctctgtcaaatggagcttcttcctctgtaaaataggcattgtaggcagtatgtacctcactggccaagtgtggtgggcagattgaatgaaacagtgtctgtgatgaaagtcccctccctaatcccactctggggagcttcatacctctgggaaccatggggtctgataacagtagtggtgggtgcccctgtccctacagacctggaagcaaacccaataatctccctaaaagtcagtagtgtttctaggccctaataatttgtaaaggatcttcccctagtaatttctcagttatcatcacctggcattgtcatggctaccactatcctattctcattttcaataatccccatcccctgtgcagggctctaaagccctgagtggctgggcatggtggctcatacctataatccggcactttgggaggcagaggagggcagatggcttgagcctaggagttcaagacctgcctgggtaaagtggcaaaaccccatctctacaaaacatacaaaaattagccgggcgtggtagtgtgtacctatggtcccagctacttttgaggctgaggcagaaggatcacttgagcccaggaggctgaggcttcaggcagctgtaatcactccactgcattccagcctgggtgaccatgggtgaccccgtctcaaagaaaaaacaagttttttaattattagaaaaaagaaatagggcctggtgcggtggctcacccctgtaaccccagcactttgggaggccgaggcggatcacctgaggtcgggagttcaagatcagcctgaccaacatggagaaaccccgtctctactaaaaatacaaaattagctaggtgtggtggcgcatgcttgtaatcccagctactagggaggctgaggcaggagaattgcttgaactcaggaggcggaggttgtggtgagccaagatcatgccattgcactccagcctgggcaacaacagcgaaactcagtctcaaaattaagtcctgcagtctcttgggcctggggttggtcggctggggccaagcctggcacccaccagccttgtgaccttgattgcccttgccaagcctcagtttgtccatctctaaaatgggattcgccgtgacaagtccacggaggactgtgtggaggagggagactgagaggctttcgagtcaggagcccagactcgaatcctgagttgttcgttatgttattattattggtgtgtgtggttaactgctaacctcgcagtccgcagcggcccagcgcctaggggaggggagcgggcaggaggcggccccaggcggggcggggctgaaggcctggggtgatccgagccccgcctcctccccctgccccgcctctcccatccccgccccgccccgcccggcgacttaacgcgcccccgccccgcgcccggcctcggcagccgcctgtcgccgcgggagcagccgctatctctgtgtgtccgcgtgtgcgcccggtccccgcctgccgcaccatggagagctaccacaagcctgaccagcagaagctgcaggccttgaaggacacggccaaccgcctacgtatcagctccatccaggccaccactgcggcgggctctgggtga

SEQ ID NO: 29787 - DNA, 2300 bp, Homo sapien
atcatttatacaatttttttcctaagctgttaccaaggaagtaaaatctgatgaggtaaatgtggcattcgtatccttaacctttaccatctcttctagaatgattccagcttcctcagtacacttcatgaagtctacttgcaggttctgaccaagaacaaagacaaccacaacctatgactggagcagaataagtctaaaggcagagccccagcctcagagacaaataggcttcatcatggaaacttctgagcagaacattgagtttgagaatcctgaaattgagcctatgagaaagagactcatttcttaagaatgttttccaagtgacattctcagtgataatggaggtttcactgtgaagcatcaccagcagatccttgttttgacaaaaaaaaaaaaaaaaaaaaaaaaaaagagagcgatcattgtgttaagttatgtgggtgttttcatcagctaggagcaaggctgtggaataaggagtcagattctcagcttgctttcactttcaaggacttacagaggagtagtcaccagcctcacagcagaagttcagcccggcccccaccgcttcccccagcctaccccatagaaacgggctttgggctgacaagtcaagttttgaacagagtagaaggcagctctgcaaagtagcttctagtttttaggaccagaatttaagccggcaaattaggaattatttcctcaagtgaagtatattttatatgaatgccccatttgggccttaaaagttgtgaaatttcttaatagcattttgtttttaagtgccccagtcctgccctgcagcaggcccccagtgcagcattaccatttgaatagggcactgtcaggctctggtggtgtggacacaggcatgtcatacctttgaaggaaaggctggggctgggaatgcccacatcctatcaaatcttcattttaggttaaactctccattggttctgaaaatgctaagtttgtgtgtgaagcacagccttattttccttttctgtcattgttgattgttttccttaacactttgacaaaaggaccagtggaccaatctgacaaagccattctggttcctttccttgagtgtactgagaatagttttaaagctatgcagaaaagggagctgttattcacactgcccttattttgttgtagaattatggagttaaaagaaaatgtgattccgaactctaccaatgtattcctaggctgtgagtactttcccggcccaaagtgtgaaaatatgtaaagaagctttgttatgctgctattgatctgccatgatttctatttattcttttatggcatgtaatggtgtttagtaatattttaatgtagattttgatttatttcagcaatagtaattttaagatattctttgaatgaaagtgtcttcgtttctatgatacaggtcattttgtagtatttaaccaattaagatgcactgcttacttttctgagcactatttaatgatggggtaaaaacccaattggctcaaccagctagcataaggattagctgtgaataatgctgacagatatgatggttccttaggaacaatcatttaagctttaatggtaactcaatcataagtccatagattatttttttctagctaaaattttagaaaattacttgtgaattacatacttgttttagtttggtcttagtttttagcataaagaatgattggcttttgttgatctaaacatgcttcctggacagggtttctgcttctcattttagtgtcttctattgctgtctacctaattatgtgtgaattgtgcagaattcagggaagcttataagttttcatgctcaattgtgaatagtttgttttcacagatagtatgtaaattaagcaaccaaaaatgaattccttatgcatcatctgggaacgagaaagctatagtgggatacagagtgttgctgacaccgggagatggtgtccagggagccacgtgacttccataaagtggacgcaccagtaggtgtgattgcacctcaagtgtagtctcagtgggcttcggtgaacagacgaatcaagggattcttgaatcgaaattatgcttttgagtatgtaatattatgagagagttaagagagaatatcctaaagagagtctgtgatcatactaattttcacctttaatgctaggaatggatatgatagacagtaaagagcatctatgataaggcttccttagtgtgaaagtaaacttaagtgcccaagtcatggagacttgaaaagggtaaacctgtttcacctcccaaatttatatattcaa

SEQ ID NO: 29788 - DNA, 2300 bp, Homo sapien
cccaattcattcctaccatttccctttgagcagttaggaggagcccctcaatcagaaaccctgggtgtcccttctgctgcccaccattcagtccagcctgaaatcaccaccccggtgctaatcactccagcctccatcacacagtccaatgaaaagcatgctccaacctacacaatcccgttgagccctgttctcagtcccactctgccagctgaagctcctactgcacaggttccccccagcttacctcgaaacagcaccatgatgcaggcagtgaagaccacgcctagacagaggtctccactcctgaaccagccagtccctgagctaagccatgccagtctgattgccaaccagagccccttcagggccccattgaacgtgacgaacacagctggcacatccctcccaagcgttgatcttctccagaaactcaggttgaccccacagcatgaccaaatacagacacaaccacttgggaaaggtgcaatggtagccagcttttctccggcagctggtcagctagccacacctgagagcttcatagagcctccctctaagacagcagcagcaagagtggcggcctcagcctccctgagcaacatggtgcttgctccccttcaggtaatggcaggagggtgggggtgggcagagtgggtaactgtaactggatgggatgaaactacagagaccttggttttaactgtcatgacatgacaatttttagagttgtccctttaaagtatgtcagaggctcggagacaggtgaggtaagaagccctatcatgaacaaccaagtaatttatattttcctatcgggatattcactttagtgggggttgtatgtttgttttgcttttgcccagcagttccaggagtcctcatttgactgaggaccaaattattccaaagcttaactccctatctcccacggcagtctcctagagtgcctaccttgtgccaagtaccctagaggtgccataagagcatcctagactcgaaggtatgaggtcaaataaagctgattttttcaactgcccatatttacatcaccttataaagaggtgccatgctgcctagatctcttatctctacagactcagcagcaaaaatatgcccaggctgaaggacagatatcacatgttcttactttatttgaactcatggagatagagaatagaaggatggttaccagaggctgggaagggtagtgggaaggtggggggaggtggggatggtgaatgcatacaaaaaaaaaaaaatagaatgaataagacctgtatttaataacacaacagggtgattatagtccataataatttaagtatatattttaaaataatgaaaagggtataattagattgtaacacaaaggaaaaattcgtgaggggatggatgccccgttttccatgatgtgattattatgcatcgcatgcctgtatcaaaacatttcatatacctcataaatacatacacctatatacccacaaaaattaaaaattatatatattcctgggctgtctctggcttttataagagacacaggtttcaggtttttctttaaagatacctgaaaggctctgcacacaccccttccctcaggagctaaagaggagaggctgtcgcagagctctagtgcagttgaattgttggctgcatggttacaggttcctgtcagactcttcccttgggaatctaggaactagttaatatctgaaccattttctgttactaacctagattttccactgggaaagtctttttcaattaagactaggaagtcttcttaattgaaacttcttatatctgtctgtcttttcttcataaacatttcagtctatgcagcagaaccaggatcctgaagtatttgtgcagcctaaggtgttatccagtgccagtgccatcccggtaaggactcgctttttttttttttttttttttttttttttttttttaagactagtcgggtgccatagtgagaaagtagaaagagtagaacaaggaatttggtctgtaactggctgtgaacagtcaggtgagataattcactccctttggaccagccaggactccctctttctgaagaacacattatttttaagttctgctggatgtgaagtaaaaggttgtcagcttagtgaaaagagttagctatggagcccagcacatcttagatgcctttcctaggccaggtcctctcccaccccgtcctggcagagtccattgctgtggcttctgtggatctcgaggcgtctgcatggatatcttccctgactgtgtgtgtagagggcacggtgggc

SEQ ID NO: 29789 - DNA, 2300 bp, Homo sapien
tctcatgcctcagcctcttgagtagctgagattacaggcatgtgccaccacgcccagctaatttttgtatttttagtatagatggggtttcaccatgttggccaggctggtctccaactcctgacctcaagtggtccaccttcctcggccttccagagtgttaggattacaggcgtgagcccacacatctagctaccataccctttttttttttttttttttgagtcttgctctgtcgcccaggctggagtgcaatggcaccaccttggctcactgcaacctccgcctcccgggttcaagtgattctcctgtctcagcctcccaagcagctgggactataggcgtgcgccaccacgcccggctaatttttgtatttttagtagagacggggtttcaccatattgtccaggctggtctcaaactcctgacctcaggcggtcttcccaccttagcctcccaaagtgctgggattacaggcatgagccaccacgcccagcctccatgacctttttaacgaaagaaatgttgctttttaagaagtctggcggggatagaactccctatagtctccatgatttgttttacttgttagctagtgcctaactctttcaaacgctttaaaatgctcaacagacacttaccaatgaaatgagtgatctgcttaatgctttaaatgaagcaagacaaattaaacccttcatggactcttcccagggctggacaaaaatatttatgtgggtcagacgcagtggctcacgcctgtaatcccagcactttgggaggccaaggagggcagatcacctgaggtcaggagttcaaaaccagcctggccaatgtggtgaaacctcgtcactactaaaaaaaatacaaaaattagctgggcgtggtggcgggcgcccgtaatcccggctactctggaggctgacgcaggagaatcgcttgaacccaggaggcagaagttgcagtgagctgagatcgcgccacggcactccagtctgggcgacagagcgaaactccatttcaaaaaaaagaaaaagaaaaagaaaaaattagccaggtgtggtggcgggcgcctgtaatcccacctaattgggaggctgaggcaggagaatcgcttgaaccctggaggcagaggttgcagtgagcttgagattgtgccacggcactcctgcctgggcaaaagagcgagactccgtttcaaaaagaaaaaaagaaaagggccgggcgcggtggctcaagcctgtaatctcagcactttgggaggcagaggcgggtggatcgcctgaggtcaggagttcgagactagcctggccaacatggcgaaaccccgtctctactataaacacaaaaattatcagggcatggtggcgcgcccatgtaatcccagctactggggacgctgagacaggagaatcgcttgaaccttggaggcggaggttgcagtgagtcgagatcgcgccactgcacttcagcctgggcgacaagagtgaaactccgtctcaaaaaaaaagaaaaaaaatccacttgtaccttctgctaatcagtgtatatattcaaggcaacttgaatctatgctcctggggtgcaatcctcaagcttggcccaaataaactctctgcttgcatttattttgccccagagtcttcttccttttaggtcgacacatccatatctgagacctagggtaattttctgggcttctcgcctctccctttcccccatgtttttctgtgctctctaaacgggcccggtagagtcccgcatttccacattccacagacatgttttccttctgtggccccgggccctgccagacagcgcaccgcgaggccggcacttcggcggtctccaacctttgcctggaaagagctcggcaggcgagctagaggccagatcccaggacccagtcgttttagctcagggaaaggaagcgccggagctccagcctgcaagctccactacgcagccttggacaccgcccacatcgtagggccgcggaccctgacaacgccggaacccggcgcccggagcgtgcgcgcggcggaccagaatggctgacgtaccgccctgccgcgaggcccgcgtagaggcggaagttgaggggactgacgcagatgggggaattttgcctcgatggcactttcctgtccgcgactccgcccccaccagaggggctaggctctgggattcaagatggaggcgctgagtcgagctgggcaggagatgagcctagcggccctgaagcaacacgacccctatatcaccagcatcgcagacctcacgggccaggtcgctctgta

SEQ ID NO: 29790 - DNA, 2300 bp, Homo sapien
accagcctggccaacacggtgaaaccccgtctctactaaaaatacaaaaattacctgagggtggtggcgcgcgcctgtagtcccacctattcaggaggctgaggcaggagaatctctcttgaactcaacaggcagaggttacagtgagctgaaactgcatcactgcattccagcctggacaacagagtgagcaagactccgtctcaaaaaaaaaaaaagtatacaaacttttcttctgtcattaggttgtccttgaggaaggaactgtgccatagatttgtcctgacatctagaccagacccttattcttaaccggtgccttatgaatgctggctgcactgaactgaacaatgagcaaatatggttcggctcagtcatccactagatacagtatttttccctctagacaggagctgctgtttgcaaatctcccccattccaaatctgagccagcaaaggtatcataaaacaaacttgctcagggaattttgtagaaaaggcctcaagaggcaaggctttagaccaggagttctgaaagtgacatgtgtacttgtgaatttcatacatgctccttggatgggctagtttctttggagggaaccgtcttctattcccttcagattttggatcagaagcagccataggagaggtggcccaggccagctttatattgttactagaccgtagggcgatttctcgcctctccagtctccaaaaacaaagcacaaaaaaggacaagagcctggttgttttcatcctcacggaccagacaccccctcaggaaggcctctggagagtcttctgtctggtccccagtctctctgcccaggtgccccccaacaattgaggatgactagtgtgttctctttgggtaaggagcaccttcccataaacacttatttttcttaattcacgctgagcttttactttattttcgctttaaagtcactgttctgaaacgttctaaaacgccgtaggaacatgcagataggaacaaaagcaaataaatcgaatcctgtgaagtaacaaagcagacgcccttctcctaacaggcagcacaaagctaaatgaaaaatatcagtcatccactagataaagtattttcccctttagacaggagctgccgtttgcaaatctcccccaccctaaatccaagccagcgaaggtatcaaaaaataaactactcccttcagctcccagactggaggcaacagtttcagcagcaccgtctatttccttgaacaacacgagcggtttgaaagaccttggctttgacttccctgtacctgcctccaaacacacgtgggggcggggtggggtggggggagatattgccccccatccccgttgccttccgcgacgccaggccaggcgcagggcaggggagaagatggggggcgccctggattcgcggttccagctgcaggcagttacctggggtagtgagtgctctctacagacccgggctaccccaacccccccgattccagaaagggccggagaaaagcagggggcgcctgccccgctccggagcagccagggagcccggccgagccttgacgaggatgagctcggagaccgcagcagctaccgcccgctagcacctgagctcccagggggcggggcctcctccaggtgtgcgcagaggaggccggcgcggagtcggggccggcgcgggagcccgagctgtcccccagcccagaaatgcgcggggaggagcggttcatccgcaccccagcgccgcgggagacactggcgccgcctgcctcctccgggtcccggggggagagcgcaccgtgcggcgcggagggggttaaccgggcagcccgccgctggagcgcgcttaaccctttggagcccgcaggtcagccgggccaggctggggtggcggcaccccgagtcccacgcgacggccaccccgagcgcgcaagtggtgccgggcagaaccgcgcgccgggctgcagacccgccggggcgcggcgcggcgcgggccgtgggcggctcggggcgggcggagggcgggggacggcggcgggcgcgcagcgtcgccagggcgaagccggcgtgcggcgcggcgcggcgggcgcggagcgagcgggcgggcgagcgcctccgtccccggatgtgagctccggctgcccgcggtcccgagccagcggcggcgcgggcggcggcggcgggcaccgggcaccgcggcgggcgggcagacgggcgggcatggggggagcgccgagcggccccggcggccgggccggcatcaccgcggcgtctctccgctagaggaggggacaagccagttc

SEQ ID NO: 29791 - DNA, 2300 bp, Homo sapien
cactactgggctttcctgctgcagccccttagacctccccacctcctcaggcaagctctcctccccagggctctatcctcctctcctctccactgccccctgagaaagtctgactcatgaaccctgtctccaggcctaacctccgcaccctggttgtctcaaagcctgtgtgccgaacaacaccaagctcacagcagggcctgccctggcacacaactgaaaagccagcacagcccagagcctggcccacagcacagaatcagatactcacggaatgaacgcatgttagtgaatggctgcctgctcgctcgtctcagagggactagccctctattttgccctgcagagccaaccaggtggcctttctaaaaccaaaaatggatgaccatttaagcctgtaccattgttcctcagcaccatgggacaaagttcacaatcttgagcttgcagacgaggctgttttcatctgggcttccgcagcaaggcgggtacttgtgtccttgaaaataattctcactgcactcatcctcactccaggagtacccatcagccagcacccatgtgtggttcacctttgcacccagcaggtatttgctgaacaggaagatgactattagagctgaaaatgttctcaagggccacagggcccaaagcaactcagagaggtggaatgaggggctcagggtggcccagtcccaggcaggggtgcggccacaacctcaactgagttccttggtcaggaaacagagcaattctctgaaaatgctacctgcaactccacacgtatgcatgccagagcccaaacccctggctgatccccagtccatgcaagccttaatcaagctggcaggtgggccaggcctggcacacaagtagggcctcagctaaaacagctgcttgacttagtacagcctctcaccagctgacaacacacccctaagttccatacccctctctaggcctccgtcttctcatctgtagaatggagctaattctgcctacaagtttaaatggccctgagttggtcaccacaaccctgtcgtttgcaaaccgagggggctgaagcagcagttccagcctctgtgactccactgttagcccagctgatttttgtgaactttcccccaaacccactgtgtctcaaaggatggtccctgggccacccacccacgaattacgggggcgtgggtggaggctcgttaaatgcagatcccgggcctgacccggacctgccgtctggatctcattttaggcggcgctagagatcccgggccagggaaacttgagaaccgcagctccaaatcgccagtgctgacggcttccgctttgggagccccaggtgttgctgtccgaactcacttggtggaaacagacatttaccagaaagcctggggtcgggcagcgggcactcctaccgctctaaccccgcgtagctgaaagaattcgctccctcaaaggagtcagtgagcttcggcagtctgcgttccacccgtttcgcttcgcgcggcggggcgattgtgtaaagcgggcccgggtctcggcgtccagcccggccccaaacctccggcccccaggcctctccgggctagcggccgggcggcgctgctgcggggtggtcggggcgcctccgcggctactcacccggggcgactcggccgagagcccgacagtcgggaccggagcgggaggagcgggtggccgcggcccggcccctgccccgcggcactttaaccggcggcgccggcgccccgcgcgctctctgcgtccggaatggggacgcagcagttccgacccggtcggccccggagccgcgaggctagctgggctccagcggaggcgcgcgaagcccgagggcgggtgcagctgatgcacctggctcactgcatgcacgtgtgcgcgggggtaggcgcgcgccgcggcggcccgtgctccgccagcgctcggacacggcccatccctccgagccccagcaggcgagggcgctgcgacctgccccagcctgggagggggccagcgggcccgccctctgttcgggtggcgggaatgggtcggcgctgcgagaggcggagccgagaaggggcggcccggcggcgccgggataaaagcgcagcgtgcgggtggcctggatcccgcgcagtggcccggcgatgtcgctcgtgctgctaagcctggccgcgctgtgcaggagcgccgtaccccgagagccggtaagcccccgccagcacctcttccctcatctcccggccctcgagcccagatcctgacgtcgtctgatccgccagtccaggctgccccgaagg

SEQ ID NO: 29792 - DNA, 2300 bp, Homo sapien
ctaaggagataaacaaaagaaagctctgaatgcagtccatggtactttcctcaggttctttaaaatgttccccttctaacacaaaaggactcactgagcaattcacgaaaccataagcaattattagtgttcaagaaaggctggtactaaatcgtttgaagttagctgctcgtgttttttcataagaaaaaataatttgtgctttggttctggaataaaatactgaacctaaaatattggggctttaggcagcagcaagctcaaatgacaagactcaatgtgatacgtccagcagctctggaatatgctgctgagcatccacatttccaaacaccttctaagatctccttttgatggtttgaatgatttgagtttgggcaaaattgtcaatcatttatttgtcttttaaaaaatgaactctaagggatatcatcagatttttttttcctttttctgagacagagtctcactttgtcacccaggctggagtacagtggcgcagatctcggctcactgcaacctctggctcccgggttcaagtgattctcctgcctcagcctccggagtagctgggattacaggcgcctgccaccatgcccggctactttttgtatttttagtagagacggggtttcaccatgttagccaggctgttcccaaactcctgacctcaggcaatccggccgcctcagcctcccaaagtgctgggattacaggcgtgagccaccgagcccggccagacttgactttttttttttttttttaacaaatgagccatcataccaggagctgagttcttatcaaacggccggtgagaggccaagcaacaaccctaaatgctaccaagctcaaattgttggccttgcagcaactacagcaaaagggatgaattcttccctttagtgcaaagagccaagagggcttctgaactgacacagaggggaaggataggagctgaagacatcaggaaacagtgaatggggtttgtccaccagcaggtgactacggagcttgatgctatatgctattctaagagggcagcggtatcatttcaaaggttatttgggggatgagctattttctcttcagtgacccagaagattccctcgatcattcagggtactggggaagaaaggcaactgccttcacgagtgaacatggcaatcaatatggccaaaaagggagggggtactaatggagaaacagttcttgtgccccaacaggtgagcagaccccaagtaacaataactacgtgccaggcccttcgccgctaattgcaggccatgtcgttataccttaagagaccctggtgggttcggtactgcccttcgttttaccgttcgggacttggaacttggtgagcataaatgacagaaccaacagtacagggtggcatctgagaccgggtctgtctgattcccacgcccctgactcaagcaacctgacgccgatgtccggggctgccctgagggtgcaggcatgccccttgagccggcagtccgcgcacgccttcggggcagcctggactggcggatcagacgacgtcaggatctgggctcgagggccgggagatgagggaagaggtgctggcgggggcttaccggctctcggggtacggcgctcctgcacagcgcggccaggcttagcagcacgagcgacatcgccgggccactgcgcgggatccaggccacccgcacgctgcgcttttatcccggcgccgccgggccgccccttctcggctccgcctctcgcagcgccgacccattcccgccacccgaacagagggcgggcccgctggccccctcccaggctggggcaggtcgcagcgccctcgcctgctggggctcggagggatgggccgtgtccgagcgctggcggagcacgggccgccgcggcgcgcgcctacccccgcgcacacgtgcatgcagtgagccaggtgcatcagctgcacccgccctcgggcttcgcgcgcctccgctggagcccagctagcctcgcggctccggggccgaccgggtcggaactgctgcgtccccattccggacgcagagagcgcgcggggcgccggcgccgccggttaaagtgccgcggggcaggggccgggccgcggccacccgctcctcccgctccggtcccgactgtcgggctctcggccgagtcgccccgggtgagtagccgcggaggcgccccgaccaccccgcagcagcgccgcccggccgctagcccggagaggcctgggggccggaggtttggggccgggctggacgccgagacccgggcccgctttacacaatcgcccc

SEQ ID NO: 29793 - DNA, 2300 bp, Homo sapien
cctgggctcaagcaatctttccaccttagtctcccaagtagctgggaccacaggcctgtgccaccacacccagctaatttcttgtattttttgtagagatggtgttttgccatgttgcccaggctagagggaattcttaagagcagtacatgtgataaagattaaggaaacgctacttgttgatgaaggagcatttccaaagattggattaaattagtagtttttgaattgctttgtcttctcattaaatcctttgtactgctcatctttcattttttccccagaaaccagaaagtaatgaacaaagacaaaatggccttaaaatggtggatcaagcaatatggtctaaaaagatgtccaatggtacaagacgcattcctgtgtcccctgaacaggttcgattaactcttcagatttattcttttatcaccactattggtatcataataccattcacatgttcttcctataccactatgcaaatacaagatgggagttccttaaaaaggaagaaaacccctcataaccacttaaagaatacccgagtcagtgttacaaatgcttaggcaagccacataatttataaggtggtggtaggcaagttgatggaagtttatactttacctgagaaggtgtgattccaggatcttggtgggaaactgttcttactacattcttcaatttcatatgataaaccaatatgataggaatggacaggagtctgtattacatataaatttgaattcagctttaagcagcgtttagtgttaattttggactggctgtgaatcacagcctaggtgttaaaattgggggaaaaagaaccccaagattgtaaaaaggacaagagaatccttttgcagccagtcaatattttgccaaatatttgtgattaaaatttgccaatgtgtctagtatgtgagagagaagaaaaggagacccttatgttgcccccgccttgaataaattgagataattttctgatggtttttcttttcaggcacgctcctacaataagcagatgcgacctgcaattttagatcactgttcgggaaataagtggacaaacacatctcatcaccctgagtatttagtaggagaagaggtaagaaacttctttacaatagaatgaaagaaggggaagctgatcctcctcctaaaattcatttacgttgccacccagtcctagttgtttcctagcgttctataaccctgctttgagtaccagatagtcacaccgactcctacttcactctcaacatttctcacattcagcaaacgttagttagatttttggatatgaatccagaaaaccttgagagaaaagttttaacaaagtactcatctccctcctccttttctaggccttgtatgttaatccactggactgttacaatattcactggcctatcagaagaggtcagttaaatattcacccaggccctgggggctctcttacagctgttctggcagatattgaagtaatatggtctcatgcgatacaaaaatacttggaaatcccactgaaagatttaaaggtgagctaaaatcctcagttatttggattgtttttaagattcttggtcaatgaaagtacacgttaccgagttgtttgtaatatagtgtccttcttgaaacattcttgaccttcagggtgaggattcttggtggcatgaggatgtcttttcttcttcacttaattcccttctggtgctttttttctttctctgtttctttggtgtctctattactcgaatcagcaagcttgctcatttttgtcttctctttggaccttactgacacatcagttgtcttatttttgattttacaagtttttaaaaatttcaaggaaaaaaaaacacttgagcattttttttttccttataaaacccaaaggatagtacagaggtttgagctttaatctgggtgtgtaaccgtagctgctactcctttggagggaagtctctctaaaaaggagtgtgaatttgacctgactagacttgagtgctaacccttttatctttgttcttctttttagtattatagatgtatcttgttaattcctgatatctataataagcagcatgtgaaagaactagtgaatatgatactaatgaagatgggtttttcaggtatgtctgatatcccagtgaaacctattttaaatggaattttctttctttaatgacagagttaatcttatttactgacttatttatttatttatttatttgagacagagtctctctctgtcgcccaggctggagtgcagtggcgctatctcagctcactgcaagctc

SEQ ID NO: 29794 - DNA, 2300 bp, Homo sapien
cataatccacattttactttgaagttttaagtcaaggatagttttgggaatgtaaagtttctttaattctgatagtaggccttagggttccattttttagtgtaacaagcagactctacgtaagtctagttgtaagtttaaatataacttgctgatataagagtccgcacttcattatttatctttggatcttataattctactttagggagtacgtttaagaaataaaaatcaaaagaaaacatttctgtaaagatatttatgggcattttctttatactataataacgagaaccagtaagtttatggcttaaccaaaaagtttaagccttgctgatcaacatatgaaggaatgtgtcattgtcaaaactgtaaacataagaattatataattgtatggaagagtctctgaaatattttttaaacatgaagtaggtatgctttgattagtgctgtgagaaattttatgaaaaatcacttgaaaattttgcatatagttgttttatagtgagggctgcttttgacttatttataataaaagattcctgggaattctttttttcttttcttgagacagggtcttgctctcttcttcaggctggagtacagtggtgcgatctcggctcattgcaccttccacctcctgggctcaagcaatctttccaccttagtctcccaagtagctgggaccacaggcctgtgccaccacacccagctaatttcttgtattttttgtagagatggtgttttgccatgttgcccaggctagagggaattcttaagagcagtacatgtgataaagattaaggaaacgctacttgttgatgaaggagcatttccaaagattggattaaattagtagtttttgaattgctttgtcttctcattaaatcctttgtactgctcatctttcattttttccccagaaaccagaaagtaatgaacaaagacaaaatggccttaaaatggtggatcaagcaatatggtctaaaaagatgtccaatggtacaagacgcattcctgtgtcccctgaacaggttcgattaactcttcagatttattcttttatcaccactattggtatcataataccattcacatgttcttcctataccactatgcaaatacaagatgggagttccttaaaaaggaagaaaacccctcataaccacttaaagaatacccgagtcagtgttacaaatgcttaggcaagccacataatttataaggtggtggtaggcaagttgatggaagtttatactttacctgagaaggtgtgattccaggatcttggtgggaaactgttcttactacattcttcaatttcatatgataaaccaatatgataggaatggacaggagtctgtattacatataaatttgaattcagctttaagcagcgtttagtgttaattttggactggctgtgaatcacagcctaggtgttaaaattgggggaaaaagaaccccaagattgtaaaaaggacaagagaatccttttgcagccagtcaatattttgccaaatatttgtgattaaaatttgccaatgtgtctagtatgtgagagagaagaaaaggagacccttatgttgcccccgccttgaataaattgagataattttctgatggtttttcttttcaggcacgctcctacaataagcagatgcgacctgcaattttagatcactgttcgggaaataagtggacaaacacatctcatcaccctgagtatttagtaggagaagaggtaagaaacttctttacaatagaatgaaagaaggggaagctgatcctcctcctaaaattcatttacgttgccacccagtcctagttgtttcctagcgttctataaccctgctttgagtaccagatagtcacaccgactcctacttcactctcaacatttctcacattcagcaaacgttagttagatttttggatatgaatccagaaaaccttgagagaaaagttttaacaaagtactcatctccctcctccttttctaggccttgtatgttaatccactggactgttacaatattcactggcctatcagaagaggtcagttaaatattcacccaggccctgggggctctcttacagctgttctggcagatattgaagtaatatggtctcatgcgatacaaaaatacttggaaatcccactgaaagatttaaaggtgagctaaaatcctcagttatttggattgtttttaagattcttggtcaatgaaagtacacgttaccgagttgtttgtaatatagtgtccttcttgaaacattcttgaccttcagggtga

SEQ ID NO: 29795 - DNA, 2300 bp, Homo sapien
tttgcattatacagatacatgcaagggttcagtaaagtttggcagcttcctagattgtattgccagtgaatggcagaggcattattaaacctccaccttaccctatagcggggagaccatggcagagtctcagtaggtggttgattgttgttactgatggctcttcctgagcatgtgaaccatggtcctcttctgcctcctagcactgctgctgcaggacttgttcctcgggtcttatcccagagttctggctgcatttgacattcaggtattcttctttgcacttcagatagaatgtaaaacacaggttcttgagtactttatgcttaactcttgtctttgctactcaatagcttatgatcttgagtgaattatgccattttatcccacttcactcacctgtaaaacggggattaaatttttacctccaagagttctttatttagtatttagtcatcacatgcttattgggcacctaccatgtgctgaagataactggcaaagtctcacggagcttacattctagtgtgggagacagtgagcaggcatgataattacagactaatgcttcatgcttcaaagggaataggatgatgagagaataactgcggaaggcctgaggtgacatttgagttcagacgtgagaatgagacagctgagggaagagcatccaaggcaaaatgaacagcaagtgcaacagcccgatgacgggaagggcttggcatgtctgagaaagataaaacaggtgtagctggaaatgccaaggaatggggagagtgttgtgaggtgaacttagaaatgtagcaataactagatatggtctttaggtggtggttagtttagattctgttctttgagcaaagggaaaccattagagtttaaagcatgagtgacatctaatttttgaggtaagtcttagtggagtgctgggtacatagtagtattaactacgtaatattttaaaacaacgtgggcaactatataagaacagatcatagggggacaggacaaggagttcgagttaagaggctgttgtagtcatccaggtgagatgatagtggcttgggctaggtagtggcatgggaatggagaagtggatgaattcaagatctattttagagactgcaggatttactgatggattggatgtagaagctgtcaacaagtgaagaatcaaaatgacatttactgagatggtgaaagtgagaggggagggaatcaagagttaaattttggacatatttaagtttgcagtgccttgtagacaatccagatggagagaccaagtaggcactggttatcagtacggatctctctgagcggttcatcctggatatatatatttgggaatcgtattcattgctaaagccaggaaactggatagtcacccaaggagtgtgcctggaaaagacctaaccccaacatcagaggctggactgaacatgaagacatatgagaaaaactaagagtacatatggtatctgggaagccaggagaagagatgcctgtgaggacgaaataagatgcgggttatcagccgacccccactaggcgctcgaaaagctatgtgtactatgttgctggcatctacacagtcaggactaatcacagcaacacccacccaatcaatccgcatgcacaccccgcccccagcccctgcgccgggcagccccacccccgccttttcggagccctctggggcgactccgcggcggccatcttgactgtgggcagccggccgtgcgcctgcgcggtggcccttccatcccggcagtcgtggctgcagcgctgaggcgagaggttggtgggtgtctccggccataatgacccaggctgagaagggtgatacggagaacggaaaggagaagggcggcgagaaggagaaggagcagcgcggcgtgaagcggcccatcgtgcccgcgctggtgccggagtcgctgcaagaggtgcggctctggctgggttggaactctttgcccttgcttgggtcctccgctgccaggcaaggggcgggaggcggcgggaggcttcgagtcccccttgcaggccccagcccctggtggggggagtgcggaagcggtcgttcttttccgggtggtggcgcgccgggacgccgagggctgggaggtgcggagcgccaggagccaggcggagcccccgcagggacaccgctccgatctcccgcacgccccaccgtctggttgtgtgcgctcctgcccgggctctggcctcagcttccccgaccataaaacgaccacggtgataaccagccgcctcgcaagttgccgtgagggttaaat

SEQ ID NO: 29796 - DNA, 2300 bp, Homo sapien
caatgcaggtttcaggataaggataacagtttgctggccacctcaattatgtgtcagattttatttattttttaatttttattttatttttattttttatttttatttttgagacagggtctcactcttatccaggctggagtacagtggctgctcactgcagccttgaccttttgggctaaagtgatctcccactatggcctccctaaacgctgggattacacgtgtgagccacaatgcccagcctgtaaatttttacacattttaaattctgacaaagtgagggatatgtataatgtatacatatatacaaagtgaggtaaatgtataatgacatttgcattatacagatacatgcaagggttcagtaaagtttggcagcttcctagattgtattgccagtgaatggcagaggcattattaaacctccaccttaccctatagcggggagaccatggcagagtctcagtaggtggttgattgttgttactgatggctcttcctgagcatgtgaaccatggtcctcttctgcctcctagcactgctgctgcaggacttgttcctcgggtcttatcccagagttctggctgcatttgacattcaggtattcttctttgcacttcagatagaatgtaaaacacaggttcttgagtactttatgcttaactcttgtctttgctactcaatagcttatgatcttgagtgaattatgccattttatcccacttcactcacctgtaaaacggggattaaatttttacctccaagagttctttatttagtatttagtcatcacatgcttattgggcacctaccatgtgctgaagataactggcaaagtctcacggagcttacattctagtgtgggagacagtgagcaggcatgataattacagactaatgcttcatgcttcaaagggaataggatgatgagagaataactgcggaaggcctgaggtgacatttgagttcagacgtgagaatgagacagctgagggaagagcatccaaggcaaaatgaacagcaagtgcaacagcccgatgacgggaagggcttggcatgtctgagaaagataaaacaggtgtagctggaaatgccaaggaatggggagagtgttgtgaggtgaacttagaaatgtagcaataactagatatggtctttaggtggtggttagtttagattctgttctttgagcaaagggaaaccattagagtttaaagcatgagtgacatctaatttttgaggtaagtcttagtggagtgctgggtacatagtagtattaactacgtaatattttaaaacaacgtgggcaactatataagaacagatcatagggggacaggacaaggagttcgagttaagaggctgttgtagtcatccaggtgagatgatagtggcttgggctaggtagtggcatgggaatggagaagtggatgaattcaagatctattttagagactgcaggatttactgatggattggatgtagaagctgtcaacaagtgaagaatcaaaatgacatttactgagatggtgaaagtgagaggggagggaatcaagagttaaattttggacatatttaagtttgcagtgccttgtagacaatccagatggagagaccaagtaggcactggttatcagtacggatctctctgagcggttcatcctggatatatatatttgggaatcgtattcattgctaaagccaggaaactggatagtcacccaaggagtgtgcctggaaaagacctaaccccaacatcagaggctggactgaacatgaagacatatgagaaaaactaagagtacatatggtatctgggaagccaggagaagagatgcctgtgaggacgaaataagatgcgggttatcagccgacccccactaggcgctcgaaaagctatgtgtactatgttgctggcatctacacagtcaggactaatcacagcaacacccacccaatcaatccgcatgcacaccccgcccccagcccctgcgccgggcagccccacccccgccttttcggagccctctggggcgactccgcggcggccatcttgactgtgggcagccggccgtgcgcctgcgcggtggcccttccatcccggcagtcgtggctgcagcgctgaggcgagaggttggtgggtgtctccggccataatgacccaggctgagaagggtgatacggagaacggaaaggagaagggcggcgagaaggagaaggagcagcgcggcgtgaagcggcccatcgtgcccgcgctggtgccggagtcgctgcaagaggtgcggctctggctgggt

SEQ ID NO: 29797 - DNA, 2300 bp, Homo sapien
tactagggaagtagaaatcagagagcaaaatctaagatgtatcaggaaagcccttaatgccagaccagggaggctgaattatgtttgtcaggtggtgggaagaaacggaaggtctgtgaatgggagaggcaagattggattaaactaacaggtgaagatagcatgaaatggagtacggagaaactagaggtagctcattaggaaatcactgcattaaatctcaggcaaaaatgatctagataaaggaatggaaaggaagagatagcctcacaatgtccgatactcaggagatcccaatgttagtttctttcctcttttggcaattggagagattttaagcaattgtcaaaaaattgtctaaaaaaatctcattcaaccaaccaacaaatatctgagcacctactacttgccaagaactatgacagaccttgaagatataaaagacaataaggcagacaggattcctgacctcttacgtcttatattttcttgaagacaagagacaaatcaattatcagacagtttcacaatgtgaattactatgaagaaaataaacacggagatgagtggccagggaagggcacccagaagtggtgacaactaagcagagggctaaaggataaaatgagctggatgtgcaaggagtccgaggaagagggttccaggtagagggacaagtatgggcagagtcctggaggtatcagtaaaacccggggtgttcacaaactaaaacaacaatgttgccagagcataatctgggtgggggtgttcataaactaaaacaacaatgttgccagagcataatctgggtggggagatgtggctggaagtacagtgagaggagcaatcaagaggacaagtcaccttgggcctgcaggccatgacaaggaactggattttaagagcaataggaagtcactaaattttagtgtccaaaaggttttaggcaagggaacgagatgatctccgttttaagatcgatcttgctacagtttgtaaaactgcctaaggatggtaaaagactgaacctgagatttcatttagaaggaaactagcgtagagcaggtgagagatgatggtggcatggtctagattaagaaaggcccttgggaaaattaacggccctgccctaatatttttgcagaaatgatcctttatgattgtgctgcacaaatcccaaatgaggtgaaggatgttgtcttgtcctattatgaacttttctggggaaaatgctctctccaaaatcaacataaaattagatctttgtcagttctaagtattagaacataaaatcttaaccaaagttgttaaactcaaaatagattttcagcatgtaattttcattttctggaaggtgattaggaatctttccaaagagatgacacatggcttgagaactgggggcgggaagtcaaaggaagcagccattaggtctccacgctgaaagaatagctaagtgcagaggccttgagaagggaatgaaatggccacgttcaaggaacagaggcagcccactggctgtagcagagtaaatatccatggtatgtggtccacatttactgaatgtccaagacatgtcttctaattcgtctgtcaccaaagtggtcataagcagtcgccatcaataagaaacaagcagagaaagggcctacagttcaatttatttttcagttgcctcacaaaaggctaagaaaaacttagtttctggtgaacccaggtagacatgctcattttaaagagaatgaatatatctaggaagagcctggcagtatattcccaaaggcgtgacaataaagttccttaacgtgtagtcagcaccctcaaacgtcaacacgtctggaaaattcggaagcgtttcctcctgtcagcggcccttcaagctacctcatacagggcagcctctcctacccagacccggagcctatcaatcgacgagaaaacagcttcccctcactgggcggtgcgaaccaactctgcacgatcaagtcggatagaggactggcaaccgcgggcactacagggcagtccttaacgtcatatccggttgtcagctcggccgcctccgcctaaccagaagtcgcagatgtgacgatgcaaaaacgcccgtcgggggcgcgtctctttcagcagccaatgggctctgcccaccttcgtcctcgtcagcattttgtctaatcgcggcctgtgacgctcgaagggcggggagcagagggagatacagaaaccgacaggggccaggcgcccggtggctccgaagcggggaagtgggacaagatggtttacatctcgaacggtaagtt

SEQ ID NO: 29798 - DNA, 2300 bp, Homo sapien
tcgtgaggcatgatgtacaattttgaaagatttccaatagaaagagcaaatctttaaaaactctgatgcttagacatcacttatctgaagaatttgccatgtgggagatagctcagtctatttcagaataccatatgttactaaattcacttctggatacaccttgacagtttgtttcttctagcctggcatataatcttcaagccgagattccaaaactggctatctctgaaggtatattgagatacatcacaacgtaaccatcagagatttaatttctagcagtaacaaaatgactaaaagaggtcaattctgtttctttctacttgaacagttcatcattttgacggaaatctaatgaaaaaaatagtaactccaaggggtgttttgtgaagttcagaatttacaatgcattccccacaataatgtatttgatacaatagctgtagatgatacctaggtggttagctccctaagattcacactttttcccccttaacattgtggtgaggatttaagatgaagacagtgtaacacacttgacacagtgcccgatacattaggtagatgttcaacaaatgcaggctactttattttttgtggattgtgaaaacagcttttttttaaagtgccacatgagggtcagaaaggaaaaaacaagaaaattatgtttttattcatcactgcactcccacatagcattttccaaaaacatccaaaacatttggtgttaattacctaagtattttcaggtttgttttcactttagttcagggtttacatttttatcttcactgattttaaattacattgcacaaatattccgcttttcaaaaaaaagcaaaccacattgaagcatataggctaaaatgtgaaggctctccatttgcctcctaggccagctccacatcctcctaagagatatcaacctgtatctgtgtccctacagtcatccatccacatgtaaaacagaatccacatttcctgttcctcagctgcaataaagcctcctagaaacctcatccaacgtaagatttcattttcttagttattgcatagaaactgcaagtcctcccacaagtttcctttgcactttgataataatctcaataaatttgaaagaatttgacaagctcacccactcccatctccacaaatacagagagtacctctgagttaaagaatgcaagacactcagatataccaaaagattgcacagcctaattccactaaagaacctggaaataggagaattgaaagctcactacaacagcggaccatgtgagccttccaattagtgggaactggctgatttcttctaggctgtgtgtctattctgctcagataaatataataaaatatgggccacaatttggtaaaagtatcataccacaagggtggcaggcttctctgtctatgcaaattcccacacaggccttgatgtaaaaagaggctttcaaaagcaagtgattccatagcaaacatgccaaatagattattaaacttcagagttacaggtactgccactctacaggtgattttctaggcagtcattatttttttgtgagctttctatcctatagttcttaatattctagaaggattgatgacatctatttcctttcaaatggggcagttttcaatttagccacattcagcaacctacaaatcagtctgcaaggcactgtgagtaagatgacttttagacctcggctatgttgtaggtggttctgcagagaatcctgaaatacagatgccctgaaacctttgatgagtcctaagtagaataacatcaaaagtgagctttcttttcaacaagatacatgaaagtgaaaacctagctgagagcataacattgcagggctcattttaaataataggaagaaatgaggcaagtccaatatttatttcctcattccatgaaattggaactccattaataaaagatgcatgacatggacataatatataaattcttaagaaatttaacactgctaaaataaaaaaaaatcactagatattcacatttctatacctttgttaaagagttggtttaccgatggagggaggagccaagatggccgaataggaacagctccagtctacagctcccagcgtgagcgacggagaagacgggtgatttctgcatttccatctgaggtaccgggttcatctcactagggagtgccagagagtgggcgcaggtcagtgggtgtgcgcaccgtgcgcaagccgaagcagggcgaggcattgcctcacttgggaagcgcaaggggtcagggagttccctttctgagtca

SEQ ID NO: 29799 - DNA, 2300 bp, Homo sapien
ttactaagagctagcatgcactcactcactggttcattcactatgctttcatttaggaagaacgatcccgcgttctgataggaaaacacattttcttctaacccccaatttgagggtcaactcctgggaccccttgcctcgggggtcaggccgcgcttggctcggtttggaaagggctggcacgcttcctcaggcggagggtatgcacagaagcggagaattcattataaccggttagtcatccgtagaggctgtagacactgcccgcgggcggggcgcacctggcgctcctggagaggggcctgttccttgcgttgccccccaaggtgggagcgcgacctgccagagcccaggggagctcgggtctgcccgcactcgggaaaagcactaagagcctctcggtagcagtccttctccctcgctgccaactctgagatcaagcccaacatctgcaggggtaactttttccagggactactggaaaggagagccggcctggctcctagccggacaccacctggcggaagctggagcccgcccttacttccctgcaacctgaggatgctgaggccaagggcgggtgacggggcagaaagcaaagccctggttgcagaaaggcatgcaaatatgaacccaggtgtctggtgcgccgggagccccggcgacgttaggagcgcactccttgctggggtcaccggagttgcgcttggccgggcaaggatgactcagcctcactccggtcggtctttaccgccagcctgcgcgagggctccacaaagttcccaatcacaccccatacctcgcacgggggagaggggttctgcaagctgggtcccggggtgggggcagcggcgagagaggcggggagaagcctggttcccagaacgcgcaggggcttctccggcttcctttctcctcgcccctgagggcggcgagaaggcgcctcctccggcgctcactgcctcctgcccagtgcggtgggcgccggagtggggagcaggcaatcccccaggctcggagaaatcttttatcccgaaatccagggtgtcccccggtcaggatcgactcggcgccgcgttggcttcctcgctcaaccctgacatcccggtccccaccagtcaccgcagccgggcggactccgaaggcagcggccgctggggagccccggggcctgggtcgggcgcgcagggggccgctgcgctgcggccggatgccgggagccccgcgctggtgcgcccaagccgtggtggcagcaccgccctccgtgctttcccctgtcgggcgccgcggccggaggagcagctgcgggcggtcacgcagcgctgccctagccagagccccgagctcccacccagtcccatccccagcccgatccgccccgcgtgcgatcccgcctgccgccgcgagcctgtgctcctttctgagatttctgcttcttccccagctccctccccgcaggagaatcgcgcggcgggggcggagggcgcgccccctttaggttccgcggcccccgaccccgcccggcccaggggcggagcgggcatgctacgccctctcctagcagccgcccgcaaagtgcggagcgccgcgccctgccctcggcttccctcccgcgcccccaacccccaccctggctagggtcgcccggcccggggccagccccagagtcgcgcccgcggtggcggactgcggagttgtaaagaactcagcggccgcagtagcccgggtggggcagggcgcgctccgccgcggccaaggacactggagtttccgagtccccgcccgcgcggcgcctcctgccccgccgccctcccgccgcggcccgccggactccccggggccgccgaggcggggccgggcggctgctgctgctagaggcgcgtctcgctgcctcctcccccgcccgcctccctccccacctctcctccctccctccccacctctcctccctccctctcctctccgccctccccgccccccccacccgctcctttttctgctccccaagtgagccgggcgcgcgagaggcaggcggggcggcgcggagcggagcaggcagccccgcgcgctcgcccaccgcccgctccgcgcagctccccgcggccgctctcgtcgccgccgcagcgggcgcgtcggagggagcccagcatggccgggccgggctcgccgcgccgcgcgtcccggggggcctcggcgcttctcgctgccgcgcttctctacgccgcgctgggggacgtggtgcgctcggagcagcagataccgctctccgtgtaagtgccggctcctgcgccgcccgggga

SEQ ID NO: 29800 - DNA, 2300 bp, Homo sapien
attgcaggccattatccttagcaaactaatgcaggaacagaaaaccaaataccgcatgttctcacttatacgtgggagctaaatgatgagaacacatggacacagagaggggaacaacacacactaggacctaatggagggtggagggtgggaggagggagaggatcaggaaaaataactaatgggtaccaggcttaatacctgtgcaataaaataatctgtacaacaagcccccataacacagtttacctatgtaacaaacgtgcacgtgtacccctgaacttaaaataaagttaaataaaaaaaaattactcattctgtggtattctgttataacaaaacaaaatggattaagacactggttattatttatttatagctagagtgcctggcaaaagcagaggctcaggaaatatttatttattgaatgaatgaatatgccaccaacttttagataaaaacgggttatgctaaactctagcatttttattcttctctcttatccaagaattttcttgtttgttttctcattttatccctgaattgacacacaggaaggcaagggaggtaataatcccaagcctattttagatagaactttagagacccaagaccacacatttagcaagttatagagtgaatgacaaactgcgtggaccttacagtccaagatctgcatttccagtgacaacaatgcaatggatgagggacctgacacaacagaaggttccagggctaggatgagacttggtaggccaaagggagagtcccaccacttcttcctgtgcagtgggaaagcaattaagaaaatgcagcacactggtggcagctggagagttggcaggcttctcaagagaaggactgtaagcaatgtcataggccgggaagatggatggggcccatttatgcaccaaggctggcgtacaaatggaatcttgcccagtctgactggcctttcttcaaaggtgtcattgacagatgagtatctaaatgtttttgtttaaaaaagaaaacacacaaaagagaaagaagagaataaaacaaaaaacaagaaaatgaaacaaaaaaacctctttctaccccagacatatatagccaatgaacatgagatgaccaggtcaggcctgggagcgaagctggcctttccaaggagtccttgataattatttgcatagttgtacacctcttctttcagaagagttccactttaacacaaggatttcattgagacctaacattcctgccagtcggctgtctcccatctgctgttggggcacactgatgggagaaaagcctgctcacatattcatcttcatctgccaaaacaaggcttcttccccaattaaaatggcctttttaattttagagtggtaaacagtgtctacttaatttgaggaaaatacacagaggaaagttaccaaacctaatcacacagtgatatgatggttgagtcagagtcaggaaaacttggggagggggtgctgaagaggccgctctatttttggagacagagaggtcttcttgaggtcactgccttcgtggggctgcatccacagcagtcttcaacatcaaaaccaagcaattctgttttatcttacgtctaccaaagtttgaaaaagggtaacagtcaccaattctaaaaggtaaggactaaatacggttctttaaatgaccttgcttcttggccttgctctgtaattatcttctgaaaatgggggccatttggcatacacagagaagcagtaaataggagggtgccttctccacccactcagggtggaccaaactgtgtctcgtgacctgcctgtggtctatggccagcgatgcaactcgacaatagactggcatagcatttggaaagtgcacgttcttctctagactggatacacagtgttcaggctcagaccacgtttcacctatactcagccaaacaggcatttatgaaatgtaaggcatttggaaacatgtgagcatagtttgtaaacttggacagaggtggctgggacaggcacagtgaccttagggctcatccttcatgatgactaaactagaaacccaaagaaagggttttaaaaagaaatttcaaacagacaaccagatattctggccagaccatgtcactgacagctgctgcatgtggcctcagctcccgggagacaacatgccttcagaattagctcgctggaccagcctggaggtaagcaagcctgacctcctttaagcataagtaaatcttgttgagttaaatgatcccgtctcccactttcctcaaggaacatgagacattaagtgacaaaatt

SEQ ID NO: 29801 - DNA, 2300 bp, Homo sapien
cctgtttttgtaaataaagttttattggaatgcaggcacacccattgatttatgtattgtctttggctgtttccaaactataacagcagagtccaataattgcaatggagactgatggctcttaaggtctaaaatgtttactatctggccttcacaaaaaaatgtttctgaccccagggaaagagagaggcacacaggtagatatgagttattagtaactttctagttcttagaaggagtgttaagttcacaagtgtttgttgtgttatgataaattaatgattgaatgctaatgggggccattgatggttatgtatgtatttccattaataatggaaattattgtcattaaattctgtgcacctgaaacagatggataggaaggagggattggaaggaaggagggaagaaatcattgagttcttaagatttaagtggctcttcatcacctgacttgctttgtcacctacacctgacttttgcccattgtatgtgtgatgctcaaaaaaatgttggagagaaggacaaaagatggcaggttgcgtaaagtgggctttctggaagaggcaggatgaatatactgggttatgtggggtgacaaggggcttggccaaaggatgaaagagtccacaaagtacaggttgttgaaaataatcaaaatttgatgttttcaacttccattcacaaagggcctcttccctttgtacctgcagagtggcacgaagggccaggttccatggccctctgtcaagacctccctcaggacattcctcctgctgaccggtccaggttgtcctcagaagttggcagcatacaaatcctgaaagcctttctcatgcaaaattgtgaacacttatgaagacactctgggccatgtcgtgtactgccatatttaatcctgggcacagcctggtaaagtaagggctaatgttgtccccatgtcagagatggggctctgggtgggtaagtcacttgcctggagacacgcagctggtgatggtggagccaaatatcgactctggacccacctgattccagagcccaaacccaatggctcaattatacctcctggagccaaggattgcacttcatgctgcttccataaaagcgtacacacagttacacacagcagaacattttgttttatctagaagggcagcttcaggggttgaaaccccacctcagcaaatggcaggggatttccacattcaaagaaacggttccagtccctggtgggaaagttccctgaagcttcaattagagaagagtcacagtcgactgacgcctgatgctcacagggggcggctttattgttttatatgtgaaaagtgagggaagggccaggacctcagcatcagggaaacgaagaaagattaagaagtatttcttaagtcacactaaccaaaaggtcaattcaactcgggggctggggagtgggtggggtgtgggggcagcaagcaagcaagcaagcaagcagctgagaagttatttgtggcaccagaaggaaggttgtgatgtccactaaaggaaaccatggctatgaatttcagggcatcaagaccctgtcaacacagctaatccccacagatgttggctgaataagacttcgatgaccaaagaagtgcacggtgcaaaccgtgtcagcctccagcaggccaatttgtcctcatattacacactctgcgggctctgctgctcgacccccaggtgagggtcccgtccagcatcccccaacccaaagaggggtgacccggcatggttaataagtcaacagaattcagaagccacagccggattaagaaggcagttttattttggtgccctgtacttcaagcagattaaataatcaaaaaggccgaggcactggggtcatgtttgaatgctacagctgttcaccaaggtttgacaaacattctttacgcggctcatcgtctgaatgggaaaggcagggatgatcctggggaggccaacattttaagaaagaagaggggcacgatcccaagatcctcttatggaaactgatcccagccagatggagacaaggggaagggctgcttaaataaatggtcttttgaaagcaacaactgttttctgcattgaagaaaagcaagggcagggttcagaaagactgaatgtaaagctgggctctgagtctgccatgcccttcgtgtgttgctctgcacattaattaaagggtctacgaggtcagcaaggacgcccaaggagactcagtcatgaaaggtgagccctgatcaattcccgttggaaaagttcttgtctgggagaaagatggtatcccc

SEQ ID NO: 29802 - DNA, 2300 bp, Homo sapien
attatgtaattaatttaaaattcattaattctcagtgactttaaaaaacccctgtccatctccttagtttatagcttcctaaagtatcttaatttaaaggatgataagccattctaacatttattcttggtcagatggaagcaacttatcagtggccctttctaccaaattactcaacaaataccactgagatgacttagtacagagagcatagcgaaaagaaaacaatgttcccagattctccaaggtagaccctgtgaacaaagaagtcagatacatgttttggagaaactagttacgtaaagggtttctagattttgataatgagattcacaagtaagtaaccaggcacgaccacaggattaggagaaagtcagaatgaaaatctcacaaaaggccccaatacttaaaagaaaaactcctttggaaggtcactatcttgatcccacaattaaaactgttcctaggagcaaattccctgctttgctcagcatgtggtgtctaacatgctgacagccctttattttgcagtgaaatgaaaggtaatctgagcagccggcagttgattttacaaacattcatcggaaatctggcactttcaggctccaggtacccaaatgggaacacctgtataataacagtgtcgctaatgcttcaagatgctgattataacttacctgtctgctggcagtccagaacttcctttggaaaaattcaagtttcatctgaatgcctacagctgggacaaattataaataaaacaaggcattagtgatccctttacacaattatttaagattatcgttgaaaattatccgtcatggcaagaagctgatataagcatataaaataaaatgtacagtgaagcatacaactaaaacattttatctttcaggtaaagaattctcaagtttacctgcactcacagaactctcgatacaaaacaaacagcacagtgcagatcgctctttggagacatgttacttcggcatttctaaaattcatatgcttgcaccactgcccctacccccaccccaacacaagctgagaagaggaaagaaaaaaaaaaattcaaaagatcactattgcttcagttcctgtcagctattactgtttgaacttgcatgtctaaaatgtgtactctgcatgtgtttttgagacgtaacatttgaaaagcacttgtcatgaggctagaattcagaagtgagtcactttactataatgtgtcttagtttaactggcctcctagagtccacatctcaaggttcttctctcccatggaactctggtaaaattatgtaattttttctttgtctgtgaaaagcttcctaaagcaactgtgaatgctagttctagtgacagaaacagccaaaaagagaagaggttaagaatgtgacttgaaactttgggaagtgaaatttagtggaacctcaaaactataacatgaggaagttcaccttatttttctccatgaagcccaaaccacttgaaagacctgaaaccatctcaggaagtaaaatggtaagggcaaaatgctcctcagatggtgggaaaacttgagaggcgttcagaagaatgagactacagggaatactgaattccctggagcacgtcatttaccccagtgcagttttgcaaactgtagtctgttgcacacaacctccccatttttaccatatttgcataccaccaatactcttattgtccttccacatttctttcttttgcttaaagacctacagtaattcaacctaaataaaactggaacacccatcaaaagaaatacacaattgtaagaaaaaaaatcacttaaatactctaaaaattttgcgtgccactatactggacctcccatttgggtaatcattgttgtgctggcttcaggaacttggagattcataaaggtcttgggctgttgttaccctgataactatcaagggcatttctacttcctaaagaaattgttgaagccagccctgagagtaaaggttaactgggtgtgtacattgggagagatttgccatctgtgtttgcacttagaatttccgactctaggataaagactagagcagtgcacggctgcaacatgcagaacgtgaaaagcctctgaaatgcaccatgtcggtgcccaggctcattctgctctgccttaagtgtccttcgttctctggaccacagccttcccaagaatgaggacctgttcttgctccctgctggacccctgcctccagcaagatgctgagtacacagacgacccataggtaaatgcttgctttttaaaaaaaactttcaagtgatat

SEQ ID NO: 29803 - DNA, 2300 bp, Homo sapien
atatgtgaatttgatcctgtcattttgatgttagctggttattttccttgttagttgatgcagtttcttcctagcctccatggtctttacaatttggcatgtttttgcagtggctggtaccggttgttcctttccatgtttagtgcttccctcaggagctcttgtaaggcaggcctggtggtgacaaaatctctcagcatttgcttgtctgtaaaggattttatttctccttcacttctgaagcttagtttggctggatatgaaattctgggttgaaaattcttttctataagaatgttgaatattggcccccactctcttctgtcttgtagagtttctgcagagagctcagctgttagtctgatgggcttccctttgagggtaacccgacctttctctctggctgcccttaacattttttccttcattttaactttggggaatctaacaattatgtgtcttggagttgctcttctcgaggagtatctttgtggtgttctctgtatttcctgaatgtgaatgtttacctgccttgctagattggggaagttctcctggataatatcctgcagagtgttttccaacttggttccattctccccatcactttcaggtacaccaatcagacgtagattggctcttttcacatagtgccatatttcttggaggctttgttcatttctttttattctcttttctctaaacttctattctcgcttcatttcattcatttcgtcttccatcgctgataccctttcttccagttgacctcattggctactgaggcttgtgcattcatcacgtagttctcgtgccatggttttcagctccatcaggtcctttgaggacttctctgcattggttattctagttagccatttgtctaatttttttttcaaggtttttaacttctttgctgtgggttcaaacttccacctttagcttgaagtagtttatcttctgaagccttcttctctcaactcgtcaaagtcattctctgtccagctttgttccattgctggtgaggagctgcgttcctttggaggaggagaggtgctctgatttttagagtttccagtttttctgctctgttttttccccatctttgtgattttatctacctttggtctttgttgatggtgacgtacagatgagtttttggtgtggatgtcctttctgtttgttagttttccttctaacagtcaggaccctcagctgcaggtctgttggagtttgctggaggtccactccagaccctgtttgcctgggtatcagcagcggtggctgcagaacagcgaatattggtgaaccgcaaatgctgctgcctgattattcctctggaagttttgtctcagaggagtacccagctgtgtgaggtgtcagtctgcccctactggtgggtgcctcccagttaggctactcgggggtcagggacccacttgaggaggcagtctgcccattctcagatctcaagctgagtgctgggagaatcactgctctcttcaaagctgtcagacagggacatttaagtctgcagaggattctgctgccttttgtttgtctgttccctgcccccagaggtggagcgtacagaggcaggcaggcctccttgagctatggtgggctccacccagttcgagcttcccggccgctttgtttacctactcaagcctgagcaatggttggcgcccctcccccagcctctctgctgccttgcagtttgatctcaggctgctgtgctttcaatgagtgaggctccgtgggtgtaggaccctctgaagcaggtgcgtgatataatctcctggtgtgccatttgtaaagcccattggaaaagcacagtattagggtgggagtgacccgattttccaggttccatctgtcacccctttctttgactagaaagagaattctctgaccccttgtgcttcctgggtgaggcgatgcctcgccctgcttcagctcacgcatggtacgctgcacccactgttctgcacccactgtccagcactccccagtgagatgaacctggtacctcagttggaaatgcagaaatcacccatcttctgcagcgcttacgctgggagctgtagactggagccattcctattcggccatcttggctccacctccatttaatgttaagtttaattcaaaatcccgacaagatttcttgtagatatagacaatgttactctaatatttacatgaaaaggcaaaggagctagaatatccaaaacaattttgagaaggtagaatacagtaggaggtatcagtctactcaatttcaaaacttattatac

SEQ ID NO: 29804 - DNA, 2300 bp, Homo sapien
cctgcgaggggtgtcagggaactctcgcatttcacaaccatcttcctggcacacctttttgccacctgccctcagaccagctggtattattcttcttcttgctggtgagaggaaccaaaacctccgactcacaaacactgatggggagcagtgatatgcattgctcttagcctaggtctactgagtggtctcactcctttggagctacctttgcctgggctatgtggcatccacgtgcttttctgcttacacaaggcctcatggactacatgttagaggtttttcatcatttattatttgttacttactgatttcttaactactgactgtatctgtattctgtcttgattcattttctgaaaaagcaggactcatctttacttaatgagctttattccagtcctagagagaggtaggaatttaatttgactgagatattctgttcctcactgctgcctttacttgattaacatggagaatcataaaatttctgagcagagaaccaaaagtagataacaaataggctatgaagcttgctgagatatctgtagaggggagattgataaagatgtttaatacatctttctataaataaaaggacttctggtttgccctggacttggaatgaatcttctcagggcttcaagacagtcatcactctggctacctgccatatgaaggttcttttctcagagggcaaatgttgctataagaaatgccacgtgccattttatcaagctgagcgcaactggcttgtgacaaccctgcatgagacacccaaccaaagaaagatattttctctttgatcagatgattactgagagtagatgtgctagcattaaattggttttcatggttgatatttttcaagtaggctgggcatgatggctcacacctgtagtcccagctgctcaggaggctaaggtggggggattgcttgggtctgggaggttgaggctgcagtgagccatgattgcaccactgcactccagcctgggcaacagagcaagaccctgtctcaaaaataataaaataaaatgataaaaatattactagtagctccaaatttagtaatttctttttggaagctattattaatatattttgtttaacagaatacaggtcacctaccagcatttcttatgaagtgagcttctgtcaagttttttgtatttttcttttcgactcttaatataaaatcatccaaaaggtattcatacctgtgagtatttgttagcatggttttaaaatgtagtatgtcttctttgttcaatttaaacaacgttggaagaaaacaatgttttcccatgttttctgttcatgtcttttcccctctagagcttggctcacaccattccttgcatttagaatatcctttctattatgcccaaatctatttcattctttaaggcacatttaaaggctctcaacctttcatgctcaactgctgctttctctcgtctttactgatttgtttactggaagtcatctcccccagttctgcatactttcatacagaaaatagcaaatttcagatgtttgttcatttagttttcaaaagaagggtaccttggcaagtcaggcttgcattctcttttttaaaatagcttttattaagatataattcacatgcagtaaaagttgcacaaaagtgaacaattcagtagttttgagtgtattcatagttgtccaaccatcaccataatctaattttagagcattttcattaccccacagagaaaccctatgaagagtacacattagcagtcactcccatcccccccacccctcaactctaggctaccatgaatctactttcagtatccatagatttgtctattctagacatttcatatacataaaattacacagtatgttgacttttctttgttgactggctttcttcatttagcgtaatgttctcacaaggcatctgttttgtggcatgaataaagacttcattcttttttatccactgtatggatataccatcttttgcttacttatttatcagttaatggacattttggttgtctccactttttggcttttatgagtaatgctgttgtgaatactcatgcatatgttttcaattctcttaggtagacacttaggagtggaattgctgagtcatacagtaattctatgtttaacattttgaggagctgccaaactgtttccaaaatggctgcaacattctatatttccatcagcaaggtaagagggtatcagttcccgcacattctcgctgacactttcctttgtctgccttgcattcttatcagacttacattcttggt

SEQ ID NO: 29805 - DNA, 2300 bp, Homo sapien
aaatatttattttgtggatctttgaaaaggtaatacaagacttcttttgatagtatagaatgaaggggaaataacacataccctaacttagctgtgtggacatggtacacatccagaaggtaaagaaatacattttctttttctcaaatatgccatcatatgggatgggtaggttccagttgaaagagggtggtagaaatctattcacaattcagcttctatgaccaaaatgagttgtaaattctctggtgcaagataaaaggtcttgggaaaacaaaacaaaacaaaacaaacctcccttccccagcagggctgctagcttgctttctgcattttcaaaatgataatttacaatggaaggacaagaatgtcatattctcaaggaaaaaaggtatatcacatgtctcattctcctcaaatattccatttgcagacagaccgtcatattctaatagctcatgaaatttgggcagcagggaggaaagtccccagaaattaaaaaatttaaaactcttatgtcaagatgttgatttgaagctgttataagaattaggattccagattgtaaaaagatccccaaatgattctggacactagatttttttgtttggggaggttggcttgaacataaatgaaaatatcctgttattttcttagggatacttggttagtaaattataatagtaaaaataatacatgaatcccattcacaggttctcagcccaagcaacaaggtaattgcgtgccattcagcactgcaccagagcagacaacctatttgaggaaaaacagtgaaatccaccttcctcttcacactgagccctctctgattcctccgtgttgtgatgtgatgctggccacgtttccaaacggcagctccactgggtcccctttggttgtaggacaggaaatgaaacattaggagctctgcttggaaaacagttcactacttagggatttttgtttcctaaaacttttattttgaggagcagtagttttctatgttttaatgacagaacttggctaatggaattcacagaggtgttgcagcgtatcactgttatgatcctgtgtttagattatccactcatgcttctcctattgtactgcaggtgtaccttaaaactgttcccagtgtacttgaacagttgcatttataaggggggaaatgtggtttaatggtgcctgatatctcaaagtcttttgtacataacatatatatatatatacatatatataaatataaatataaatatatctcattgcagccagtgatttagatttacagtttactctggggttatttctctgtctagagcattgttgtccttcactgcagtccagttgggattattccaaaagttttttgagtcttgagcttgggctgtggccctgctgtgatcataccttgagcacgacgaagcaaccttgtttctgaggaagcttgagttctgactcactgaaatgcgtgttgggttgaagatatcttttttcttttctgcctcacccctttgtctccaacctccatttctgttcactttgtggagagggcattacttgttcgttatagacatggacgttaagagatattcaaaactcagaagcatcagcaatgtttctcttttcttagttcattctgcagaatggaaacccatgcctattagaaatgacagtacttattaattgagtccctaaggaatattcagcccactacatagatagcttttttttttttttttttaataaggacacctctttccaaacagtgccatcaaatatgttcttatctcagacttacgttgttttaaaagtttggaaagatacacatctttcataccccccttaggcaggttggctttcatatcacctcagccaactgtggctcttaatttattgcataatgatattcacatcccctcagttgcagtgaattgtgagcaaaagatcttgaaagcaaaaagcactaattagtttaaaatgtcacttttttggtttttattatacaaaaaccatgaagtactttttttatttgctaaatcagattgttcctttttagtgactcatgtttatgaagagagttgagtttaacaatcctagcttttaaaagaaactatttaatgtaaaatattctacatgtcattcagatattatgtatatcttctagcctttattctgtacttttaatgtacatatttctgtcttgcgtgatttgtatatttcactggtttaaaaaacaaacatcgaaaggcttatgccaaatggaagatagaatataaaataaaacgttacttgtatattgg

SEQ ID NO: 29806 - DNA, 2300 bp, Homo sapien
gcgccccgctcgccgcgaagcttggaaagtgcacgcggccagcaccaatctgggccgctgactcggaaacatgtcgcagcgtgtgtgtctatgcacgcgtgtgagtgtgtaaatgtgcacgagtgtgaatgtgtatgatgtgtgtgcacgcggcatcggctgcccttggggagagttgactttgcagcctgggctgcgcgagaagcagactttgcagcccactccctcccctggaggaaatttgacacttagggcgggggtggggagatagccggagccttctctctcctagctggggaaaccccagatttccattctccaggatgcgccccccagctttgcagcgttttggggacaactgggccttgggtgtggagccctgcttagcaggcgctggggaccacataagcatttcctctttgagaagccccgaagcgtccaggccaaaggggcggctcacggagaaaaaccttggcacgcccctgagccccatagctttaccagggctgcctaggtcccctctgccccttttacggcacaggttccaagccaggctcttccaccgccttaaagaggctcacctttcttttcttttctgtggaaggggctccttcaggggctatgggcgatgcagtgcggcagggttagacttacgtgtaaggggatttttaaaacccgctcctcccacccgcacccgccacctactcgctccgccgccgcctacaggtggagaagtcaccagtggggaggaacggcagcggaagcttccaaggccaactcctacccctgaaattcttcaggaagggaaccttcgccgctgggggcctctttgccctggaatcgatgcgcccagctgcggctcggaagccagcgcctctggccccgtctggactcatctgcaagggctctggcctcgccccgcacccccacctttcggcactgaccgaaccaagtctgagttgggctggagaggctagactggaggcagggtggcagagttccaacgacaggctcgcagtgccgcgatggcaaagtggcccacaaccccagatcaggaccaagggaaactggagtctctctgggcctcccatctcctccctccctggcagctgccaggtgtggggtgggagggagagtgaaaaatcagaatttgggagaaagctgtggggagggcagggaagggatcttctccccggggaagcgagacccagactcccttctttcctctagggttccatcccttctctcagtccgtggaagaggccacaggcgacgcgggcgagggtggcactcttttccagtttccttggttgggagacccgacctctctctccattatcccctagggcccccatctccttctcccctccctagtctggctgaagaacgtccttaaggaaatccgggctgctcttccccatctggaagtggctttccccacatcggctcgtaaactgattatgaaacatacgatgttaattcggagctgcatttcccagctgggcactctcgcgcgctggtccccggggcctcgccccccaccccctgcccttccctcccgcgtcctgcccccatcctccaccccccgcgctggccaccccgcctccttggcagcctctggcggcagcgcgctccactcgcctccgtgctcctctcgcccatggaattaattctggctccacttgttgctcggcccaggttggggagaggacggagggtggccgcagcgggttcctgagtgaattacccaggagggactgagcacagcaccaactagaggggggccagggggtgcgggactcgagcgagcaggaaggaggcagcgcctggcaccagggctttgactcaacagaattgagacacgtttgtaatcgctggcgtgccccgcgcacaggatcccagcgaaatcagatttcctggtgaggttgcgtgggtggattaatttggaaaaagaaactgcctatatcttgccatcaaaaaactcacggaggagaagcgcagtcaatcaacagtaaacttaagagaccccggatgcttccgttgtttaaacttgtatgcttgaaaattatctgagaggcaataaacatctgctcctttcttccctctccagaagtccattggaatattaagcccaggagttgctttggggatggctggaagtgcaatgtcttccaagttcttcctagtggctttggccatatttttctccttcgcccaggttgtaattgaagccaattcttggtggtaagttcattctatgtgcgtgttcttcctcttctttttctttttttaagatttgt

SEQ ID NO: 29807 - DNA, 2300 bp, Homo sapien
actcaggaggtaaaggggagatgtcccaaggggagctttgagaaccttggattccctctccttaaggccgcacacgccctgggggaaagaaagcaagttggtgggaggcgggaggtgctaagcaggagcatctgtctctggcacttggtgggaagttcacactgccatctttgcgcgccaggaaggaggccagggctggggaagggtccagtcggctaggaaaattaaggaatgggaaggggctgtggagggtggaacggcatcgctggagcctgggcctgcgccctctggggtgtgggggtggaggtgggggaggactggaggaacaaaacaaaacagccaccacaccaaaacacctaggccacggatttttcgccttaaggtcaagtgcatgccaatggacggagaaaattgaatagtgtgtgtgtgtgtgtgtgtgtgtgtgtgtgcgcgcgtgtgtgtgtcttcacctttgacagctggagaatgcagacggcggaaaataactattacgctccagtgtgaggcactgtttgtggggtggggccctcggcgtgctggaggtagcggacacaaatccaccaaccctgcccctccggagtccccaaaaccacgggcatctggaagcgtctagaaattccggtgcccggaacccggttttgccaaacttcgcaatctcctcacctgagggcacccgccaagatctccgtggcaggaccacgcatcgcgcctcatgctctgggccggagccagatgagcaatcatgcatcccactacccaagtccctactactctggggactttgcaggaggtgagcgcctaaccctatccatcagccccagtgcttaagtatcctcccccagaggtaagaatgaggaggtcccccatgaggttccatgtcaaggcagcagtctccgtggagccccagtgggagcggtctgggatacgcgggcgagccaaggggtccaggcggggaagttggggttcagcctcccgccggtcggtggctctggaaggagcgcagacaaccaggcggcaggcaggcagcggctgcggagtggacctctctctttcagcagatgccgcgggggatggggaacttagagaaggggagacaaggagagtgtaccccgcctcccggcaccccagcccgtagtacggctttaaaatcctgcagagtttgtcataggccggcctcaccacgcatgcgcatagcaaagttgagttttttctttcttccccccccttccctctctctttccagccgcccctagttctgaaactttaaagaacttttttctttctttctttctttctttttttttttttcttccttctgagaacaccaggggaaagaggagtctggagagagggagggagagagtaaggcagttggccagaagggctggggggtgggagggggggacgcgtccccgcggtcggtcagtctgtttgcggggcacaggatcgcgtggaaatctgctgcgagctccacggagccgcctccgccgcccagagccggggtccgtgcggcagctgcccagcgagcccttccgccgccgccgttgtgcccgggaccgcccgcctcccgccggcccgctctcccgcccctcggacccgggcgccaaacgaggaggtgggcagcttcgccggccatggaccgccggagctgagtcgccgccgcggagctccgagctctcgcccttccccagcctcgcgcccgcggtgcactcgctgctcttcgcccttcgccctggaaaaacggggaaaagagagatcaacccgaagagagaaagaacgggatacgtggtggggggggggagcccgcgtctcccctgggttagtcgcacccctccagctcaccgcacagcaataagttccggggcgactttcacctattttgctccccgtttttgccgaaccctaaaatgaaaggacacaatttggggctgactcttgcagctcagatggcgacttgtgcgttttcagcggcatctcccggagaaaaagccatgcgcgcctgattgttctgtggccccaaagctgcagcgggggtgtgtgtgttggggtgtgtgtctgtgtgtgtacagagacgtccacactaactcgcggctgcaggatcagcgtctggaagcagacgtttcggctacagacccagagaggaggagctggagatcaggaggcgtgagccgccaagagtttgcagaatctgtggtgtgaatgaactgggggcacctgggcgcacagatcgccccccttcccccgccccgggccacagttgagtagtggtacattttttt

SEQ ID NO: 29808 - DNA, 2300 bp, Homo sapien
cacaaatacaggacatccagttacatttgcatttcagataagcaacaaataatttttttagtagagttcttggaagggagaaaaatgaatcagccttgcagatgtagaaagagctttcttttcaactctagaacatttgctgcaaaaattaagggaagtttactgtaacagttgcagggtcttttggagatagtagatacattctaaaactggtttgtggtgctgatcgcacaattctataagtttacttaaaatcgttgaactttacacttaccatggatgaccttgatggtatgtaaattttgcctcggaaaaactggtaaaaaaaaaattaagggattgctttatgccaactgttgcttaatttttaattctgagcttcaaactactttaagaatatggttaccataattctgctcctcagaataaagtatataagcatgaacaccaaattttgcataacatttctggacctgctgaataagtacttgataaataaggaatgacatctctggataccaacttctacctgaaccaggagtccacacaccattaaaatccttttcttgatgctgggaataaggcttacctggggcaaaagcaaggagttgctgttttgggaagtcttcagttgttgattatgagagtgacctcttgtgacacctgccactttgagactgcccctctctcagttcatgctgaaaggacatgggaaggacagtacttgtctatggtgtaagtggagccacctttttgggataagttcttcagtacagacaacatgttcacaagccagtgtgtagactcgatcaggaggcacctccaccaaaaaacgcacaactcattctcttgttttagtgccagctgaaactaggaagtgtgctgcacttctcttttatctctgttgacatacccaggtattctgagaaacacacttgaccaggatgaatgatttcagtagagaggggctgggatgggattgcttagccaggaagagtgtaccctgagaacttcattctctaacaagatttgaggactactcctccagatttgattactagactccagaagggacagtcctttatacagctcataagagtcactgtggacctctgctagaccctccagacaagtacttctattttctattattgttctaaatgttagctcttatccaaatgaaacaaaacaaaatgcctaaaagaactaggggaagagaagcaaggcccctcagagacacctttattcttgctctttctcctttcaagacatggttgctccctaggcagtcacatttctctggtgatggagagaaaggagggcagttggagattgaggggacagcatgggatagccgagacatgctgatagctggaggggaggctgcctgggacctgaagaagcagtgatgtcccagctccagtcatctgaactcccctaataggcctctccatctctccagacattagatcttgtagagaaagaaactgctagaatccaaatcttttcacacagtgaggcccccaaacagcccagccttcacacacaagccagcctgcttctcctgactgacttgatcaatacctcaaggtgcacagatgtctgtgcctggaagcaaagcctcattggaaccccactattctggaattcctgggctggtctcagccagctgcctgtgtgtagatacaactaattagctcacggagaggacaatctaactcaaagccctccttcccagcctaacaatgcttaaattagttcaataaattctgtcttctcattcaaaccaatcctgaaggagggacctctgccagctcactcttaattactgctggcatttgaaagcaagtaaatgccttcccttgaaaaatattctataaatccatcaattttgcttattttaaatgacttctcccacatttgtccaaataagtgaagctttaccatttttggctttttctgcagagtgagtgagttttaggcgtttactggaaagatcatttctgataacaccaacctcttccacatttttagctttgggttttgaatcccggaaacccagcaataaccttaaagttccattttcttacttgtgaaagtgagaagctgagcacccatgctggaactcaccatatagatgcctcactgcttttcatttctaagtttctcctccatgtctttttcctcttgccagtgtttagataaaattatttctatttgatacatttttcttcactcttgtccttaatgggtcaagtctcatgtggcttcatagccctgacagacagtagtattgctat

SEQ ID NO: 29809 - DNA, 2300 bp, Homo sapien
cagaagaggcagagaggtcccaagggggaggagaggagagacgaggctgtgataaaaggaaaggggctatgagccagggattgcaggtggcctctagaagctgagaatgatgcttagccaactgccagccaggaaagtcccacaaccagacggagctgaattctgccagtgacctgaatgagctggaaagtaaattcagcctcagagctgcaaaaaagattgcagccctgttgacacctggtgattttggcctcatgaaactcagcagagaatgaactgagccgtgttgtgccaaaattctgacctacggaactgtgagataataaatagatattttttaaagtcactaagtgtgtggtaatgtgttaggatagcagtagaaaactaatgcacagacgagttgaaccaacatctgtgtgtgagacttggcccacaggacaagctggtgcattttttactttctagcaactggagcagggtaagggcccaatgttataatatgaagaagaccagcttgcattttctaggtgcttacctcattttaggtgctgtgcacggtactttatgtgcatttcttaccttgttcttcacaacagccctacaaggatttatgcttttattgttattatccctgttttataggtgagggacctgattgaggctcacagaggttagctacctgggcaggtgtcacatggcttattaatggcagggctgggactcaaacccatgtctgtgggacatcatacccaagtctgtgcacataagtgctgtacttcacagtgcaccacgaccccaattaaatatgaagctaatatgtttccatatacaaaattgctgatatttaaactcctgctaaacactcacaactaagaatgcctttcatcacataaagccctttaaccttgttttaatgcccttggaatactacaccactaggtgctgagcaaggagaaaaaaaatcaaatttggatggtcaaggaaataggagactcccacgccacccccgccccaccccccaggttctgcaagccaaagctcagagcacactcttacatttctcttcaaatccttggaggtctcacttgctctagattgtgtcaaagattgtgccccttccctgcaccaggcactcaattccaggggtggaagttgtgatggagacatttttataacttggacataaagatcaggagccaaaaggaatatcaggtggaacaaatgctattgcttacattttatctggaggtgggggtgcgggttgatgtgccaatttgctctcagttgcatgtacagaaattgtgacctcaaattcagccaatggaaagtctgagtatgaacattcacattgttcagacatttaacaaatatgaactgagcttccataatgtgatggggtttgcatgagaagctaatgatgcagtaatgaataaggtgagttccatactcatagatcttccaggctccattactccaggctaatgaaggaagcacagaaaagcaagcaatttcaggatagtataataagtgctgtagtggaggaggcactagatgcctagagcaaatatgggagagacgccataccgagattcagaagccagaagtagtgacccttgagctgtggcctcacggataagtaggagttggccaggtacagaggcggcagaggagaatagcccagccccaggggatgtcatgatgtagatctgatctgggagcctacctatgtccataaatacatctggagtataggaggcaaacaggctatcggttgagactgaggtcagaaagcctttctgctagttttttgaagagattgaacttaattataaggggacttggaaaccattgaaagaaaaggctgagcagtggcatggacggatgtgggtgctttagaaggacccctctggtggaagagccaagaattgatggaggggagtgagtggagcacagagactattgggacctgagagaggtggtagggggtagaaaggaagggtggggagatcagggatggggaaaagcagcgggattccagagctatctgaggaggaggggccacggggtttgttcgtctggtggagggagagaagggagcccaggatgacagacagccaggcctgatttggccaaatcatcatgcaaatattattctgggctgacaggcccaagttgcagtcagcagaggcaacacgggcttataatttgccatttgtgaatgtcctgaggactggagaatcagctaggaagcaaatcttccttctgctgcataagacagccaaaagcacctctgaggatag

SEQ ID NO: 29810 - DNA, 2300 bp, Homo sapien
ttccacagacgaagaggtgtggggtgtgggggatggtttaggaatgaaattgttccacctcagatcatcaggcattagactgtcataggagagtgaaccccattgtgaactgcacatgtgagggatctaggttcattagattctatgaaaatctagtgtcactgctgatctggcaggaggtggagctcaagtggtaatgcttgaccgacactcacctcctgctgggtggcctggttcctaacaggccctggaccggaactggtccaagggttggggacccctgttccatatgatcttatttaattttgatttgttgtagtaaacataacatattcctttcccacatcaaggggactgacaaagagttacttcatacatcctttgccaaagggatcaggactgatccttgaagagttagttcctggattgttctaaccctggctttgacatacaatcaagtgttaaggtgtctttaatgatccagaaaaaataaatcatggtggttgtcttagttcattcaggctgctagaacaaagcaccgagactgggtggcttataaacaacagaaatttatgtcttacagttacagaggctggaaagtccaagatcaaggcatcagcagatttcttgtctgatgagagatcaatcaatgcttcatatatggtgccatcgtgctgtgttctcacatggtggaaggggtgaatgaattcctttgggcttcttttatgtagcaattagtcccattcatgaggcactttgccctcatgacctaatcacctcctaaaggccccaccttttaatattattgtattggggatttgatttcaatttatgaattttgagcaacacattcagaccataacagtagtatctgctgaagtggcagcaagataattgtggcaaagggtcctaatctttttaatatatatatccaataaaaaaagtaaatgctttgggagtaacttattgaatgtcattgtttagctgagaacaagactcttggaaatctcatagtctgtcattgtcgataattaaggacaataatccttcaaataaagtgtttgtcacagttgcattttaagactggattagtgtacatttataaacatggttgcaaatatggtgttgtatatcaaaaaagtacaatttaaaaatgctacagaaaattaactcaaaatggtattctgatggtcttcatattctttttgttgtctcatttcttttttaccaccccagtgatatttttctatgatctaatctgagtagtctagaaatagacctttctttgcacatgggcttcagaatgttaaattaaaaaaaaaacttatattttcttttttattaacaacatttgaaagcaggaattatattttttttaaattttagagctgagttacaaggaggaatttttttttgtatgctttgtctttttctttttttttctttaaaagtatttggaaagcagtctcatgaggctggagcatgggtgtttcatttctatcttattttcttcctccagcagcatgagtgtcctcttggcaacatgtatttttctaatttaggagtgtttctctacatgtcaatcttgttcctctggatgtccatggcatggctcattgtgttctccgtatttcaggacgatgctgcaaagcttgagcagtattttatcctccctggactctcagagagacatgggagtattgatgtgctttgtttccaagcttagacaaacatgttgtagtagggaaacaaacatggaaacctactactatttcataatgtcttatttcaaagaagtcttattttttttttaaagtatcactattgagatgtgcacacaatagggctttaagaaggatgtaggctgttaaaatgcagggcagtgaggtgccatgagcagtggttccattgtgccttgctcagtaaacatgctgctgccctgcctcctcaaagggcacaattgatggttattgatgacctttctgtaaaaccacaaccttctgtctttttcctgatttcaggtagatgcgctgagattacgactggaagaaaaagaatctttcctcaataaaaaaacaaaacagctacaggacctcacagaagagaaggggacactggccggtgaaattcgtgacatgaaagatatgttagaagtgaaggaaagaaaaatcaatgttcttcagaaaaaggtgagtagctgacataagaccttcaagtggggtatcatccatgttttgtcattttagaaaaattttgagcacatggaaaataagtgatcttttacgaatctttaggaagaa

SEQ ID NO: 29811 - DNA, 2300 bp, Homo sapien
agaaatctgttgagaaccatgaatcttctctctgtgggaaaaatgtacataagcatgtacataataaattgatcccctgaatgtcaagggttccttttaaaacccacggatcaaaggaaaagagaatgggtggccaaccagagtgaacctcaggcattgatttaaataaattcttcatgggatcaccctggtatgttacccaacttttctgaaagttggtaaacatcttatagaatatttgtgagaatagttgagaaaatgtaagtgcctgcacagaggggggtactaaaaaatgttggccacgtttcaaaagatgtgggattttaggaattctcaaaggactctcaacaaggctctcatatacaacaagccttttgagcagaggctgtcaaggatgtatgtggggaacaaaacacaataggtggagcttggttttgcccctggagcatctaggtcaggagaatgagtgttgatttctcagagagagaaagaagaggatgagggcaaagagagtctatgaaaaaccttagctaccagaggtgtacaggcttaaggaacaggcatttgggctggaacaggaaggcatccttgtctctcagagtctgattccctgagcaggaatcatttaatatttgaattccggcggggcgcggtggctcacgcctgtaacgccagcactttgagaagcttgaggtcagcggatcatttgaggtcaggagttcaagaccagcctggccaagatggtgaaatcccgtctgtactaaaaatacaaaaattagctgggcgtggtgatggactcctgtaatcccagctgctcaggtggctgaagcagggaattgcttgaacccaggaggcagaggttgcagtgagctgagatggcaccactgcactccagcctgggagaaagagcaagactctgtctccaaaaaaaaaaaaaaaaaaattgaattcctatcggggaggaaagaaggatccatcctctaatcgctgtactaattctatgcctctgcgcacccaaacatcccatggctggatttgctttatttgtctgagcttcccagcaggagaaatttagatctggccactgaaattgctggaagcagactcatcaggacaggaaggaaatgactgctctatccctgcaaattgactactcagtgaaagagaccaagtttaaagatgcccatggctatcccagtaccctccctaatataaaatggcagcagctggggctccagacttgttgagtggaagctttttccaatgaaaaacttgtccaaatcctcttgctcattaccttgaggtgtgtgtgtgtatctgcctgtgtgcgcgcgtatcaactcagacatcatctttctaccttaaattgggacaatgcaagcacatttcagggcacagaagaggcacccagtgaatatgacggatgcgatcttttctcttgttcctgtctttatctttcattctgtcctttctttgggggaacaataaagtgaagatcttatgaaattctttcaacctcctaaggaacattaaagctgatggacggtgccagggtatggtaaccacgaccccttactccaatgcttaacttaaaagataagtgccatccctgcccctgtcaccaaagccacctgacaagttcccagtgtgcctggcagcttttggaggggggtacccgggaaggggcgtcggggatggaagattggggacaggtgcttcgcgccgcggcctgccgggaggaggcgctgcgaagacccccgcccatgccgggcgctttctgctgcccccagcggaggcgcccgggccccagccccgtcccccctagcggctcctcgggaatgctgggaatgtgagtcagggcctctgcgagcgggcgagcgtgccggccggccgggtgggggccccgccgagcgcagcgcctggcagcgccgcgcgagcgcgcgtctcgggactgcggcgggtgccgccccctcggccgccggccccgcccggccccgcgcctggccctggccctccgagcagtgtcctcctccttcccttctttcctccctccctgttccccgccccgcttctcctcctcttcctccgcctcccgctcctgctcgctcggtctccggctccggcgccggctcctgctcctcctggccgcccggggccaaggcgacgagaggttgtaaaaatccatgtgggacggccccggggcgagcatcggaaaggtgagacgccgacgccggggccggggccgcctggtgcccggctccctcggggcgcccgtgcccgggcattcctcgtgccgggtc

SEQ ID NO: 29812 - DNA, 2300 bp, Homo sapien
gttgaaaagcagtgataagaagagacattcttgccttgctcttgttcccaatctcagtggaaaagttgcactttttcactgttaagtgtgatattgggctctacaggatttttttaaaaaatagagatagagtctcaccatgttgcccaggctggtctcgaactcctacactcaagcaatcctcctgccttggccttccaaagtgctgcaattacaggcataagccaccacacccggtctctaggagattttttgtagatattgcttatcaagttaaggacgttctcctatattgagagattttaagaagcagagtgaattaagcagattcacattttagaaatcattctggctacaggctcacgcctataatcccagcactttgggagtctgaggtgggaggactacttgaggccaggagtttgagaccagcctgggcaacgtaaacagactctgtctctacaaaaatttttttaaaaattaaccaggcgtagtggtgcatgcctgtagccctagctacttgggaggctgagacaggaggatcatttaagaccaggagttcgaggttacagtgttatgttcgtaccaatgtaggcggcctgggtgacagagcaaaaccctgtctctaaaaaaaaaaaaaaaagaaagaaaagaaaaagaaaaagcaagtgttggggtgaagaaattagaacctcatatacattgctggcagaaatgtaagatgctgcaactgttatgaaaacagtttggcagtttctcgaaaagttaaccatagaattaccatgtgacccagtaattccactcttaggtgtataccaagaaaattgaaaatagggattcaaacagatacttgtacatcagtgttcactacagcattattcacaataactaaaagatggaaacaacccaaatgtctattaatggatgaatgagtaaacgaattgtggtatatatatacatagaatggaatactattcaatcataaacagatatgaagctctgatacatcctacaacatggatgcaccttgaatacattatgttacttgagagaagacacaaaaggacaaatattgtatgattccacttttatgacatgaagtatctataataggcaaattcctagagacagaaataagattagaggtttcttaggattgaggggagaggaaaatgggaagttgttgcttaatgggtacagaatttttatttgggggtactaaaaagcttttggaaaaatatactggcgtattccacaacattgtatcatggaattgtcacttgaaaatggctaaaaatagcaaattttaacacacatattacaacaataaaaaataaaaaagtaaaggtttgtcaggcatttaataattaatacctttcattgtttttgtctggaaagagtgtgtgcaaagatacttaacaaccaaatgtaatgtgtgatccttgatcggctcttgcattttttttttttttttttgagacggagtctcactctgtcgcccaagctgctggaatgcagtggcgcgattggctcttgctttctaaataaaatgcctataagatattcttaggacaagtgggggaaattaaatcgggaagagaattattatgaaattaatgatcttaggtataataattgtactgcggttatgtagcagaacatctattcttaggagatacatgctgcaatgttaaagggttaagtgttacaatgtctgcaatgttaaagggttaagtgttacaatgtctgtaacttacttgcaaatggtgaccccaaaaaggtgtgtgtgtgtgtgtgtgtgtgtgtgtgtgtgtgtgtgtgtgtgtgtgtgtgtgtgtgtgtctgtgtacgcgctttggaaggctacaattgcgagaagcgcaggtctccgccaccgaagctttagactcataagccgggtcaggccaaattccgctgtgcgtaggggaacaaacggcacaaacggggcacaaaaggggaacaaacggcatacgcaaccgtccccgcgggagccccggcccagctcagcgcacccgccagcatgccccaccctgattggtccacttgctcagctcgccggcacccctatatccaattggcgtagcgcttgctgagcggcggcggcaaccgacgtacacaaggggcttgagcgttctgtggagagagtgcgaggtcaggccatgaacttggggtaagcaggggtaagctggggtaagctggggtaagcaaggtggtcgtcagcggagagggaggcatgtgtgtctgggttgtcccttggagtctttactggagaacgttcc

SEQ ID NO: 29813 - DNA, 2300 bp, Homo sapien
attgtaactttggtttttgtttgtgtttttgagacagggtctcactcttttgcccaggttggagtgcagtggtgcaatcatagctcactgcagtcttgacctctgggcacaagttgtccttccaccttggtctcctcagtagcagggactacaggcacgtaccaacacatctggctaatttttttgttggtctgtggagacagggtctcactatgttcaagcgatcctcccacctcagcctcctaaagtgttggtattacaggtgtgagctaccatgcttggcctcctaattgtaacattttagaataaaaatggatatgtttttaaaggaaaaataaccagaagttgaacatttctattattttgaattgtgaagctatgtatggaaatgtcagaccttcacataaagttagcaaagagagaagcttgagaaagttttattatttcacatgatatagttctcaaatgttatattggtttggctttttctgttgaggaggtcaagatgaattattacagcacaaagcaaattacctatgtgcttcatttttatctactcctagtttttttgcttcatttctaagcaataattattatatcaataattattctaggtatgttaagagaaatgattggcctatcattatccacttaggaacatacatttgcagaataattggctgggattgatgatacaatttgtgactgttagagatctctgtgttaaatggcctttttaaaaagtagatacctagttggctaggagaaccctaagtggtgcagacaagataggtatgtatggtggtggtaccatatttgagctaacctaacaaaaatactcacttgctaaagttttaaagtgtagagcactttaaacattttcttgccttttgctgcagttttcccacttggcaaccttcactccaaaattggctggtaaagggacacatggtctgggttccagtttcattgagttgataggctgagccagttacccctaggtaacatgaggaaatcagtaaagtatcatttgaaccgcaagaaatggtcataaatcttgtgtttaccttttaaaatctatttttaaatgtaataaaagtttttaaaactttgaaaacttttagtataaatttgaaatgggtaaaaagagttatatttgtgattgaatacagctgtagaaaaagatgttaaaatgtaagctccaaaagggcaggaactttgccttgttgactgttgtacccttagtgtctaaacaagtgcctgatacataggagaagcttagaaaatgtttactgagaggaaatagtcaagtctttgtatgtttaatagatgaatttagtaacacatcaatattgacaggaaatcatgactctcaagacaaatgagctattccagacaatgcagcgagcacaggaactggcacagagactaaaacaagaacaaagaatccgagaattggcgcaaaagggacatgacacttctagactgattaaaaatcttggtggtaagggcctaaccagaactttatttataatatttttagaagatgattttaaataattcctttttatctttgtttggagacaaggactcattctgttgcacaggctagagtgcagtggtgccatcacagctcactgcaacctcatattttttgtagacatggaatctcgctttgttgcccaggctggtcttgctgccttcagatgactctcccaccttggcctcccaaagtgttgggattacaggtgtgagtcactgcacccagcctaaatgattgcctatttttaataccttcaatatacctactattcttgtaggaatatcagactttaaactagtataattttataaataggaatgcttaatttatgtggaaaattgcaataaaagcagaactaaaggttaaaatgtgttaatgttaaaataataggtaaaatgtgtactttttgtgtctatttttaccgagaacaattattaaatgatctccctaaattcagtaactgataggaatgtgggtactttttgtaagaaaatttttattgcagtgttcattctgattaagtgaaaattattgtatttagttgctgctatacataatttttattaatattccttaagtgttgttttatcaggtgatttctctttgccagttgatacaatacaaatggaatataatgcatctaacatttcaaattcaagacatgattctgatgaaatcagtggtaaaatgaatacatatatgaattctacgacttctaagaaggatactggtgtgcaaacaggtatttgtgtggaaa

SEQ ID NO: 29814 - DNA, 2300 bp, Homo sapien
caccttgcctttttaaagaagttaatttttcattttcttatttttagtattatttttatgagtatggctttgatgagctaaggcgaagaccaagacacgtttgtccatatgcagttgtgtcttttacttacaaagatgatatacaaactccgaagtttgtaccttcatcaaggtaagacttaggagttttagacatcatccgcagtgataattctactacagatcctgtactactgagttaggaggaccattttgtttccttcccatttttttttttttaacttcccttgaagttggttggagactgaagtgtttacaatgacttttaaatggtcggtgtgaagaacagacagtttaccatgtggaaataaatacaagctaaaatttaaacctcatctcgctaatctcttccttagaaatgaaggtttgtgtagttgagtaagtggcaggttttgtttgttttgagatggagtctctctctgtcccccaggctggagtgcattggcaggatctcggctcactgcaagctccgcctcccgggttcacgccattctgcctcagcctcccgagtagctgggactacaggcacataccaccatgcctggctaatttttttgtatttttagtagagacggggtttcactgtgttacccaggatggtcttgatctcctgacctcgggatcttactgcctcgacctcccaaagtgctgggattacaggcgtcagccaccgcacctggccagtaagtggcagttttaaaaagtgagattttggccaggcgcagtggctcatgcctgtaattccagcactttgggaggacgaggtgggtggatcacctgaggtcaggagttcaagaacagcctggccaacatggtgaaactgtgtctctactaaaactacaaaaaaattagctggatgtggtggtacgtgcctgtagtcctagctacttgggaggctgaagcaagagaatcgcttgaacctgggcggtggaggttggcagtgagctgtgatcgcaccactgcactacagcctgggtgacagagcaagacttcgtctgtatttaaacaacaacaacaacaaaaaagtgagattttgtgtattagcacccttggaaatggggagcttctacaaaggatgctcatgcctcaccacaaaccaatcaaatatttagtgggcagtcaaggcattgatagtttttaaaagcttccaggtgattctgattttcagccagtgttgaggaccctctgtttctttttttttcctctttagagacaaagtcttgctctgttgcccaggctgtagtgagtaaagcggtgcagtcatagcttgctgcagcctcaaacccctgtgtgcaagcgatcctcccaagtagctgggactacaggcatgcaccatcatgtctggtttatttttagttttcatggaaatgggtcttgctgtgttggccaggctggtctcaaactcctggcctcaagcagttctcctgccttggtattccagagcactaggattataggcatgagctgccacacttggcctgatgatttctttccttttttttggttttctgttcttgtgttactgagtatttcttaaaagctctagtataaggtgaccaaataggaagcagttaccattttttttccccatgtgttgattctaaaaatgctttagccaaatggaataagtatatttatagggatgtaggtgagatggtcaaatgtctgctcattttttactttgggtgtgtatacatatttgaagtcatgtatgatatctattaatttagaaatactgctgttctaaaaccatatatcatgaaacatatatgtacatttttgaggttgacctctttgtcagttttccagatcaaattatcttctcttccatttacggtccttttatgtaggtgaataatccttggaaaccatctatagccacaggtaccaattgacatagtatccagacagttgtggctttcattttttgtggctctaaatttatgatcactgtgatacatactttcactacagtgttttcataagtactctttaaaagacatccagcacttaaaattatgaggtcatgcccccaggaataatgactgttaatttctttgcctcctctttgattccatctcttgacctctatatcatttcaaaggagcattgagtgaacatccatccttgtaccttgaatattccatgaatgctcctgcttcagggcctctgcatttgctgttctctcactttccccagtaagctgcataattcattctacatttcttcacgtatttcct

SEQ ID NO: 29815 - DNA, 2300 bp, Homo sapien
ttttaaatgcatatctattttatagataggaaagccagtggtttaggataacttatagttccaactagttagaaaaagtcactcttccatcctataaatatgtatggagcacatcttatgtgcttggcattgagaatacagttacagagaaaagaagcatttttcttgtcctaattgagtttataatctagaagttggtcattcagcagatttattaaaccacctgttggatgcagtgtaccatgttaagtaaaatggaagatacaaagataattaaagcatgaatttataatctatgggagagttggaatgtggtaaaattataagataaatttaaagattggtgagcattagatgtttatttgactatattaatattatatataaagagccagttaaaataggggaaaaactgaaggacagagagtatagagagatagagattatttttccattttggtaggtgtgagatttcttggaaaaaaaaataaaacttgtagcttgaaaaacataatcacatgctaagtagttgttatagttttaatttcatttagtttacagaaaagcgaagagaactgaagtttgatggtcgtttagataaggaactttcagaatcctatgcatttctgatggttgatcgataccaggtgagttaacgcattttataaaaaacaatttggggatgtttccattgtaagttactaattttgtgattattcaacagtattctttacaattacagacttttttgatatataagtggaatacatgatttaatggggcaaaatgtttattgtttgtaatttgtttttcaaatgtactcagttttttctctgaccagtcctattttcttcccctagaatgtgcttgataataatacttttctgtttatttatttatttttttctgagatggagtcttgctctgtcacccaggctggagtgcagtggcgtgatcttggctcactgcgacctctgtctcctgagttcaagcgattctcctgcctcagcctcccaagtacatggggttacagaaacacccccccacacctggctaatttttgtatttttagtagagacggggtatcaccatgtgggccaggctggtcttgaactcctgacctcatgatccacccacctcggcctcccaaagtgctgggattacaggtgtgagccaccgcgcctggccttttttctttattaagaagactgtcttctatattgttgattatatgtgagattatcttctatattgttgattctatgtgcctggaaccatttttccttttttttttttttttttttttgagatggagtctcactctgttgctcaggctggagttaaatggtgtgatcgcggctcactcactgcaacctccttctcccagatacaagtgattcttgtgcctcagcctcccgagtagctgggattacaggacacgccaccgcacccggctaatttttttgcgtttttagtagagttggggtttccccatgttggccaggctggtcttgaactcctgacctcaagtgatctgcctgccttggcctcccaaagtgctggtattacaggcgtgagccaccatgcctggtctgttttttccccttttaatcgaagatatttaggtggaataatattttgctgtttctaattctctttgaaaagaattggttatatatattgagtggcaggagttaagagtatctgtcacacctggcatgaagaaaaatgattgaaaagtagccaggcatggtggtgagcacttgtagttctagttacttgggaggctgaggtgagaggatcacttgagcccaggagttcaaggtcatgccactgcactccagcctagagggcagagggagaccctatctctaaaaaaattaaaatgaagaaaaatggattctagatatggttactttgagaagtgtaagtcagttttacattaatatttataaagtggcaaatatataagatttctgtgatctagaatgatacatagttaagaagctttgtttttatttaaaccaagtttataaaattattttttcatgttttaaatgttgttatgactgcaagatgaagtatttttttttaaatttaggttcaaaccatatgtgaaaaaggattacatgtgggtcagtccaaaataacaattcttggcagtccttccatgggtaatcttttttctttttaaatataaatatctactactaagttgctgtctaaaaatacattgtctcgtaatttcactgcagttgttattaaattcatgctttattatgttcccagaaaaagactag

SEQ ID NO: 29816 - DNA, 2300 bp, Homo sapien
tttaaatgttttaaaaattaagtggggaccgggcacggtggctcatgcccgtaatcccagcactttgggaggccgaggcaggtggattacctgaggtcaggggttcgagaccagcctggccaacatggtgaaaccccatatctactaaaaatctaaaaattagctgggcgtggtagcaggcatctgtaatcccagctagttggaagactgaggcaggagaatcgcttgaacctgggaggcgcggaggttgcagtgaaccaaaatcgtgccactgcacttcagcctgggcaacaagagcgaaactccatctcaaaaaaaaaaaaaattcagtgggatgtagaatggttggggatgtggaggataaaaacttaaatgtcctggctgggcacggtggctcatgcctgaatctcagcactttgggaggccgaggcaggtggatcacgaggtcaggagatcgagaccatcctggctaacacagtgaaaccccgtctctactaaaaacacacacacacaaaaattagccgggtgtggtggtgggtgcctgtagtcccagctacttgggaggctgaggcaggagaatggtgtgtaccttggaggcggagcttgcagtgagccaagattgtgtcactgcactccagcctgggtgacagagcgagactccatctcaaaacaaacaatgtcctactatgcgtcagatgctatgcttagagctttttccacgtgttgtctagtgtggcatgtggcatatagtggttattagagtagctggagtttgccattttacatatgagagagctgagctatataagtaatttatttacctgcattttactccaagccagtaatgctaggtctggtatttgtgtccagctttgactctaaagccccacatgttttcattttactaagttgtcataataaatgttctactactttttgtggattatacaagaagccacgtgagtgcagcattttattttttatttttatttttgagacagggtctctctctcactcccagactggagtgcggtgggagaacgtggctcactgcagccttgaactcctgggctcaaaggatcctcctgcctcagcctcccaagtagctggtactacaggcatgcaccaccatgcctggctaatttttttttttttttaatggtttgtagagacagggtctcactgtgttgcccaggctgctctggaactcctgagctcaagcagtcttgctgccttggcctcccaaagagctggaattacaagcatgagccaccaagctttttttttttttttttttttttaaacttaaagaccagtgtgtcagtaacagcatattttgttacttcacataacgtcttaaatgcttttatggtctcatacatggtataggtagtttgctgaaatacacagtctgagacatacttcagtgtaacataaaataggagctaagttgagtataaacacaggttcttttaagagtctttaagcaatttaggttgcctaatatagcatgcctaaggtttgcaaaattgcaccttccttgtctatgtatgtaatgccagatcctcattgttgaaggaactggtgtatgtaggcaactagttttacattttttttcaatgagttaataagtatctcttttgcgtatcacaaagtaagatagccttgatgccttttttcatggtatttaaagttacattaacccacaaaaatataaaaagctatatttaagatggagtaatgttaaacattttaaatgtttgtttttttattttagcacttttccagccattaactccaggctctcgagaatttgaagatgttgtaaatattctccattcttcttaccttgaaccaacctcagtaacaaattttaactacagacgtgcttgcttggtacacaatgagcttttggaaaaggaggtatgttttaaattatacttactgtaagattgttttcagaaccagttaacagcctgggaaaaaaatgttctctagaaatactaaaatttttaggaaaaccaaattacaaagggaaaacaagtttttttttttttttttttttttttggagacggagtttcactgttgttgcccaggctggagtacagtggcgcgatctcggctcactacagcctctgcctccctggttcaagcagttctcctgcctcagcctccaaagtagctgggattacagtcatgtgccactgcacctgcctaattgggaaaacaagttttaaatgacatctcttttttccaccagatgttgctgtagcattacatttatctgctgtgttaaat

SEQ ID NO: 29817 - DNA, 2300 bp, Homo sapien
taaaaatgagcttttagggatgccttcaatgaatcaacaaaaaagaaagttaccaatttgggactgcaatgtgagtttctgatcttctgtactctcttttaaatcaagtaaagcccttcccccaactaaaaaactttttcttaaaataatgtatttttccctcaacctagacctcagtttttcatttaaacatattttaaaatgtgtgtgtgtgttttgagacaaagtctcagcccagggtggagtgcaatggtgccatctcaggtcagtgcaacctctgcctcccgggttcaagcaattctcaagcctcagcctcctgagtagctgggattacaggcatgtgctaccatgcccggctaatttttgtatttttagtagagatggggtttcaccatgttggccagactggtctccaacccctgacctcaggtgatctgcccgcctcggcctcccaaaatgctgggattatgggcgtgagccactgcgcctggcctaaaatgtgtttttaaactatttactaataatggatttacactctctttcgtatgatttactaaattgtttcgaataggttgggcaattcatgatttttttttaatatcagctgttaaacagtggtaatgtttattagaggacaaaagaatccaactttcgtgttgcccttaggaatgctctttaagcctggggctttattatgatgataatttggtctgtaaactccttgggagacagtttgagactagagatctgggtctcaaacctgatcctgctgcttggcgaccctcaacaaaatgtcagccctctgttgcttcgtccataaaatgaataaaagtgcacagctgctgtgaaaattaggtcttagagaagcagtcagtgcagtgcttaagtacttactcggagagttaaatagacccggtttcaaatcttcggttaccataatttgtccagtgtcttgcaacgcttctttcaaattctgcaaactagtatctacctcatgtctgttgctgtgaggattaaatggagacaatgcacgtaaatcacttgtccagtccgtgtctagcacgtagaaagcactcagtaaatattggctgtactcacgataacccgtgatagtttatactgataaggtagaaaccactatgtaaagggctcttaactatgaagttgttccctttatgggagagcgacgacctgctgtgtattttttaatgtgaccgcaagtttattttttctttaatatacatttactataggaaaacgttgatgaacgttccagtggaagaaacagtggagttagaggtttatcagtggccagatttttaacagaagtaaccatagaaagggaacaaatggaggccaggtgcggtctccatggcgtgtggtgggggggggtgcgactaaaggaaaaaaatgggaaaagttaacagcctcctcccctcaaactccccagaaccaaatcctgttaacactaggttgttaagtcccatcagaggatctcaggtgaaagtgcttgctggagctgtgacactgggtcacactctctgagataaaagagaaggccgggtgcgagtaatctatcataaagatacaagatccggtgagaatagcaggtcgcaaaggctgtcgaggcttttaggctattaccgcctagcccattcttttatctcctctccaggtttttgtacacatgcaaatagttcataaaaccgagatcgtcccgcatccactgctctgaagcccgtttgggccgagataactcgtgcgcagaggaagggttttgcccacaaatgggcgacgcctgcgctccggagaagaggccaagctagtctccctcgcctgcagcgcggcgggggaatccccgggaacccgaagatcgccaggggcccacgcattccgcaggccacggctgcggcgtcgaggtcctcgcggggcgttgcggtcgccccttttggcgggctcgggcgccccgaaactccgccccccggcgcggtatttccgcactcgcgcaggcgggtgccgcgctcccattggtggagtggcccgcggtggccccgccccctcccggccccgacgcgcgcacgttgagtggcgggggaaggcagaagaactgcccgagggaggagcggctccgaggaccgggcagcgcatttggggtgcccgctacagggccccccaagaggctgccaggtcgggagcgcagcctgaggccacggggggaagggggtgggtgggctgagagcagctcggcggcgagactggcccgccgccccttccccccacacccgtcgaccttgtgggca

SEQ ID NO: 29818 - DNA, 2300 bp, Homo sapien
cccacctcggcttcccaaagtgctgggattacaggcgtgagccactgtgcccagccacttacaacttatttaacaatgcccttatgttgaatagttccttttaaaatttttctttactttctggaattttattgttgaatctcaaaataactgggaactaccttagaatgcctttgtgatgaaggctcatatgtcataagcaaattcaattcctgacctcaggaagtttctagttaagagcaggtgaccaataattataatcaagtatgatcattgctatatcagaagtatgtctgaattgctctgggggaggaggatgggagaatgttggtgaagacttcttagaggaggtgctgtttgagttacatcccgagggcagttaagagttagccagctatggccggacacagtggctcatgcctgtaattccagcacttcgggaggccgaggcgggcggatcacgaggtcaggaaatcgagagcatcctggctaacatggtgaaaccctgtctctactgaaaatacaaaaaattagccgggcgtggtggcgggcgcctgtaggcccagctactcaggaggctgaagcaagagagtggcgtgaacccaggaggcggggcttgcagtgagccgagatcgcaccactgtactccagcctgggcgacagagcaagactctgtctcaaaaaaaaaaaaaaaaaaaaaagccagctatgaagtgatggaaacacattccaggaagagaagattgtttgaagggagtacagagggatggcaaagcatgacatatttagggaatgacagatagcctagtatggttggagaaatggaggctcatggatgagtggcaggatgggatcctaaatatggagactgtggtcagattacaagagacttcctgtgccaagatgaggagttgaaacttcctgctgaaggccacagagagccatggcagggaacacttcctaaataacaatgtggttttggagcacagcaacctcattgctttggcaaagtctccaataagtgtgatgaaatcttctaggatgaagactgaaaatgatgcactcagctttcttctggatcatttgtatttgtcatgaaaagcattttggtagcatgtttaagtcacacaggtggacttctgcggcctctttgggaaataggaaaatacctcagggacaggaatcatgtgctgcaaagatggtatttagtatgtgtattagtcaggacttttcaagttgacagaaccccaactgagataatagaaagggaaatgtctttctatatgtaatgaaaatgtctaagggtggttctttctggtttcaggcacagtgggatccagaggctcaagcagtattggtaaagcttgctcccttcctgcctccattggtcactccatccttcattctgggtctctttattctctcctgtagcagacagatgcttctgtgtaactagggagagttgctgctggaaggccctgcttgtgttctctcttgaactcacaatcccaaaggaatactctttcctcctttctcccgtaactcatgtgacaaatttcagggaatcacatgcccatccctgaactaggatggtggaatactctattggtcaggtctgggggtgcccaccaaaactatatgtaataggatacccaaagttagtgggattctatttatagaaggaggagagtaggagtactggccaaatgtttgaataaataaaggccatccactattgttatctctggttcttttaaagaggggagatgtccactggaaaaaagtagagctcatcacgtatccaagaactgccttcatgcgtgagtttggcctgatatgtgcttgcactatagtccacttggtatccaggtcacacagaacagatactcccagcacatgttccaaagcagccccctgtccaattttccttagcacgtaggctcaagacaatgccccacttcccaaaggccttgtggcaatgtcctctttttctttcacatatatgatttatgttccgtcaacgacaggaaactgctcaaagatccacccagtcctgccgctgcccccgtgatggtttgtttttctcattgtttagcgctccattagcttccgcagtgagagccgccctgacatcctcgccccccgaccctggtccagaaatgccgccccctcgagcacgaaacggagagatagcaagctgtggagtgagaccttcgatgtgtgcgtcaatcagatgcttacatccaaggaaatcaaacgtcaggaggtaggctcggggcccatggagctggctgtgtgtc

SEQ ID NO: 29819 - DNA, 2300 bp, Homo sapien
gtctcagggcagctgcagacatgacatagatgatattcctactattcctcaccccactctggctgcaaaaaggaagtgcagggaaaatgagtggggagttcctgtatgccagtctgtttcaatggaactatttttggaggaataaaaaagtatgctagattatattggtacgataggcattttcttacattgcatatagtctgctttggcttttacctgttgaggggaagaatgaggagaggataaaaatcattgtatcccctagagaaggaatatcaaaatccatttaataaaaaaactcatactaagaataaaattgcatagtgttttattctcctttgttcataattaaacacaagatattttaaattgtcaaatcagtttctttatgaaaaaatatgacctgtatgcctttattctctcctttccttcttcccacccgtcgcttcttttcttctcttcctttttttctttccttgtcctctgactaaatgaagaacaaacatttgataaaagccactgccaattcatgataaaaattcacagcaaagttggtacagaaaagaactttctctgcgtgttaaagggtgcctctcccatgctctcagcaaatatttaatgatgaaatcttattaataatcactgtagaaccaagaattaaactagtatacccactgtcttggcttgtaatcaacaatatacaggtggttctagccagtgcaataagacaagagaaacaaaaatgttataaggcctggaaaagatgaaacaaactgttattcacaaaatactgtctatacagaatgctcagtgtctttttttcttttcttttttttaaactttagtgagatacccttctgccctatcttaaaatcacgtggtggggggtggtgtctgcacttgaaacaggacacttggttcctgggtttagcattgaccttgcccagcttggtctggcagctgagttgttggactaggaagcgtccctgcaggttgtgttctgttacctctctgtaaagcctgaaagcatccctacgattgcatttgctagttctcagtagagctatttaacaagaatctggaaacattttccctgagggctctctttagacagcagtaaaatgtagctggagacatattgagtaaatggaaaagaaaaatctaatgaggccaggaatttttttaatcttctattctcacagaaggcctcaaggagaacaccataattcatattttactcatgtgggttaggcataaagcctcccccatagatccaataacctgtaagtgttctggttttgaaattgcacctgcttacattgctggatcatagcactaaatcacacagcaacggcttctggttcaattgttcattacttgggaatgtcagattgccagagagcagcctgatgtttacatccaaatcggcaatgccttaggaaatcagttttaattacaatctcacgtagcagcactgcactcaaccttcagagaggctgggatttgtgttgaacctacatcttatagctgtgcagaaaatgcctgtccgactgggtcatgcaaaatggacagcaaagtcagcagaaccttagaaaagatgacacagcaagtggaacacagctggatcatcccccgtcctgtcaagcgtgcagtgctctctggcccctttttaaaacaagggaacccagttggcgtttgcctttcagcttccccattctgatataaaaatctgtgacccagcagctttaaccataaaaaagagagagagaaagagaaagactcagagtcagcgggcaggattctctgagaccaggtcctgctccctcagggaatctttgtcacctcacttgctgtaatgcagtttgtgccaccaacctggcattttcagcccaaagcaggagccatttagacaaattcaggggatgcttaagaggcagtgtgtgtgtgtgtgtgtgtgcttgcgcgtgtgtgtgtgtgtgtattcagtacgctagtggtgcagctctgacgtaaaaaaatgttttaaaccctcctctgagcacaaatgctcaagagcctggcactggacagggagcatcctgaagggcattgtcacctgaagcagaagagctgtcagatctttcccttcagcacttaaatcattgtcacgcaatggctttcatcttgggagattcatcctctgcattttggaactgagccttcctagtgttctgagagttttctgctgtctgttcagcttagcacgctaagaagctggagaggtacccagcagcctggttgcattctccgtcttggaaaag

SEQ ID NO: 29820 - DNA, 2300 bp, Homo sapien
agctgggcacactggtccaggcctgtagtcccagctacttgggaggctgaggtggaaagatcacttgagcccaggaggagaaggttgcagtgagccaagatcatgccactacactccagcctgggcaacaaagcaagaccctatctcaaaaaaaaaaaaaagaaagaaaatatgataattataatattttaaaaaactataatttcccaagaagtgccatgaatgaaggtatttttctttttttctcttgagacagggtctcactctgtcaccaggctagagtgcagtggtgcaaccatagctcaccacagccttgaactcttgggctcaggaatcctcccacctcaacctcgggattagctgagactacaggcatgcactaccatacctggctaatttttaaatttttttgtagaggcagggtcttgctatgttgcttaggctggtcttgaactgttggcctcaagccacactgctgccttggccttccaaagtgttgggattacaggtgtgagccactctacctagccatcttttcttttttcttttcttttcttttctttttcctttcttccttcctctatttctttctttttttcttttcttttttattttttctcagggtctctgtcacccaggctggagtgcagtggtatgatcttggctcactgcaacttctgcctcccaggctcaagtgatcctcccacctcagcctctggagtagttgggattacaggtgtgcaccaccatccctggctaattttttgtattttttttgtagacacagggtttcactgctgcccaggctgtatttttcttataaaaaattttaaaacatgagctataagcttaagtcccttttgttcactatctttaattctttaaacccaggtgcctcccttcagccacaggggaactggtaaaagcttgctgtggattcttgtagacagtgttcaatgctatttacccacaaatatgtctttatagaaaatatatgatattctttggtaaacttgtatttttttttaacacaaatggtattgtattatgcttagtctgcaattatttttaaactgagtctaatacattggagatctttccatgccacacccatagacccatctcctttttcactgctgctaagcggtattacacagtgaagaaagtttatttaagcactccctattgatggatatattaccattgtttccagttattttttattttttactgccccagacagggctgctgcaaacaaccttaagatcaatcgccttcttgggcatttataatgtcattgtttctccaaaaaggatccagaaaggtgtggtagtgccaggtcatccatgcacagctttatacttgaaggacactctgtcagattgccctcgagtgtcaggcagcctctgaatatgctagtcaaatttaaaagttggtgcaaagtgggaaaggtctcgagggaattttccgggggtggtggaaatgtttcgtataccgactgtggaggtggttatacgggtgtttacatttgtcagaactcaacaaacggtactcttaaaatgggtgcattttgccatttgtagattatattccactgacattcatttaaaaaaccaaacaaaaacaaaacaaaacaaaaaaaacgtgcagtggcctgggaacagggtaagagagaacaccacccctttctaatgtgggcttttaaaacgctcgcttttccccccaggctccttcctgcctccaggtgtcactacagcctcctttctccccgttgcccggtttcgccccagcctcctttctaccagcagcctttcacccggagagtgccaaagagcccgaaaggagctatcatggggtctgcctgccccgcaatcgcggcccacgctctgcgggggcgcccggagtcgaataccagcggggagagagaggtccctctccacccgcgggaccgccccacgcccctcgcagccccaggaggtgtccgcgctgcggcacgtgggccctcccggcagcgtggggcggtgccgagccggcggcccgccccctccccacccatcaaggcgtggctggcacggtcccgcccactcggctccggagcccagtcgagtcctgcccggctagaagccggctgtcggtctccgtgtcgccgccgccgcccggcatcgtggagctggggcccccttttgcctgggagttttgtagtcgcctagggtcagcggtgacatcccaaagggcaggcccggcagccgccatggtggccaaggattaccccttctacctcacggtcaagagagcgaact

SEQ ID NO: 29821 - DNA, 2300 bp, Homo sapien
tggacaaaactgtcatagactgtgatgctctcggcgtccagcaaaatgagtgatacttgtacccaatgggtttgtttcatgtcacctgcccttcaaggtcccaaaagtgtgcataaaaataacaacttgaaatgctcacatgccaggaaacaacaggtgctggagaggatgtggagaaataggaaaacttttacactgttggtgggactgtaaactagttcaaccattgtggaagtcggtgtagcgattcctcagggatctagaactagaaataccatttgacccagccatcccactactgggtatatacccaaaggattataaatcatgctgctataaagacacatgcacacgtatgtttattgcggcactattcacaatagcaaagacttggaaccaacccaatgtccaacaatgatagactggattaagaaaatgtggcacatatacaccatggaatactatgcagccataaaaaatgatgagttcatgtcctttgtagggacatggatgaagctggaaactatcattctcagcaaactatcgcaaggacaagaaaccaaacaccgcatgttctcactcataggtgggaattgaacaatgagaacacatggacgtaagaaggggaacatcacacaccagggactgttgtggggtggggggaggggggagggatagcattaggagatatacctaatgtaaatgatgagttaatgggtgcagcacgccaacatggcacatgtatagatatgtaacaaacctgcacgttgtgcacatgtaccctaaaacttaaagtataataataataaaaaaaagaaatgctgacatgcaatcatacttaactatgcctttttttactataaaatatattcattacttgtattttctaaattttttcataagcacagggaaaaaattttaagccttgtctttaagcctagagcaagggtgtccaattttttggcttctctgggacacactggaagaagaattgtcttgggccacacataaaatacactaacactaacaatagctgatgaactaaaaaaaaaactcataatgttttttaaaagtttatgaatttgtattgggccacatgttagacaagcttggcctaaagataagtcacattttggagtctgttcttccccgtgtgtgtatgagttgggggtggggggagggagggtggtgagcagcatgattacaagtccaggctccttaatcagtgataggttcaaatctggctctgctatctgccacccacatagcctcaggcaagttgcttccctccataagcacatttcctcttctgcaaagtaggactgaaatgactgcctgatggggtgacaatgaggctttaaaaagacgaagaggggctgggtatggtggctcacgcctgtaatcacagcactttgggaggccaagttgggcagatcacctaaggtccagagttcaagaccagcctgacaaacatggagaaaccccatctctactaaaaatacaaaagtagccaggcatggtggcacatgcctgtaatcccagctactcgggaggctgaggcaggagaatcgcttgaacctgggaagcagaggttgcagtcagcggagatcacgccattgcactccagcctgggcaacaagagtgaaactctatctcaaaaataaaaataaaaataaaaataaatagatgaagtgagggacaaggcatggtggctcacacctgtaatcccagcactttgggaggccaaggcgggaggatcacttgagcctaggagttcaagagctgactggacaacatagcgagaccccatctctataaaaaattttaaaattagctgggtgtgtgacatgtacctacagtccctgtgggaggatctcttgagcctgggaggtcaaggctgcagggagccgtgattgtgccacggcactccagcctgggcgacagagctgagattctgtctcaaaaaaaaaaaaaaaaggaacttagcccagggcccgtatgcagcaagcacttaaatggtatagctgctgctactcgggttatcaaaaaggagctgcaaaaaagtctaggttctgcaggagagcccttccaagaacctgcccaggaagtgggtacacctgtccccacccccacagtaggagtcagaatcagggactggaagggatggggttcctggaggaagctcacagcagcagcagcctctgagtcacaactcagcccctccctggcatatccctttgtttgctgggagttgagctgtgactcacaaaggctctggtcccgggctgggcccatgtgac

SEQ ID NO: 29822 - DNA, 2300 bp, Homo sapien
tcaaggcatttgcctttagtaataataaaaaggcacattgcctttggctgtatataggagactcacttgccacatcatctttcactcagcagccagtgtgatgtcttcaaactgtagctcacatcccatcatgtctctgtctgaacctttcggtggacaaggtctaatgtctcactttgtccatcaaggcccctccagcctctttctccccttacctcccccgtccatggacttccagcagtgtgacctgtgctctgcctgggccagtacttcttccaggtgtctgtcaccacatcctgatcccttgctgcctggtgaggggtcagtcgactatctccctcatcagctcataagctccataaggtcagggatagtgtctatcttggtatccagtcactactgtccccagagcctagcacagtgtgtggcatgtagtagatgctcaaataattgttaaattgaatctcatgcaaagaaaacttttctctttgacaagcttgcctgggtagaacaccaggtgttggctggcggatctgaagggactgctgggctcagatgagggagcaggctcttcagagagaggagaagccctttgcttagtaaatgtaattacttgataaacacgcctggttgtcgtagggatcttctgctttagggaggaaggagaatgacaaaagggttcttggggaaaaggttgaggactaggggtctggacacaggagttgtccttggaaacggagtactggagagagtgtgttccctgaataggaaactggtgggtcataacgcattgagtctggggtcaaggaacccccagaagctgtagtgggatgaagttgcagctgttggaacagaagttggtttgctcaagatgcccagtttctggcccaaaaggtgggctgcaggccaggaagaggccacccagcactgcaaggctgagcacttgcaacagaaggcagaggttgctgtgaagtaagtctggaagatctgcatcccagctgctgctgtcactacaggtggtctcccagggagctctcaaccctcacacccttcctgcacctgcgcaagagtcttagtactttgggctgatgctctttcctctgtaaacaggggccagactgtgatcctctggctctgggggctggcttcaccttgctaagcttcgatttcttcatttgagaagcgggcccgcacaggccctccaccttaaaggctgtcgttaatgttaacttcgatcaagcacctaaaatgcaccgctggcacatggggggaaccgatgaattttttatttttagcatcagagtttacactttcttgagcccagtaactacagtctggggcattctttatttctgattttaagaggtggtgaagaccgtaggcgttcatctgttgaatgaatgaatgcctgcagaaactcgctttatttagagtcccatatttatttccgtatgcacgacccaggcccctcactttcaggctctgcgtccacctacaggccggcgattcctgagagcttgctgggcgccggggttcacgcagctccaggctcgtcctcattctcacctccaccgtggaggaaagtgaggcttgggcaagatctgacacacccaagatcagcccagcggtgggggtgggggcgccgcgtgcaggctctggccctggaccgctagggtagcccctaccaccccggcacgagagtccactcccactcgggtacctggcccttgacccgccctcggggtttccgcggcgcgttctctggcgggacagtgggagcgaggggcagggctgtttacccctcctccgactcggtcaattctctccgcctgagtctgatttaggtggcggcgggggagggatgtcctggggcctccgctctcctctttctagcctccctgtagacctaggccgtgcatggggagctggggtgtcgagcggtggccgggcgtggccacgtccaagtcctgcgtcgcccggctccggcgcccgcgggggtccccggcccgcctcccgcccacgtggccggcccggcctccccgcccccggccccgcccagcccaggggagccgccgccgcagccgccgccgccgcggtgagttttccagcctggagaggccgaaccagcgcgggggtcgaggtgagtgcgggaagcagtcgggaaacccgctcccgcgctagaccctccccggctagacacccctttggcgggacacccccgctaggtctcccggagtgagaccgtcttccggtctagtccctcctttgccctggtccccgagctggacccccactcccac

SEQ ID NO: 29823 - DNA, 2300 bp, Homo sapien
tttgggaaaagaacgtgctcgtctgttctctggcatcaagtttcttgcagctgctctgagggagagacagtgagctgcaagactgcctccccataacaacaggcaactcagagaagagtcattttatgttgttcctatggaatctggaatgagtgcagagctcctacccacacatgactgccccgccatttcatcctaggcattctgtgaaggagattggttagtccaaacttgctaacatacgaaaattcacttggaacatgatgagagatttcttattgaggccaagagatgtttcctgtcccagaggaaccattaggagtcgcttttagggtattcagctttgttcatgaaataaggcatctctgagaaagtggccccagggagagaatggaggactgggaggagaagcattaactgagctccaagggtgtgtgggcagagagcttgctatgtgaactcactccttaagaaaatggaagagaaaaagagagtgctagttaaaaaatcgggatgttttagtttggatttagggttttgatacttatgttgaaatactaatgtttctgatcaataaaatcaaactcttaatataccgagtaatgaaaccatagtgtgattgcctcagaataaattgagaagtccaacttcctagttttgtttaattagtttcactttttctactctccccagtatgctagaaatgggaatcgttgccctgcagattacggcaaaacatctgttttaagcaaagctgcattttttgactcagaaattgtcccagacggtggatataagatgaaattcagaaaaacgttctgccaagtcacaggcttttagatattatggaaacaagaaatggaaaacaggatgatctccatgagaggccttgatcctgagagtaaaaggcttgtgtagataggttagacaacgtcctctagaaaagagaccagggataagtccaggtttccaggaaaaccaagaagcctgcgggtagctgaaggtagagtgctagttgttcatcttaacttaccaatgagctacagaaaggacttagcatctgatgtcatcagctttgccaggagagtgatcaaggaggttaaagctcaggtaaaggtgtgccttctcagagattggctacaagcaacagagaccacctcaacagagaccacctcaacagactcagcccagccatacaaggtgccaaagctcctccagagggctgtcttgggcctttgaggcaattgatctccagaaagagtcagaagtcattccagtccaggcccaggtattcagatggtgacccagccagataatagtatcttgagcaaataatagtatcttgagtgcaaataagcaggaagactgtccttcaaaaaatgtggggttacatgattttcagagcctttttttcagagttgagcatcttttcttttaaaagaaataaggggcaagaggaccaattttattccttgaggaaaaatgacacacccttctcccaaaagaaagaaaactctctggccccccaacttcaacactaatttggctccctgaagaagagagaaaatattatttctgtctttattgaagagaaatgggcaatgccaatgtgaaggttactagtcttttttattttctattggtgaagactactactgctcttatttagcagatcttataccttcagtggtcaccagtatagcaggtgaggtataaggaaaacagcagtgtgatgataaatggtaattaatatactttgtctgtgtcagcaatagggaatggtggggactgtggcaaactgaagcgcccctgttccacccacagtgggtaattttccagtcgactgtggccatgaagtacttcctgatcttcccatttttcaagaaaagctgacaatctggatttttatatgaaaaattctgattttaaaaaatattggcaactaagttaaaattcaagtgaatttagacccagcagaagacatggatggacctgatttggtccactgactaccagtttgttaacctgtgctttataagatttgaaggaaaggcattcatggtaattacagacggtgccaccagaaaatgctcttgctaaatgcagccagtagttagattgcttctttctccagtctcccccgcaaagaaatttgacgtgattctgaatgcactggacatgtcttgattgcgtctttacatttcacagtgtcttaaaagaaaggcaagccagttgttaatttcagaatcagatttatgctctctcaatttaaaaaatgctgggaacaatttcattttttt

SEQ ID NO: 29824 - DNA, 2300 bp, Homo sapien
ggtcctctgggatgatccctggatatgataagaacatttctggaagagccctgtaaaagcaattccttcccctccacaagggtgagtttgggactacccttaatacaccagagtgaagatcctggacttagagtacatgggtgggtggacttaaagggaccagggagacagagaagataaaaacagagataagctttaagaagataaggttatagcttgcactggcatcctgtcgtgggcaggagaggaaccaagaatgcctgataggctgtcaggaagatggactcctccacagggtctgtgacacaagccagaggaggaagagatggtgaacggctagggaaaggaagagatggtgagcggctagggaagaggtcactcattcagagaccaaaagggcaactgtgtgtgataacaggccctagagtatgagggcaccaacaaggctgacttgatgaaataccttatctccaggggtcacaccccctggaagcacactgagcttagacagaagtgatgacaagttgttttgggaagggaccgtggttgaaaccagtgcctccacctgcagcagtttactaggggctctttgccctcattctgccctgggctgattgaagcttcagccacctttgcagaaagctcttggcttctggtgagaacatcttgaaatgggcctaatatctgtggaaactgaaaaatgagaccaatggtgtggactatttccacagttctgatatgcctcttgcccctgtaggtacagaaatatttaattccaaataattgacttgagttgtaacgctgtgttctaatttggaaacgtgaagctgaccacttccagaaggtgcccccctcgccttcactcagaaaagccgggtgtgtctcttccacccgaacatcactgccctaggcacattgcactcattttcctagggcctggccctggactctgcacatcctgggagctctatgaagaagggcaggattaccctattgagtacagatattcctctcacacacattgagggctttgcattaaagtggtttatgtggggccagcgtttttgggtgcatatgaagcctaggggatttgtgacttggcagatttgtgtgtaagcacagctccccagcctcctgcctacttctgataggggtactggcagccttcagggactgaggctgtagaccctggagatgttccttgcactctagggaggcagtagcagggcaccttcaggactggctcctctgagggagtccctgtttttacctcatcactgatgagaatgacgtagcctttgttgagattgtcgtagcctttgttgagattgtcaaggtagagtggagataggtccctccagcactgagacagttttgtgcctgtgcaaacaaaatacttcaaaaaggatactgcccctgcctccatcctggtgtaaggtggcagaaggaagcagtggctgacagcggagttaaacacactttaaggtaggtcaaatttttgacataccgttttcctctgccgtaccagcagctgctctctactttgaaagggggcttagctgctcacataaactttggtttgtgataatgtaaactattattaggattatctttttattcataatatatgcctgattctctgtctactttatttatgctccgtttgaaacactcatttaccttcaatactcagagccagcatcaacccctctgaaaatgaagggaaactttataacagattatttaaatctctctgtggttaaaaaggactctgggaatgaaatcattgggttgaggaagcttcaaatctcagcaaagcttccaggttaaaactgggatgcgatgttgacaaaacattccagtttaaagtttttttttttaaatgaagctttatccccagggtggtggttttcataaagaaatgcttgattctcagttgagaatttttggccttcaaagtctcctcttccctcccaccaacctcccccccgccccgcccaacttttcatcaccacctggtggaaccatttgtcaatgaggacgttctggaagttagagaagttcctgaggctcaggttggcgacaccaacacagcggtcagccaggccctatctccctgccaggaggccggagtgggggaggtcagacggggcggttggagggggagggatgccacgcgcttctgcctcaggtgttcctgcgttgtttgtcagtggagagcaggttagtgggtgagccaagaaaaaccaataagtgtttcaatttttaataaaatgtctctcctaccctttgtttctccc

SEQ ID NO: 29825 - DNA, 2300 bp, Homo sapien
cacccctgactctcatggccaaacgctggacatccttgctgtgggggctgagaacaacccagggacagtaccaagaatgtgagggagggtagggaggcactgaaccagcagctcctccaaaggagtgatgtgcttcctgaggtctattcacagaaggctactccagaacagccttctgtggatcctagctattctggtgtctgaagagggtatggtaaacctcactgggtctggctgaattcctgaattccaggcagtgaggtaaaaaaaaaaaaaattctgcccagcatctgggtcttgaggtggatgctgttgtttggggaacccagcacccattctccctctccctggcaataatgtcagtgttcctttgggcaagcactgtttcacacttccagcccctgaagttcaggtgaggctggctctactccttggttctagatgtagctacttccaagcaaatccccaagacttctgctagcattaccaagaagagttctcttcctccacttaagccctccaaggacgtgtgggcagggtggtggagacacaagccacaagagaaagtgcaggaatcctgtgttagcagtggctgagcttaggccaggccagagaaggagagggaggggattctgggccctggaaggagagtcatatagaggaggctgccctgttgaatggacggaggtgacaatttccaaggtttcctgaggcaaaaagaccaagataaggctggggctggggggagttctgtgcagcaggagccaggtggtaaagacagagtggaagagaaagccagtatggattttattctaaatggcctttgcataagagccaccatagaacagttttatttattgattttatttttattaatcctcctccaaacacagaacacataattttactgtttttttttgttggtggtggtggtggtaggtttgtttgtttgtttgtttgtttgtttgtttttagagacagggtcttactgtgtcactcaggcttcagtgcggttggcaggatcatagctcactgttacctctaactcctgaactcaagcgatcctctaggattggccactgcactcagcctagagttttaattgggataagtcagtagtctgatttgtgtttttggaagataactttggatccaggctggagaaatgtatcggacacggggacaaagtcagaagtagaaaaagcccttaggaagaggaggtggtattcttgaggaagggggtagtggagagggacaaagtgggagagtttaggtgctcagataaaaggcaaagcgctgggaagagtgcggtgaaactctggatagcttgggctactccacttctctgagcctcagtttcctcttccaaacagaaataatatccacttcatgaggttatgtttgacaagtgtagtagctgagagtattgtttttagtcaggtctggattggatctcaggtctggcaggtaacagctgtgtgaccttatgagagtcagttaatgatagattgtagcctttatggagcacttgttatgtttcaaccaacagaactctccccagactaggatacttattctagcttccaggagggtgagggggacggggggttgtggtgaggaagtattgtggagacagcaagccttttgtccaaagtcctactagtaaatgtggagccaggatttctctgtcacgttcccctaacttttctgcgcctaaaactgggataacaataatacacttccttgtgtggttgggcgtatacagaaaggggtctggcacatagcaggtgtttattaaattattattaaaattattattattacattctttgtgttttcctcaggttttgcatagagtgagcatcacttggacaaatcctttggattaaaaaaagatctactaagtgagggggaagaaactgcggctgccagagtctcagtgggggcttggggggcgtgaccagaggggcgtggtctacgggggcagggccacaactggagggccaggctgtgggggcggggccagcacacgaggactgagggtgggggcggggcccgggctggcaacgcatgcccagtgcggtccccttcgctgccgccgcggccgccgcggccaccgcccactcggggctggccagcggcgggcggccggggcgcagagaacggcctggctgggcgagcgcacggccatggccccgtggctgcagctctgctccgtcttctttacggtcaacgcctgcctcaacggctcgcagctggctgtggccgctggcgggtccggccgcgcgcggggcgccgac

SEQ ID NO: 29826 - DNA, 2300 bp, Homo sapien
atacagaaccagcccaaatgcccatcaatcaatgagtggataaagaaactatggtatatatatatatatatatatatatatatatatatatatatatatgatggaatactactcagccatagaaggtatgaattcggttgtgcacagtggctcacacctgtaatcccagaactttgggaggccaaggcgggcagatcacctgaggccaggagttcaagaccagcctggccaaaatggtgaaaccacatctctactaaaaatacaaaaaaaattagctgggcatggcggcaggcgcctgtaatctcagctatttggcaggctgaggcaggagaattgcttgaacctggggggcagagattgcagtgagccaagatcgcaccattacactccagcctgggtgacaagagtgagactccgtctccaaaaaaaaaaaaaaaaaaaaaaaaaaaacctgtcaaggtcaccaaatacaatggaagtctgaaaaattgtcatagccaagaggaacctgagacatgacaactaactgtaacatgataccctggctgggatcctggatagaataaggatattaagtaaaaactaaggaaatttgaataaagtttggactttaatgataatgtatcagcctcagttcattaattgtgccttactaatgtaatatgttaataactaaagaaactctggtttcttttgtataagaactcctgtaccgtcatctcagtttttctgtaaatctataattattcttttaaaagtctattaaaaataagacagaaatttacaaaataaaaataacctcaaaagatgacaagaaaatgtttctgcagtttgtttcattcgcattatttggagctttagtagggttggatgttttcctagggtttttaatgagtcttggattcattcaagacattaaaactcagaatttcagtaaagatggtgatcattcattcattcactcaacagtatttatcaaatgctggctaaatgccaggaaataccctgtgctcagcacttggaatacaggaatcttttcaaaatatagccccacttctgcccttaaagtaatcctaagaagctgttagctacttttaggttcaaaccaggacataaagtactgcctggctgcccctgtaggcctcaccagctcaccttgcaccattccgccacacctgactgctctccaaccacattagcctctttcagctccttgaagttgccacattccctactgccccagggcctttgcacatgctattccttctgcccagaacagttctcctctctctgctcccctcccctttgcccaggtaactcttatatttggaatcttagctcagggatcccttcttcaaaaacaactcatctactagtaattcctccctagtcatagggctatttgagtaatgccagtgtcctccatggaatgtttgtttgcaggttaatgacaactatgacagtgccctgttgttcactctgatccccactcctggcataatgtctgatatggtgcagagattccattgatacttgttaaatgaattaattaatgaatggaaaacaggatatggtccttagccttccagtatagtgcggatccaagccaggatgttatctcctgaagattagacgtggccatttccccaggtcttaactgaattgcaaataagagctggccctggctgcatcaactcctggtccactacctgcagtaacattcactcaggctctaagtcatttgcttacttcaggttcggaaaaaaaacaaaaaacaaacaaacaaaaaaaacccgaggtctgcatccccgtcattccagtattgccatctgagaaaactgacatccagagagatggagttgcccaaagccacatggttactgaaaggacccatttgatccgttttcttacgaccccctggactctacttcccctaaagcttagcaccagctctgaataacagcagagtactcccacctgccctggcggctttgatctagaaagacttgttgtgcggtcgcagtgcagggtagtctggggcggcggtctccgacctggactgcgcgcgccccctcgcggttaccttggagactagacatccgctcttcttttcctccgggaaaagaaacgggaagtggccgtgggccggtgaattccgtgtagtggccaaggtacgcaccgctccagaactatggggtgggcgtcctgggatttctgggcgcagggttgggtccgccgccccaggttttctgttgtccgccgccctgggtctctgggctgtgcaggaggcgccaaggctg

SEQ ID NO: 29827 - DNA, 2300 bp, Homo sapien
caaaccagcaaacaaacaaacaaaaatctgttgagtgagtatatgagaaaatgcttccctcacatttttagataatttttcctgccttttattttcaactactcatccatatataaaatgatatgtgtaaatccagccgggcgtggtggctgaagcctgtaatcccagcactttgggaggccgaagcgggcggatcacgaggtcaggatatcgagaccatcctggctaacacggtgaaacttcgtctctactaaaaatacaaaaaaattagccaggcgtggtggcgggcgcctgtagtcccagctactcaggaggctgaggcaggagaatggcgtgaacccgggaggcggagcttgccgtgagccgagatcacaccactgcactccagcctgggcgacagagcaagactctgtctcaaaaaaatagatagatagatagatagatagatagatagatagatagatagatagatagatatagatagatagatatagatatgtaaatccaaggaaaatcaatttaagctgaataaaaatattggaacatctttgttaataaagaagaagttgaaaactggagttgctctggcatgcgctgtggcatccttctgccttgtgcctcttaggcactcatctgcggggctcaggggctcagtgaggcctacactgacatctacccctccacttcctgcactaattcatcttacctggctcacctgtttccttttctcattcttaccctggctaacatactagataatttacctataattattatttgtttcctgccccccaccctgcaccactgtgagctctatgaaggcaaggatagtattttgtttttttctggttctgagaaggtgctcaaccaattgtggaaggaaataatgaatgtctcaaaggagagaaagaaagctgaaaaggtcctgtattctctcgcttcctcctagtcgtcccagattaagataccccccacctttgcacaatctacatctcagcactatatacaaaatctccatgaggtataaatgttcaccggtttattcatccgcagaatggttttacacgtacatttataaatccatatgcctgttgatgttttgcatgtgagatcctttatttacccgagagctttcatcaggaggaatttagctcaatatttgtgagatcataataggataaaagctgatgaagatgagctccatcctatagaggctatttcctctatgagtggagactgtttttcccttccctgaaggaaagaacagcagttgtttaaataatgaataaagctaagcacttaaatttatcttcaggaaggtactggaagaagaggaggagcagagtataaaaactacaagtatacctttgcggggggaacagccagttcaaaatcttcccaatcagcagttatactttaattttaatttcaagttttcttaggattatgaaattaaaacattctgttcttggttattttcataagccttaccatcttgaaagactccatcctctgcccatccctcaaaagatcaacagacggaaatttttctttagaaagcaaactatgttcttttctttgaaataactgtgatagagaaattattcactttaagtagtcatgcttctaagttgcttgaaggtgattacatatgaaccttcatataaacatgtatctctctcatttaaaagaaaagaggaaggaaaggaattagcccattaattatttaaaatacttggtgcaactgttcctatgaattaatccaggcacttggaagacaattacactccatgttaataacattgccaaccttttccactatgctgcactccaaatactattgtgttttcattgacaacattccctattacatatgcatatgaaaaacaggcattttcatcagaattactgtaatagcattaagagattattattttttcccatttccttggaagaaaatttacttaaattagattatttattactcgactgctctcgtatcttgcctgtatgtttaggtaactggagcccatgaaagtataaacttcagaataaaaagcttgattttatacattaatgatttcaaataaaagataagtgccacatttgtgcatcacttctttagagaaagttaagtctgtgttctgcttaggagagataacactttttgtccctgtaggtggcccccctggtgtagccattagttgctaattacttgcaaacaaataaacaattaactccttaagctgctggctgggcaagtgttcattgacatgctaaaactttctaagacaggattt

SEQ ID NO: 29828 - DNA, 2300 bp, Homo sapien
ccagcctgttttattttttaaccagctgagtccggcaagaattccttgccattctgcgataatgtaatggcctcttgagagtcctttacagaaacacagtttagatgtacataacatactaagaaggaaaccatttaacttgacaataccacacccagataattcagataactaatcgaatttttcatcggaattatttggtttggccaagttaattaggtaacaaatacttttcttttcttttctttttttttttttttttgatacgtagtcttgctctgtcgcccaggccggagcgcagtggtatgatctcagctcactgcacctgggcctcccggcttcaactgagtctcctgcctcagccgcctgagtagctgggactacaggcacgccaccacgcccggctaatttttgtattgttagtagagactgggtttcgccatgttgggcaggctggtcttgaactcctgacctcaggtgatccagctgccacggcctcccaaattgctgggattacaggcgtgagccacagcgccaggcctttttttttttctttcttatacattgtttacactcctcacttactcctgattcttaacagttgccacaacctttcttcatttaaaatctaactcagttcaatcaggaaggtcacttaccttgaaagtcttccttctttagagctggggtgcatggtgttcttgttggcagagtagaaatgagatatcaaggaaaaagaaactgtaacacaactgggaacccttaactcattgtaagaactgcctccaaatcaacttcctcaaaaactaaagaactcttcgggagagagagactggctgataaacaatctaaggggaaaacttttaaagattgtaacactaaaaataattccgtaaaactacaatgcaagtctactcaacaaaactttaaaaatataattttatttttctttcaagagatcatgggaaaatctactattttcgtttaaaatatataacttctatttgttactatatttggatttgagctactactattctggatttgttcccatgtatctgtggaaccaggcagctaattaatctttactcagcatctctggtatttcttgaatgaaaatggaatggattggtggaattaatggctagatgtttagaagacactacttactttgttattttctctgtataatgatgaaagcctacaactatacagagacataaacgagccagggtgacaggttgggaaagatgaagagggaggaggaaaggataggcttgtagccctcatccggtcaaattcccaactttgagcttcactttattgtaaaattagaggctaaaactatttaacgcttccaaaactttttgattcaacaaatgccaattagttactaacataattaatcagtgtatcctgatttttaaaagatattttcctttgtgatttaaaagaaacatgggagttggagttgcagcgtcagtcctgaaggactgacctcgggaggccaggtaggaactgataaactggcaacaaaatcacatgttttcaactgaatatactgatattcaagcgtccagaaaaacaatttcgagcctacgttcacaagtttgccagaaagccctattattgacacagctgcggatctcagacatctgagttagtcagcaccattctgctggaggggattaagactggacgcttcgagcggagttgggaatgttatcatctgaggaaactaaaaggcgccagcagtaggactttctccaaggtctctgacaaaatatgttgcgggaaaagtcaacccgccccaaattcccccgtgtggccctaactcgaggctctggctcctcgcgccggcaagctgaggaagagacggtcccctgcgatttagatacaaacgcgcgcgtgcagggaaggccatcccagggcagacactgccacctccgccgcttccgacgcccgcgctcgcgggagagcctagcgccgcacgggaacctcccgaccaccgccgcagcgcggatgggcgtccccgggagccaatggacgcgccgggaggcggggcagggaggccgagggggcgggatttcccgcacggccgctcggcgcctggagaaggctgtgcgggcggggacggctgcagcccttgccggagagggcgggccggggtcagctgcggcgggcgggccggcgcggggagctgtgggcggcagctgcgtctcctgccaccgccctccctccgccacgatgccggggatcgacaagctgcccatcgaggagacgctggaggacagcccgca

SEQ ID NO: 29829 - DNA, 2300 bp, Homo sapien
atgaaacacttctggtcccaagcattttggataagggatactctgtactaataactacaacaacttacctctttggctattggcagttcctaacctcaattaaaaacagttacagtgtctcctactatggtcccctacgaacaagctaaaacagaacaaatgcccttttccaccaaaacagtatcattagatggcatggtattatagtttgatagatttgttagtaccatcctatatgtgtgttatgagttaagtgggcttttataggctggtctagaaataaaagcaacttttataacagtatttctactggaattttcaagttccaaacaaatggacatcaaattacttcaaaaactaacctacttataatttagaaactgccatttttttcttccccaactagtttataagttacttgagagcaggaggtatatattctgttactttgattcttggtgctttgctagagtgcgtgctcactaattgctttttggtgatggggatatatttttaagattgctcaagaaatacagtggaaaataatttttgcattaacaagagtctttctcctcttaggagctaatgctcatggtcaggcctctgattcttcttccatcttacttgaagccgcaagtggaggaaatccagatgctgtggctctcttgctggagtatggagctgatgccaacatccctaagaattcaggccacctgcccatccatgtggcagctgacaggggccacttactgttaagttcaattacattattataaataataaaaacagtaatagctaccttttattttgtgctgcttctaggaactttataatctttaatcactgatcccacaatctaaacatactttttttttttttttttttttttgagatgctgtctccctctgtcgccaggtgctgggtctgaaccatagaccctggccaagtgacagatgaaagtacttagacataggtatccagtgaaagagtgggctaggggaccaggctgctcaaagaaagagttgtagcagccatggccctgacaagctggtgcttcaggcatttatttagtacaggtttaatgacaaaggctttgagtcagcacatcgtgtgagtaattaacacggttcccccccaacccccgctgccagaacagtcctacatgtggatgattaaaggccagttctgaggcctaagtaaactaacttatctagatcaattcccttacacttccttgtaacctactctgagagaattcagctgccttcagccaaatcctttcctgaagcttttgcaaaacctcccggccttccaagaaggtgtgcttctttctataattttaataatatttcccaccacgctgactgaactcctgcagccaggctggagtgcagtggcatgatctcggctgaccgcaacctccgcctcccgggttcaagcaattctcctgcctcagcctcctgagtagctgggactacaggtgggcaccaccacaccagctaatttttgtatttttagtagagatggggtttcaccatgttggccaggatggtctcaatctcttaacctcgtgatccgccctcctcggcctcccaaagtgctgggattacaggcttgagccaccacccccagccctaaacataccttttaaagatgagaaactcttaggagaattgcttgaacccaggaggcagaggttgcagtgagccaagattgcgccactgcactccagcttgggcaacaagaggaaactccgtctcaaaaaaaaaaaaaaaaaaaaaaaaaaaagaaaaactcttgaccaactaggaagaactagaaatggctgtttaaccaggcatcctctgaagccaccgaagagatataaaacttttttctcaggtacttagacaatatgggaagcctcaggcctctgagctaattctgaattttatagcttagacggtaattccattcaattttacttggtatctgagcttctggatgaaggaattatgcttttttttttggttgtgggttctaaatgccccctgaatactgatactatctagtattgctataaaacaataataaacaagttagtgctacatcttaaaaacaatgttgaaatgcattttgaaattctttctcagagctctaaagatactgattccagttacggatcttgctgccattaagcagagtgggatcagtccagttcactgtgcagcagcaggagcacatcctcagtgcctggaactcctcatccaggctggatttgatgtgaacttcatgctggatcagagaattaacaaacacta

SEQ ID NO: 29830 - DNA, 2300 bp, Homo sapien
atatagtttcttttcatgaattggtaagagttgacatgtttttcttattatttacctgctaaaaacaaatagaaacgtcagcttcttctaatgtgtgggtttcttggattagagctctaagcagttgtatttcttcttttgagtctcccccactacctatactgtattttattccttcttccctcccttctcattctcccctcccaaatcctcttgagttttctcatgcctgctaagcggtcagaactttaaagtctattcctgtcttccacacctagaatcatgcaccatacgaaatacttgccttgggctgggcgcagtggctcacgcctgtaatcccagcactttgggaggctgaggcgggcagatcacgaggtcaggggttcaagaccagcctggccaacatagtgaaaccccgtctctactaaaaatacaaaaattagcaaggcatggtggcaggcacctgtagtcccacctactcaggaggctgagacaagagaatcgcttgaacctgggaggcagaggttgcagtgagccgagattgtgccactgtactccagcctaggtgacagagtgagactcagtctccaaaaaaaaaaaaaaaaagaaaagaaaagaaatacttgccttgtttcacaaccgtaatactatatgtactgtaaaaaaatatatatgctgtaaaaccttcatatatcacaattatgatcttagatttagttctggccattttattacaagataaatagttcttttcgtaccaatggctgtttttccctttatcaagtgaatatatttctttttttttttcaagctcaaaaatctcggattataaagtcggatgcctatgtctgtcccctctacaagacaagtgaacgtaaaggaactctttccactacgggacattctactaactttgtcattgcaatgttgttaaaaacagaccaacctactcggcactggatcaagcgcggggttgctttgctttgtcagttggatgactaaattggacaaatttataaaacatccaaaagtttaaaaaaaaaaaaacctgtcctacttaaaatatatacattataaaaccaagtgttttggtgttattcttttaaatgatctttgcaaacactcattgcattgttctcctttctgaggagaactttttgaagtttgattgtatgtgaaaaatagatttgggggttaaacggtaacatttaacaaatatcaggaattatctccttcacaaatgttaagtcattccttcagcttcagtatagtttactttccactctcctacctaaagtaattatacataaatatttcaaatacataaattaagaaattataaatatggaaaatattaaaagttacccaactatacctctttatttcttacctctaagacatcggttccatttctcactgcatccttgtgactaggaaaggaaactcaaagctgcgaagttggcctgcaaaggcagtaggatggcttgagggcagtccgaacttctacacctgcagtgacagtgtgcttctcggcatttgcttcatatttaatttgaaatgtcaagtggtccctttgctttttttagtgtatattaacaatttaaaaatatttcaacaaaacagaattttgatcaaaattttatcttgtgtagagtgaattcttcccttaggattccaaggacactgaaggccacagttctgtaacccaaggaaaatgtagtcacagctacctagtgaatctagtacattgggacagtcactttggataattgggtcagagcaaaatgtttgggttctcttaagtgaaaaattgattgtggtttgcagtggctatgtgcatgaattctctttgcatggccaaccccctgcaaaagcattttattccaggaataaaatatttaatcctttaaatttgatgaatgtagcactgaagaaaagagatcatgtttccaaaaagagctaaaccacatgtaaaaaacaaggagaatgtgccaaactgtcttatgatgaagtatttatagtaaagctattaatggaatggtcactacaggggagaggagagcctaaatataaatgaaaattctgaggcttacatgtgttagtccttaacagtgaaaacttcactgctgtcctagaggataaaacaaaaggtaaaaagtctttgaaatgtgaccaaatgtattctatgctaaaactgacatttttcttttaaaaccatttagatattgcctagtaagatacatttgtttttactactgctgtatccatgttgtaattatgagaatacatttgttcctata

SEQ ID NO: 29831 - DNA, 2300 bp, Homo sapien
ttggctcctacatataagtgagaacatgtaatgtttatctttctgtacctggcttgtgccactgactatatatttattccagttcagagaggacttatttcagataaataaatggtttctagcagatttaaccatgaacctgatgatgatgttgatggcattaatgttgtcttagtagtaatcttaatagtttctttagagctttattgctgtcccggtgaccaacaggatagtggagtgcgtacttggggcttcgtccttatatgcctaggggtctgtagccccaacagagagatgatacaaagtggaaaaaaaaaagggagaaattgctggacttctttcactttcactgacctttcacaaacaatttctacaacctaaaatttagcatagagaaatggatttttctttgctacttctaggcggaaatggtagaatccaagctcataccaaagaaatctatctacatagacatgaaaggaaaattacacttacattgtttctttttctgcttacactttagaggaaaacttttgatgcattgtctaccaaattaactacaaatttagaaatcagcatacttcatttactacttcatagtagcaagaacgtggactttgaaattagacagatacagtattagttcctgctttgcatgatttgttagctatgttatttttagcatattaataaatcgatcggtgctttagtttctagggacttatccatttctgctaggttatccaatttattggcatacaattgttcatatcattctcctataattctttgtatttctgtggcattggttgtgctaccagagtgtgctactattttcatttctgatttttgttatttgagtcttctctctctctttttttttgtattgatcttctattctctatttcattcatctccactctaatctttattatttccttcctagcttccttgctagctttgggtttggtttagtcttctttttctagttccttgaggtgtctagttaggttgttgattttatgtctttcttcttcttcttcttcttcttttttttttttttttgagatggagtctcactctgtcacccaggctggagtgcagtggtgcaatctcggctcactgcaatcttcgcctcccaggttctagcgattctcctgcctcagcctcccaagtatctgagattacaggtgctttccactacaagtgattcttctgcctcagcctcccaagtatctgagattacaggtgcattccactacaagtgattctcctgcctcagcctcccaagtatctgagattacaggtgcattccactacaagtgattctcctgcctcaggctccctcgtagctgggattacaggcgtgtaccaccacccctggctaatttttgtatttttagtagagatgaggtttcaccatgttgaccaggctggtctcaaacttctgacctcaaatgatccacccacctcggcctcctaaagtgctgggattacaagcaggagacactgcgcctgaccttttcatgcatttttaaattatgtagatttttatctagactttatgcttctttggggcgggcaaatgtttcataatgctttgtctgttacatttccctccctaccatagagccttacactaatagagatttaataggcatttttttttttaattaactgattgtcttcagtcactttggggcagaataagatatttaggatttggaaaatagagagatggtgtaaaccatatttcactttctcagagaattataccctacattttaaaactttttattttaaaatacttacagactcacaagaagttgcacacagaaaaatacgtgcagagaggtttcacgtacccttcatcttgtttctccagtgctagcatcttgcctatagtacaaccgagaaactgatattgctacaacccatagagcttattcagatttcaccagttttacatgccctcgtgtgtgtatctttatacgtttttaatagtgatactttcataaaataaaaagtgtatatgttaattcacattgcttatattttcttagttttgtttgacaatacgttttccttctttttaactttagtaacaaatccaagattttggaaaagcgcctacgatatttaaatgaccacttcacatacaacttatattgtaatatatgccgatcactatttgagaaggacaagctgttattttcctttttattatgtgccaatcttcttctgtaagttacttgcttttaccataatttatttatttttaaaacctccctggaaaatca

SEQ ID NO: 29832 - DNA, 2300 bp, Homo sapien
caacaggtcttgatgatgaatttgttgtagagtacaagggtaaggagggggagttctcaaaaatcacttttaggcttctaatttgagcatatgggtggcatttactctgggtgattcctggaggagaagcagatttgtggaggcttaggggaatatcaagagctcaattttagatatattaaaattgaaatgctatgagctaggctagtggatatgtttcataggcaaacaatcctgcacattagcacatgtggatctgtaggacagttctcttcagacacgagtggtaaatgcatgacctagttcacttactgctttttacacttaaacaactacttaaaaactcaaatgagatgaacaaacattaaagggggatatgtcataaatttgaaagaaggataacacttggcactacatgtatctcacttatgttaatccaattaacctaatcttgaatgataaacacgtatatttctgcctttaggaccacaaatgagcagttgtaaagtagtagaatagttttaaaaggcatcgaagctttatattcagcaactcactatatgtgagtgagtgttctttttctttgaccgagagccctatggagctcatcttcttgtggtggctattctgttcagcttcagtgttcctacaaataaatcttgactttttctctccttttactatttatgattcaaagcaaactaaaacacataggaaagagccaccattgtccatgaaagtatttctttaatcagtatagaaattgaccttctatgtacctagcaatagctctcagtcaccattcatccttctttgaagcttaggttagcttatcgtttgcatttgtttctaaatatggctaagaagcattttataataatactgatatcctattttaactttcttatatctaagatgatgttattttattgaaaatataatttgcattagcatcagcttcaaaattcattctgtagttgttttcaatttatagtttggatctgctaaaatcacttactgttgaaaaagctatttttaaaaagattaaacctctccctccataaatccatttaaatgcattttgaatatcaaagtgttagaaaaaatgaaagtataccttgaattcaaaactatagatggttcaattatgcataattgaacaaatatataattgtaaaattgtataccctggtcatataggttttcagaaaagctatggataaataatacaagggcgctattagtgcagtttttaactatattgtataatctccttttcaattaaatcttggcatcaatatacataatctatttgactagttttgttgttgttgttgttgttgtttttgagacagagtctcactctgttgcccaggctggagtgcagtggcatgatcttggctcactgcaacctctgcctcccaggttgaagcaattctcctgcctcagcctctttagtaactgggatttcaggtgcccaccaccatgcccagctatttttttttttttatttttagtagagatgggggtttcaccacattggccaggctggtctcgaactcctgacctcaggtgatccattgcctcggcctcccaaagtgctgggattacaggtgtcagtcaccaccctggccttgactagttttttctaagtttactaaaatttttatattttattatgatagaagtaataggtattctatatagaaaacttgacaactctccacagcaaaggaacataaaaatcacacagaaatcaacttccagaagaatcaacagttaaatctacccattattaacatgttggtgtttatctttccattcttttataaataaatatttcaaaaacataataataatttataaaatttggagggagtcttttagtcatttaacattttttatgactatatgacattctagcctatgtatgtgccaaatattacatttctctattgttagacatttagctattttttctcattcaagcttttaaagttagaaatttattttaattgttcaggcttatccagaatctgcaagaagagactgggttcgagagtggcctggccaagttgtactttgtatttctcaaatgttctggacatctgagacacaggaagtgataagtggcgggacggaggtaaagcattgtttgcttttaagtaacatccttcattccaggttttttaaaatttaattttattatttttagaaatgagatcttgctatgctacccaggctagtcttgaactcctggcctcaagaaatcctcccacttcaacctcccaaagtattag

SEQ ID NO: 29833 - DNA, 2300 bp, Homo sapien
tgagcccaggagtttgaggatgcagtgagctattgctgtagtctcagcaatgcaccaagatgtaacagtttctcattgtctgagataacacctggagttatttgtcccacctccaagatgattaaggagcgcagacccaaaggttagtttagaacgaacgtttaataagagaaagaagaaagctctctgccagcagagagggggacctgaatggggtgccccctatgaggctggggtccagggtttttatggactgggaaggggaaggaatgtgcttcgtcccccgaccccgctaccctggggcttggcctggtactaatcaggagctgaaatgatgattcatagatgctgcttagcttggctcgggacctatcaggaactgaagagaaagtttggccctggaccttggcccaggacaaatcaggagctgaagtgatgattcctagaagccggacttacaatccaaataaaggaaagtagagtgcccactggaacctactggagcccactgtgcccatacccacaaaaggaaaataaacttttttttccctgggagcccattgactatacaaaggacaaaggcatttctttgttcctttatgtgagtgaggaggaggtctgtgcaagtttttgtccaaatgggctggagatttttctatctgtggagccgtgggcatgtctccaggcacaacaccctgtgctagttcccttattggtgcctgccgcttgaattttttcccaggctgctttttatgttatgtggggatgaggcactgacccatgggctgggggttctctggggacccttcccttgctatctacctaatgcaaaatctagctgactcctttcactatgatggtgccgctgcactccagcctgggtgacagagcgagagccctgtctctaaaaaataaaccctaacaaattgacattaaaaaaactgtctaatctgtcataggactgagtttaaaagagaaaaggtggcatggtgcagtggttcacgcctgtaatcccagcattttgggaggccgaggtgggcggatgacctgaggtcaggagttcaagaccagcctgaccaacatggagaaaccccgtctctactaaaaaaaaaaaaaagaaaagaaaaaaaattagtcgggtttggtgatgcatgcctgtaatcccaactacttggaaggctgaggcaagacaatcacttgaacctgggaggtggaggttgtggtgagcactccagcctgggcaacaagatcaaaactctgtctcaaaaaaaaaaaaaaaagtcacattatttatacaagtattttattttctacagaaagataatttgcttttacaaactaccaggaagttttacttgttcattcactcgcttaaatgacattttagagcacctactctgtgccagacacaatagtgtaggctgtactctcattaaaaaaaaaaaaaaaaattacgtagcaactggcacatagaaggtgctcaaatatttgttgaatgaatatgctgttaacacaccggcagtattcacttccctaatttaattttggcacatagtattctcgtaggctattatcatttagatgtagtatgcattgtgcagcttcaaacagcaaaatttcacatctttctcccagcataccactaaattcacacaccttaacctgtttgattttgccaaagaattcctggaagtgctgtgtcaacaaatagcaaatctagaagcaagataaattatattgctgattagttacaatatttacagggtgtcactaggggacatttgaagacttgattctcttgctgagagtgtttccataaatctgttttccaacagatctaaatttccagtcttgcagttttccacagtttgaagattctaatttcctggtccccttcccaggaaaggcagttaggttaaaacaaacaaacaaaacctcacaccccatttacttgagtaacgaattattgttgtgacaggtaatcctaaccccttgcagcttggcaactgcctctccaggcaaccttcacccagcccctccagctggggccgccacagtttccatggcgacgacgttgtttccaaccggtcagcgaccgcccttctccagctactcgtttgagagccggtggcgttccggaggtttctccctcgttatccccctgcctttcacctgaggagaggctctgactgtctctctctctctctggcgtctgcgcagcggggaagtagtgagaaacaatcaggtacttgttctctgctgttctcttcctttctctcccagggcaggtatcgcgattt

SEQ ID NO: 29834 - DNA, 2300 bp, Homo sapien
acttgggaggctgaggcatgagaatcgcttgaacccgggaggtggaggctgcagtgagccgagatcacaccactgcactccagcctgggtgacagagtgaggctccatctcaaaaataaaaaaataaaaaaataattacatggaggccaatgacaattacagtatcaaacaccttttttcttgcaattaaaaccaaatgtttttagcttttcccctttcaagaaaatgaaaattaaagcttttccataattgcaagcaaaacaactctaatggccctcttagaagaaatccagaacttcatactatggcttagaatgcactacacaatttggtggatgcatatctttcttatctgctactctcccctggtctcaccttactcatcacactggacctctttctggtctacaggtaaagcaattcattcgttcttcaagacctttttttgttttgttttgagacggagtttcactcttgttgcccaggctggagtgcaatggcatgatctcaactcactatgacctccatctcccaggttcaagcgattctcctgcctcagcctccctagtagctgggattacaggtgtgcgccaccatgcccagctaattttttgtatttttagtagagacggggtttcactatgttggccaggctggtctcgaactcctgaccttaggcgatccacccgcctcagcctcccaaagtgctgggattacagacgtgagccactgggcccggcgtctttaagacctttaaaagaaatagcaataaagtgcacgattccttaggccaggggaggtggttttcacttgttatcccagaattttgggagggtaaggcggggggcttgcttgaggccaggagttcgcgaccagcccaggaaacatggtgaagcccttctctactaaaatacaaaaattagctgggcgtggtggtgtgtgcctgtagtcccagctacttgggaggctgaggcacgagaatcgcttgaactctggaagccgaagttgcagtaagccaagatcgcacagctgcactccagcttgggtgaaagagcaaggccctacctaaaaaataaaaaaataaaataaacagataaacaactatttcttaatatatgccccattattattccttatctgaaattgaatttaactgagatcctgtaattttatttgttaaatgtagtaactaaatagagtcttcctatttactaactaaaaataaacactgggtggctcttgcctgtttgtacttgagagggttaggcgggaggatcgcacgagccctggagttcgagggggcagtgagctatgatcaggccactgcactccagcttgggcgtcaaagtgacaacctgtctctaataaaaaataacaaacagccttccgcagtttgtcagtactatttctttctgccaattaatagttgtgtgaccctgagcaggtaatatctcgggactctgcatctgtaaagcgatggataaagagacctacctcataagaactatgaggcttaaataagatagtgtgtgtagcgtttctcgcatagtctgcgctcactaaacggagttattgtatatcgttcgttgttaactaccacaaaggctctgctcagaggtgcgtaggcgctggctcagcctggggtgaacccaccaggccaccgaaacgagcgatcagggtcggcaaagctgtggagatgaaatgggcaacaccttccacactgcgagtaaagctcgcaatccgggtggaggcctccacgtcctagcgcagtccagtcccgggcgcagggaggagagctggtcagccaagattccaagacaggtgtccacctcctccaacgaagcggaacacgtgacaccaccctatccacttccggcttggagggcatgccctcccgtcaccagcatgcactttcgacaaaaccgtggaatctagtattttcctctgacacctttatattttcttcacttccctataattctgacctatcgtgtaggtaaaaattaatcttcagagtattacagacatgcgtgcccacgcgctaggcgaaagtgcgagtcggaagcacttcattccctctcttcgctagccggaagtcgcgagatctgaatgagtcaaagccggcggcctcggctcctcagctccacctgacagtaggccgctgatcggccgcgggtcttgtcgaccgctaggccaccaggttcatgtggaggctcccaggcgcccgcgccgcgcttcgggtgatccggacggcggtggagaagctgagccgggctgaagcggggagccagacagcggcg

SEQ ID NO: 29835 - DNA, 2300 bp, Homo sapien
ggtttgtcttttgaatttaagaagaccctaagaattagttgaagattgttttaaggaattctactatataaaactaaaaacagacataaggcctaaagtgtgaaaggaaaataaatcttggggcctccacctcactaagctaaagagaaaagtcaagctgggaactgcttagggccaacctgcctcccattctttaaaaagtcacccctctgctcactgagataaacgcatatctgactgcctcctttggagaggctaatcagaaactcaaaggaatgcaaccatttgtctcttatctatctatgccctggaagctccctccccactcagagtcttcctgcctttgctttgagttgtccagtctttccagaatgaaccaatgttcatcttacatatattgattgatgtctcatttctccctagaatgtataaaaccaaaccgtgctctgatcaccttgggcacatgtctacaagacctcctgaggctatgtcatggacgcgtgtcctcaactttggcaaaattaactttctaaattaactgaggcctgtctcatattttgggggttcacaaaaggatacaagaaggtcttgtcacttagcaagcttccaaaatgcaattttgagttattcaactgctaagcaactctttacatgtatctccaatgcaaaggagggtacttctgagtaaagaagtttttggggtttttttgttgttgttgtttgtttttttaagacagtctcgctctgtcgcccaggctggagtgcaggggcgcgatctccgctcactgcaacctccgcctcccgggttcacgccattcttctgcctcagcctccggagtagctgggagtataggcacccgccaccacgcccggttaatttattctatttttagtagagactgggtttcaccgtgttagccaggatggtctcgatctcctgacctcgtaatctgcccgcctcggcctcccaaagtgctgggattacaggcatgagccactatgcccggccagaagtttttgcttttaattgcccagggccactcctaagaaataacagtctctgaagggtagataaggtagtgctaccaagagaagcgttactcagcaagccttcaaaaatataaaaataacttactgtttctgaaagtttgcaagtttttcttattcaaccccatcctatggaaatataccagttggaataagcaactacagaaccacataggacggcactactagaaaaatagattaaatctttatcctggcaatgagtctaatacatttatcattgctgtgaattttaaaaggtgtagcaggccgggcgcggtgagtcaccgcgccaggcccgatcataaacacttttaaagtgaagaggctttccgcttcctcaacataaggagtaaatctttaatgctgcttctaggaaaaaaagtacaagaaaagcaagacttcctccttgccttctctttaaaaagcaacagccgatgaacacgtgttggagcgctctcgccttgacagaattagagatcttcagaatcacttggcgtggtggtcgaagcgtctagccctagctcattagggtgccacagtttctcggcccacaagtcagcttttaaccacttttctccgcaaaagaccggaccggtcttcatgcgtcaactaaagcaagcgtctggtcccgtgtgtgaaacgtgtaagttcatggcatcagggaatacccatcgcgcgtaccgtaatagaagagggcgaggttcctcacctaacccataatgctcagctcgcctttccggaagcaaggactatcaccccgacaataccttcatccgggcggaagcgtctcaccctgagtctgatttggcagtgacgaagcgaggtattgtgggactttgtccgtctcccagtacgcatgtgcctcagccggcctctcccggctcctggggccacgtccgggcggtggcgccgtcgagagatgctcgtcagcgaaactggccaatcccctgcaggcgcaagcgcagtggctcgggcgcaccggaagcgcagggggatggggcggcggtgacgcgattctgtccgcgttggaggggccgggccgctgctggagtcgccgcggccgccgcgtgacgtggcacagccagagcctaaaggctagagccggagctgccgcgccagtcgcctagcaggtcctctaccggcttattcctgtgccggatcttcatcggcacaggggccactgagacgtttctgcctccctctttcttcctccgctctttctcttccctctcgtttagtttgcctgggagctt

SEQ ID NO: 29836 - DNA, 2300 bp, Homo sapien
ttttctagttctgtgacgaatgatgggaacaagcagtgtaaggagggcattgatgggaattgcgttgaatttgtagattgcttttggcagtatggtcatttttacaatattgactctacccatccatgagcataggatgtgtttccatttgtttgtgtcgtctgtgatttttttcagcagtgttttgtcattttccctgtagaggtctttcacctccttgagtaagtatattccttagtattttatgtattgcagctattgtaaaaggggttgatttgattctcagcttggttgctgttggtgtataggagagctactgatttgtgtacattaattttgtattcggaaactttgctgaattcatttaccagttctaggaggtttttggatgagtttttaaggttttctaggtatatgatgtcatcagcaaacagtgacagtttaaattcctcattaccaatttgcatgctctttatttctttctcttctctgattgctctggctaggactctgctgcaactttgtcccccaagctaatagttttctcatccccactgggccctgacattctacacctggcttcccttctgcatggataccctccttaccctgctcactctctgattcttcttgttggattgaccccccacccccacccccatggataccctcctgtctcattcaggttactctgtcccactagaccacatctccaggtgggtgccatcttcccctttttgggctctgactctcaacaccaggtcaagcctcacatgagtgctctccttaccctgcttgtgtgcttaccctactccagggtacttctccatggagataccctcatttctctgctctgacaccttatgccaggtggtcccacattgtgacaacctcctcaactcattctgtctttgatgctactcatcaggctacctgtctgtgcttcctgggctctgtgaactgaaaccaaataatccccacacatgtatacattgctcaccacatttgggctccagcagttccacagtaggccactatctgcatgtagatgtccaccttaccttacataagctctgacacgcctccctggtcaatacggctctctttccctcatggcagagatacctaccatgttctgctttaggactgagttgtttaggaagggaagaggaagagctcctttgccttacccatgagctgtttttttgttgttgtttgtttcttttgtggcacttatcttgtttttgaatagttaaaattaactcccctaatttccatctcataatttgttgcatatttttgcacttaattgttgtttgatttttcttttcttttttatttgcatgtgtgtcttttcaactgagtggattggttgtgattttcataaatagataagattttcccccctaatctactaggaaaattttttaccaagccaggaggaaattcctaaataagtgaaagttaccaagtgtcttaggcctggtaacatactagcagagttgtgtcccaacaggcctccacccaattccagggctgctgtaaaaatactcagcacttctgtagagggagtatctgcccaggagtttcgctcttgttcagcattagcactcccccttgtgatttgtcatcattctttaatgtcagaagtattgggttttaagttaagtatatccaataagtgcccttggaaaattaatttttcttatttccttaaaaatatttaggattgaaattcaaagtatcaaagcaatattgataaaatagatcgatcatatggtacaacaatttgagaattatatgcttttattgtcagttattctgtgtgtcaatatattacatttaattttgtaaaaattaggatgagtcaaattgatagatatttttatgtggataaaagggacttatgtctctatacatcaccatattctaaatgaatttgtgtatcagatcaggatacaaatagcaggaagaatttatatcaatgtggagtttttagaaagattatgtaggaattttaaaaacaggattggctacattaaaaagtatttctactgtgcatcacctttcaggtgtttctgcccagttttccttcatagtcagatgctctgggagctggtgctgttgggggagccccttgtggttatggcgccatcaccatcggaatcatcagagactgtattggcacttgttaagtgagtctatttggttactatttctgggttttttttttggatgctgcagtacttaacctgttggtgatatttgcagcacttcccacctgtcgtatttttccccac

SEQ ID NO: 29837 - DNA, 2300 bp, Homo sapien
aggtaattgtcatacacactaataaaaaaagtattttttattttgtgattagaaaaatagaaagtgttagatttaagagtctttaaagtctttggtattttatctttaaacatgctatatatatgtgtgtgtgtgtgtgtatatatatatttttttttttttttttttttttttgaggtggagtctcgctctgtcacccaggctggagtgcagaggcacgatctcggctgactgcaacctctgcctcctgggttcaagcaattctgtgcctccgtctcccaagtagctgggattacaggtgcccgcccgacgcctggctaattttttgtatttttagtagagacggagtttcaccatcttggccaggctggtcttgaactcttgaccttgtgatccacatgcctcagcttcccagagtgctggaattacaggtgtgagctactgcacctggcttatatatagatttttttttttttttttttttttgatatggagttttgctcttgtcgcccaggctggagttcagtggtgtgatctcggctcactgcaacttctgcctcccaggttcaagtagctgggagtacaggtactgtattcccgagtagctgggattacaggcacctcacaagtagctggcattacaggtgtgcactaccatgcccagctaatttttgtatttttaatagagacggggtctcaccatgttggccaggctggtctcgaactcctgacttcaggtgatccacccacctcgacttcccaaagtgctgggattacaggcatgagccaccgtgcctggccttgggtttatattttatcttttttttattattattatattatagacacctgtctctatatgtttaacctctattgaatttttgctctctgtgctagattcctgacagtaagttacagttattgcacaggattctgtcaaaagccagaggagtccacttaagttttacattttagaataagggaaggaataaacagattgtaatattgttgcaactaataaacgcctgaactattatattttttttaagagccagtaaataaactttagcaacatcttagccattattgtttctattccaaatgtacaattctttttgtttcttaaaaagaatcaggtaggtcacagtggcttacacttgtaatcccaacacttcgggaggacaaggtgggcagattgcttaagtctaggagtttgagaccagcctgggcaacatggcaaaacgctatctctaccaaaaatccaccctgacccccaaaaaatagccagacttgatggcatacacctgtagtcccagctactcaggaggctgaggtcggaggatcacctgagcccatgaggttgaggcagcagtgagccatgatcacaccattgcactgcagcctgggtgacagagtgagaccttgtctcaaaaaaaaaaaaaaaaaaaaaaagaaaaaagaaaagaaagaaacaaaaataaagaaaataatctttcctatttaatcccagctagcaagacatacctttcccttttgtactcagaatttgccctgactgctaattggtgttagaaagataaaaagtggtttttaagaaaaaaaaaaaatgtttaaaaattgggataatttgtatctgaaatgatcaaaccataaggttacaatttccaactatgtggctatgacagttgaactgtaaaatataactcataagtcttttggaaaagtatcaaaatttactctttctttaatagggaaagttcatatggctaattcctgatattgctattgtaaggataacaggagctagacttttgaagttactcatgacattagtttgttgataggaaattctttttttgaagagcaggaaaatctgttacatgccattatgctcttaaagtgtagcaataaggttaaactttttgtgttctgcagctatggttttgtttccttttaactatccactgtaaaagcctttttattttaaaatccacactttttgctgaatttagcttgttagtaattgattatgcaagaaatgaatgacaaagcaatttttaaaacattgtttttgttttttcctcagtccttggttttgatcagcaaactaccttatattcatttttttcacactgtgctcaaacagatagcaccagagtattttgaaaagaatgaaccttatttggaagcaggtaagtttaacatatacctttatgcaggagttttaaaatttttactggaaataagtgataaaaatgaagttgatttataacaatttataaaaattcaggtaggaactt

SEQ ID NO: 29838 - DNA, 2300 bp, Homo sapien
gtcccaaataatgagaatccaaaagaatctcctttagctatttaaaaacacaatcaactacaacaacccattcttatgctttctggttaaattgtatcttgctgtacatataacttcaggttaacatggcaaggtgaataataaatggcttataaatctcttactcaaaatctttgggaactgtttttcttactttaataagataaagaattgctcacatattcacctattctatcaaaagtatttatagaatgccactaggtgccaggcactgcatttggccttatcagctactatgattaattcttggttctcctctaaattattgcctcaatctacaaatacagattagagcacatcctatttgtatgctccacaactaacataatgcctggttcttagtggaaacttaatgtcgctgaactgtgttataataaaacatccagaaggcaggccgaatacgaaagcagtagcttcgcattaagaaaactacccctagccaattttcttagtcaaccaggccactacagtattaatgaaatcgaaatctgtcaccaataccaaaaaaaaaaaaaaaaaaaaaaaaccaaaaccaaaacgtctaaacaaacgcccttctgataacaatttccttggacacatgaaagcaagcaattccttatgctaaaaagaccttcaacaacgtcaagaatagatgtttctaaagcctttcggtaaggggccatacataagaatggaaaagttgactgattgacaagcaaatgatgttccctatattcatcttgacagtagtttcacaccaactgttccagaggcaacataaaaaaaaataacagaaatgaggccgggcacggtggctcacgcatgtaatcccaccactttggaaggcctaggcgggcagaccacctgagtcgggagttcgagaccagccttaccaaaatggagaaaccccgtctctattaaaaatacaaaattagccgggcatggtcgcatgcctgtaaccccagctactcgggaggctgaggcaggagaattgcctgaatccgggaggcagaggttgcggtgagccaagatcgcgccattgcactccagcctgagcaacaagagcaaaaactccgtctcaaaaaaaaaaaaaaaaaaaaacagaaatgaggcacaaaaggaggaaagggagaaaatgcgtgctgagataagcatttcgactcaggctgagggaaacgctcaaacagttactgcaaatgactaaaacaatctgagccttaaaacttggttgtgcaagttcggctactagagttcatcatctgttatgggcattgttcttgaaaaagtaccaaacaaacatcctgcctgcgggcttctccgggtgggtgctactaacccttttagttaattctgtgactctgcgtttaaaagaaataaagaaagaacaggatgaacatcaacaagtatttaggaggggcctagagagaacttttcacccctagccgcagcccaagatcctcccacgggaagtgccgtaggaccgcagcccgaaagagcgcgggaggggagactggccacgcccggatgcgccgcggacagggtcctggccggtcagcccgcgggccgctggctttgctgcagccgccccggcgcaggggaggagcgccgagaaagggcggggccgggcctcacctccacggcctggcccagctccaggtcgaagcccaccacacacacgcagtgcagccaggcggagaagctgtcccagcgcagcaggccccggccacggccatcgtcctcttcatcgtcctctggcgcgcctcccgccgccacaagggccggcgcctcgcggccctcggcccctgccaccgcttcgtccaacggccttcgagagccgggccccaagcccgcagggcccctcaaagccatcggccgccccctgaccgttcgcgccgcctccacagcggaccgcgccgcagagcgcgcttgcctccgcgcaggcgcagacgctgctgtcgcagccgctggggacccactcagtccgggcggggctgcgggtcacgtgaccctgggagcggacgtggggacgtcacgctgccgcttgtctcggattgtgaagccggtcctggcttccttgtctaaaagctctttgggactgaaatggctgtttatgaatccttgtcaacctcgttcgcagtcaacgaccagggaataaattattcgtggaatgacacagttcataattattataaggtattattaaattatgaaagcgtaggccgggcgcggtggttcacacctgtaatcacagcattttg

SEQ ID NO: 29839 - DNA, 2300 bp, Homo sapien
gtgtgtgccaccatgcccagctaatttttaatttttttttaagagacggggcctccctatgttgcccaggctggtctcaaactcctggactcacgtgattctaccgcctcagcctcccaacgtgctgggattacaggtgtgacccactgtgcttggccacaactggtgttttgagatcattaataattaataatgaagtagcatctggtaaaatgtgtacattaggatagcttagcttttcccaacagtcagtgaggtgagttagtaatcatcactctcatttaccagaaactgggttttggagcagcttgcctaccacgatcgtggtagattctagctggcactagaatccagaacttttgacttccacgccagtgttctttctaatacaaaaggctactgttctttcctaatactgggtttagagccttacttgatcgcagaatacagtttttcctcttttaaccacagcagttctctggagtaggatggcaggctactttggccaaagacttggcctctaacttaagtgctgtccctaagttcatttttgtctaaaggaagtctccagcaaacgtcactactgatgtctgtgcatacttgaccacctccttgaaaacagggacgctaacacttgctccaaaaaaaaattctaagaatgttaagagggcagtatttgtcaaatggaatggatttcactgggcagtgcagcaaaatgcttaagttctgccgtgttttttgttttgcgttgttttttagagacacagtcgcgctctgttgcccaggctggagtgcaatggctgttcgcaggcgcgatcatagcgcgctgcagcctggaactcctgctcaagcgatcctccttgaacttagccggcctcagcttcccaagaacctgggactacaggcgtgacacctcgctggtttactcatttttctgttgaggtattattgtgtgtttcctacttttactatgctatttatactcaacatagtaggtgctgaataaatactagttagtatcctggctggtccaatactcagtaaaaactgatctcagaatacgaagctgcttgagaccaggcccttgccccagtgttcagagatccacaggttgctgtggaggccaatctgcccaacctggagttccagaaaggtctggggatgtgtgttgagtgagtcacagacagccaaactaagaaaggaggaggtggtagggtggggaggccttgctggagaaggaacaggtgagtgaatgcacagatctctgaatcagcaaactgaatgagtgaaccgcaagccgatatcggagttgtcatacttgttgggctagtcatgtaacctccaggacctccatttccttatctgtaaaaagaaataaatagtctacttatttgcgattatgtgaagattcaataaggtaatatttgtaagtattcgcacttgtacttggcatatcaactggcacaaagtaagcgttcaatgttagccaccgtcaccattatgcgttcatatattttatttttatttttttgagacggaatctcgctctgtcgcccagggtagacagaatacagtggcgcaatctcagctaactgtaacctcctgggttcaagcgattctcctgcctcagcctcctgagtagctgggatcacaggcgcgctccaccacgcctggctaattttttcgtatttttagtagagacggggtttcaccatgttggtcaggctggtctcgaactcctgacctgatgatccgcccgcatcggcctcccaaaatgctgtgattacaggtgtgaaccaccgcgcccggcctacgctttcataatttaataataccttataataattatgaactgtgtcattccacgaataatttattccctggtcgttgactgcgaacgaggttgacaaggattcataaacagccatttcagtcccaaagagcttttagacaaggaagccaggaccggcttcacaatccgagacaagcggcagcgtgacgtccccacgtccgctcccagggtcacgtgacccgcagccccgcccggactgagtgggtccccagcggctgcgacagcagcgtctgcgcctgcgcggaggcaagcgcgctctgcggcgcggtccgctgtggaggcggcgcgaacggtcagggggcggccgatggctttgaggggccctgcgggcttggggcccggctctcgaaggccgttggacgaagcggtggcaggggccgagggccgcgaggcgccggcccttgtggcggcgggaggcgcgccagaggacgatgaagaggacgatggc

SEQ ID NO: 29840 - DNA, 2300 bp, Homo sapien
agtatgtgaggtgacagatatgttaactggcttgatttaatcatcccacaatgtatacatgtatgaaaacatcattttaccccatgaatatataaaattattattggccaattaaaaataaaatagagtacaaagcattaaatatatacactatgtttgaaatctgttttcccaaataactgttaaaacaaaagaaaagcataaaagccaagaggaaatctccacacacttagactcctcagggtgcgtaaatatataggccttacccagggtcttagcggtccacagtagagctttgtcacactaacagcgagagctccttgtagagtccatgccttggcactaagaacttcccctagagagtttggatctagcaatgtggacatacaaatattcatttgtcacacataattcatcaaaaggcttttgtacatgcaagcagaggagcacatttccttttgcctttcccattgacttttgtttctgaacttcattttgaaataattacaaatttaaaagttccatgaataacacaaagaactcccacacattctttatccaaactcactatttttaaacattttgccacattcttccccccatatattttttctgtattatttgagaataaattgcatacattatgcctctgtatcccttaatacttcagtgtgggctgggtacggtggctcatgcctgtaatcccagcactttgggaggctgaggtgggtggatcacctgaggtcaggagtttgagaccagcctggccaatatggtgaaaagccgtctctaccaaaaatacaaaaattagccaggcatggtggtgtgtgactgtagtcccagctactagggaggctgaggcaggagaattgcttgaatccaggaggcggaggttgcagtgagctgagatggcaccactgcactccagcctgggtgactctttctcaaaaaaaaaaaaaaaaaaagctgatgcatagacatctactatttttgcctgcccagctatctttcctcttccttttggcaacagctttaggaaaccatccattttccattggatacagagttagtggaactgtcctttgaagtcctcatcccccaccccaaccccctttctgtccatggaataggcatgtaaggcaacctaggtcaatcagttggggtgtttgaatcttgaaaggggcttaaagattgacaaaggatgacttgattcctaaaggtggtgccctgaagaggctgcttaatggctcttgctacttattagctctgcttctctgtgacttgcttttttagcatttcttttcattctcagtgccaccccatgtctttccaataattcccataggcttaggttggccggtttctgttgcttgcaaacacaggaccctaatcaataacagctgacttgaaaaaattttgctttcagcaacacttgcccagatggaactgtgacttgaattgcatagaaaaaagttcgccctgggtacacccttccctaatgcttagtgtggcaatgccttatagacttatggctctgctgttcagtctaactaatgacaccctgttttcacactcccagaagtgaccattcctggaaaagcagagcagctcttctgttagttgcagcttttacaaatgtctccagcaaaggggcactgctttagtcagtggttattttaactcttgtcacccccaaactgatccatctggttggcagagtgatgaaatacaatctgccttgaacacaaaatcacagggggctccctccctgattgactctagggcctgctgccagcaggaagtgaagataccacttattgtctttcctgacaatctgttcctgacttctaggaactcacacatatggaacaacactttgatgtctccaaaagacattcagacagtgtagtatgaatctatcctcaggaaaaaaaatctccataaaagcataatcaagctttgccgccgcgccggcgagcgccgcccgggaggcagcggctggaggagcggacgggccccgcggggcccgagggcaaggagcagccgcctgtcttggcctcccaaagtgccgagattgcagcctctgcccggctgccaccccgtctgggaagtgaggagtgtctctgcctggccgcccatcgtctgggatgtgaggagcccctctgcctggctgcccagtctggaaagtgaggagcgtctccgcccggccgccatcccatctaggaggtgaggagcgcctcttcccagccgcgatcacatctaggaagtgaggagcgtctctgcccggccgcccatcgtct

SEQ ID NO: 29841 - DNA, 2300 bp, Homo sapien
tggtctcaaactcccgacctcaggtgatccgcctgcctcggcccccccaaagtgctgggattacaggcgtgagccaccgcgcccggcctaattgctactctttattgaacaacatggattaacattttgaagtctcaccacatcaagtgaattaactattattaacatgtcatccatgagaaaaaagaggcttgaaaaagtttagaaacttgcttaaggtcacacagtggtggagcctgttattgcaggaatctgaagaatgaagtcacctttgattctaaatgagtaagtctccttctcactattttttcttaaagttttcatttagcccttgcaaagtcttccttctttagaccaatgactcctcatcttgatattgtaagtgggggaaataccctcttttttcactttggaaattattcaatctctctttggaagaaacatgattttaaactttctggacgctccttctgtggaagaatccgcgcaggagccctgggggcacataataggttcagtgagaaagactgtcattcgaaatggaatgcgggaactaagattttttttttccgggaagaaaacataacgaatttagcagaggggagaatggtccttctgttaggtgcacaaatcctaagacttcagggagtttggcggctcacacttaaggtagctgcgggtgactgtgttgcccacagctaagatggctgctaatgaccatctcctttggctgggtctgttcttttgctcgctagtattttcatcgagaattaaacagaataaaatttagtaaaagttggcacccccttgctaagtagataaaataagaaggtggcactgtttgtttgaaaaaccttctacggcgcaaattgttcttgcccttaaccaaaatggtcgttaaggttgtcccgaggtttgaagcttccagcccttaactaagatggcgcctggaggcccgttaaaaattaccttgcccttttttctgccctctaccaacacggcttccgtggcgtcgttcacgtgacattcctggactacggcgcgggagagggggtaggagggcccttgaagggtgcgcgttcccgtggcggtgcaccgggtaggtttcagtcagagtcactatggcggccggcgctggcaaggtaagctgaggcggtggtggcggctagggaggtaggacccgtcgtggcgtcctggctccaaatcctcgtagcctgcttgcggagaggtcggcggaggtcgtgcctagcggtgtgggctggcgggggtctggctggagggggcgacggctgaggcgggcgggctgaggcgcctgacggccgtttgttttgatgttttccccaccaggtcggaaagtttcctgcctcgtcgggcgcagcttgagcttgccccatcggccgcgatcggtggaggctgcggcggatccagcccggggcctcaaggcctctccccaacctccgggccagtctccctcccccaccttctcgtccgccgggagctgcggctgccgtccctgagatgcgaccctcgcgggggcgaccctgaggggaggcggcccatgtgctgagcggcggcccagaagcctaggcgtccggggaccaacttcctgccgcctgggaactcgagcctcccggtgtcgcgcctcgctcggtccgcaccggcctgcggagccgggtccccgccctggtcgcggggacgctcgccaggtgcccaggagtcccgacttggccactgcccgcgccccgccggcctccacgcctcgcgcggagaacctcagccaccgccgtctcggatcgtgccaggccggggaccgcgtcccccttcccggggcggcctccgctcagcaggggcgatgcagactgtcccgccggccgtctagagcccctccgtctccgtcacctctcgccccttcactccgggcgaggactggcggtggctgcccagaggtgcccagccacaccttccttcggcccaaaaggactttcctggccgcgccgaaccgacccttcattcatgctgcagtgctgcaacgtttccgccaccaagggggaaaagcggccgcgatctcaaaccaaacacaagaattggcgtgtgactcatctgcttggatacctccagtccccaaactgtgttccaggagttttcttggccgaagctgcccgatgtttgagccttttcttcccagagaagaagatggactgaaagctgccagttggggactttttgtgatcacggcgttgcagcgttttaaaggaggtgatggggcttgcgctggcttgtcttcccacccaagtgaagag

SEQ ID NO: 29842 - DNA, 2300 bp, Homo sapien
cagctaatttttgtatttttagcagagatggggtttcactatattggccaggctggtctcaaactcctgacctcgtgatccacccaccttggcctcccaaagtgcagagattacaggcatgagccactgcacctggcctcaagaaaaattatatatcacgtggaataggatagtagtctctgcactgattttcgttgataatggctgttcttcttatcaccattttgctatttctttgtctgggctattacagggttattacagaaatttccagaaagacccctgcctgtcgaatgtttacttcaagcttgagctcctggtatattatgaggaaattatatgataccccaggagaggtcttcctttcccatgccattgtaaaattcctaaagtaaaattaatttgccttcttgtcaaagaaggagccaatgttgttttaaaattttagcttgagagataggtggggaagaaattaaatagacaagtaatcactattcagaagagaagggagagtcattgtacgaggcccaagatacttgcccaaaaatatcgcagagaaaaactagtctttggggtcctattttttgagtggaacatttgagttatttaaaattagaattttattttggtcagattagaatttctagggtatgtcatatgtgtttttaaattgaaagctcttaaaactcctattgtagtttaatgtcattatccattaatttacataaatctgatttggatctctattttcatcgtagactgtgtaggggcaatttttcctaaaggttctgtgacatagtgctaccttttttttaaaacctgtcttgcccaggcattattgagtgccccctggtgccagcatgtgtatttcacgactgtatcaacaaatcatgatcatcttctctggccattgtgccctttcagattccaaacttgttacctctcagtccttcctacaaacttagaaagtctaatatcttaatgtttacttatgtagcaacctccctttctcccatccctaaatcctcttgtaattaattattttcctttggaactttttaaatctacaatttccttataatatggtaaccaatattaattttcttgttctgcgccaagtttgattttatacaaattgtttccagtttgggtcatgagcacaaaaccaggtatttttaaaaatctatataacccttcaatgaggcagtattaattttattaactcattaattcaaccaataattcttgattgtttactgtgttagatattggggtatccccaatacctgacagctgtgagcaaaacaaatgccctacacacatgaggtgtacagtccagtagaaaagataaacaataagcaaattaatagataatatgatgtccaataaggacttcaaaggaaaataaagcagagtaaagagccagagaatgacagtgagctgtttttcacatgagtcatcagaaaaggcctctttaaagaattgacatttgaacagaaaaacgaatcaagggcgtcaactgtttattgcttttattgcttaccatttgaccaagcaattctacacataggattcaccctaaaaaaaaaaaaaaaaaaaaaaaaaaggattgtatatagtgtttaaacactgaacagcctaaaatgtcaaaaataaagggttgggcaaataagttatatatactataactatttttttgttgaaagagtttcatcaacagaaggatagggaacactgcatttattgtgatcactccctatttaatgtttgtttttacatgtttataaatgcataggaaaaaatccagaaggaatatcagaagtaattttctgtgtgttggggagatgaagatcactttggtttttttttcctctttgctatctgtattttgacgctttctgcatcaaacgtggattgtttatacactttaatcaaaagcaacagctctgacaacccaggttatgcattagctacaatcctgtatggattattcttttattctaatgggccaagaaaatgatggatatacttttgcagcccaattgcagaggttacacatcgatactgagaatctccgggaggagaaggacagtgaaatcacaagtactagagatgaattgcttagtgcccgagatgaaattttgctccttcatcaagcagcagcaaaggttgcctctgagcgggacactgacattgcttctttacaagaagagcttaagaaggtgagagctgagcttgagcggtggcggaaagcagcgtctgaatatgagaaagaaatcacaagtctgcaaaacagtttt

SEQ ID NO: 29843 - DNA, 2300 bp, Homo sapien
cctgcctcagcctcccaagtagctgggattacaggcatgcgccaccacgcccagctaattttttgtatttttagtagagctagggttttttcatgttggtcaggctggtctcgaactcctgacctcaggtgatctgcccaccttggcctcccaaggtgctgggattacaggtgtgagccactgcacccgacttgaaagaaattgctttgcactgtgcttggcacagaggaacagcaggtgttcattcaatgcttgctgttgtaattattcaggcttttatcaacagagggctggcctgagactctgccatatctcagaacctagcacagaacctggatgagtacagagtaagtgctcaatgtatgctgtggtaggcagagtaatagcccccaaagacgttcacatcctaactctcaggacctgtgaacattcccttaaatggcaaaggggaattaaggttgcaaacaggattagggttcttaatcggctgattttaaaatagggagatcatgttggactaaccagctggcccaatgtcatcttaagagtccttaaaagggccaggtgtggggaggttgaagctgcagggagccgagattgagtcatagcactccagtttgggagacggagtgagacaaaaaaaaggctgggcaaggtggctcatgcctgtaatcccatcactttgggaggcagaggctggtggatcgcttgaggtcaggagttcaagaccagcctggccaacatggtgaaagcccgtctctattaaaaatacaaaaattagcggagcgtggtggcgggtgcctgtaatcccagccactcaggaggttgaggcaagagaattgcttgaacccaggaggaggaggttgcagtgagccgagattgcaccactggactctagcctgggcaacggagtaagactccatcgcaggaaaaaaaaaaaaaaggaagatgtgcctatggagagaggactgtctgaggtctgagagactccacctgacattgcaggcttgcttttctgttttttttttttttttttttttttttgagacggagttttgctctgtcgcccaggctggagtgcaatggcaccatctcagctcactgtaacctctgcctcccaggttcaagcgattctcctatctcagccttcccagtagctgggattacaggtacgcgccaccacacctggctaatttttgtattttaagtagagatggggttttaccatgttggccaggctggtctcgaactcctgacctcaggtgatccacccaccttggcctcccaaagtgctgggattacaggtgtgagccattgtgcccagcccattgcaggctttcacagagaaaaggggcaggagtcaggcgcgcaggcagcttctggaagttagaaaacacaaggaaacagattcttccctacagcctccagaagggaatgcatcctgccaacactttgtttttagctcagcaagacctgtgtgggccatcgaacctacagaactgaaggataatacatttgtgggtgtgtgttttcaaagacactaagttttggtaacttgttacagcagtaactggaaactaagacatgcaacaagccttattgttcatttttaccaccactactgggctgttggttatggtggaattacacttttctcttccattaggctgtgtgaactccttgaggttgtgcaatacgtttgtctgatttactactggttagcaggctctgagaagaatggctggtacacaggcggagctcaataaaagcccttactgaattttattcaatctatatgtggatgaagacctccgccccgcgcgcccctcccgcaagtcccactgaggcccgacccattctgtccggctcccagcccccgcgggtccccccaccccggggctgaccgggtgattcaggcagccctacatcctgctggggtggtgggcttcgagcgcgggtcccaggacgcagtggggcgcagtgcctgcggcaggcggcaggaggcgagcgtggcccaggaactcccgcgggagggtcgggacggggcggggcttgggggcggggcggctcagcgcgcaggcgcggggccaggcgcctcgcgcggccaggggcgggcggccgcagagcagcaccggccgtggctccggtagcagcaagttcgaaccccgctcccgctccgcttcggttctcgctccttcggcccttgggcctccaaacaccagtccccggcagctcgttgcgcattgcgctctccccgccaccaggatgccggtaaccgagaaggatctagctgaggacgc

SEQ ID NO: 29844 - DNA, 2300 bp, Homo sapien
ctagcattggtgagatttgcagggataactagctggcctcttaaatctatagataggaatgtaaacagaaacaaactttttatagggaaaagatatctaggacataatgattaatgaaaagaaaaaaattcctacctatcgaaaaacgtgaattcaggcagcaaacacacatgcatgtatacacatacacacgtgcacacacgcatacacacacaatctggtaggctgtatactaccagtttagcaggttgttacctctgggatgcagtcactcctttttgttgtgtatatttgtgaaatgatttctttcaatttttgagacagggtctcactctgttgcccaggctggagtgcagtggcgtgacgtcagctctctgcaactttcacttcccgggctcaagcgatcctccaacctcagtctcctgagtagctgggactacaggagtgagccaccatgctcggctaattttttttttttttttgggtagagagggagttttgccatgttgcccaggctggtcttgaactcctaagctcaaagcaatcctcctgcctcggcctcccaaaagtgctggggttacaggagtgtgccactgcacctggccattattatggaaaattttaggcgtatacaaaagtagagacagtggtgtcttacatgctcatgaacccatgatccagtgacatccgttaatggcattttggaatcatatttcatctgtttttgtcctcaaatgttttgaagcaaatttcagcattacatcatttcactcttaaatatctcagtatggttctctaatagttgaagactccatttacatttatataaggagcataatttacacttgtgtaacccaaaggaatgaccaagcctgtgcttctctccccagatagcaaagccattgtggatgggaacctgaagctcatcttgggtctggtgtggacgctgatcctccactactccatctccatgcccgtgtgggaggatgaaggggatgatgatgccaagaagcagacgccaaagcagaggctgctggggtggattcagaacaagatcccctacttgcccatcaccaactttaaccagaactggcaagacggcaaagccctgggagccctggtagacagctgtgctccaggtaagtggccagggctgcctaaaccatctgtccaggatgggggtgtgtgggtcccaaacattctggttttcaacgggaatgctatctttgctttgattagcgtatttctccaggtcttagcccattataagcccattataaggaaactaaaactggctctgtgtacccttccaagggcagattttctaggtatatccatagacatgtttgagcatcaagttgagtcttttatccaaattccaatgaaggagttggtgcttagaagcaagacttgggtttaggttccagactccaaaatcctgtgtcttcccacattggtgctcagtttctcattggatttggagaaacatttggtcctattaggtggcttggcatgaaaatctgaaaacttccatggagtggaaagtacccatttttattaaccactggtttgactatatatggcattctccacccttttctttctgtgttgctgtgaaatagcatttggtcaggatccagttggagccttttccacccttgatgggctgctcatttcttagtggttgagtgtatatgaaggttgtaattattcccactggagggtttagattgatgggtagagtttgctggtacacactcagtagaaagaccagagtcagagtttacacacaccccctaaagttgattttaataaaaaaaaaaggtattaatcatattttccatttactgtgtattctgtatttactgggcacattagtatttagttagttagtggttcttgacatactcaaagcagaactagtgtcagttgggtaggggagggctgaaggcctcattcttacttgagagcctataagttggtgtcatccaggaaaaattcaaagtgcagcattaattgatttcctaatatcctcttctttacttccatttaaggacacattttaggatacctctttccaatttaaacctgggagtttttactctagtcctttacctcatgtgcttacaaaggcttttaagataattctaggtttgtgcctttgagcaagtggatttttgaatcacacaggatgctattctagactttttagatatatccaggaatagagtaaaaaataaaatccctcctgcataaaggcaccaggctttttccaagctttgtttattttttaacaccac

SEQ ID NO: 29845 - DNA, 2300 bp, Homo sapien
cagaggcagcagcaacaataagcacagcagggtgacaggtgacagcttgtttaccagccccaccccacccccacaaaaggagcccaggttcattgtcaaaacaagttgctagttttgtgtcccttaaggggttgggagagctgatctggggctccaacgatgtgcctgtgtgtgtgtgtgtgtgtgtgtgtgtgtgtgtgtgtgtgttacactgtcttgctctgttgcccaggctagagtgcagggttgcaaacacagctcactgcaaccttggcctctcaggctcaagcaatcctcctgcctccgcctcctgagtagctgggactgcaggcatgcatcaccatgctggctaattttttaattttttgtagaggctgggtcttgctgttacccaggctgagggtgttgaactcctaggattaaacaatttattcagaagcgacatcatccaagaacaccaaggcaactttacggagcaaatgttttatttaataagttataagatacaatttacagtcggcgtttgattccagtttggcttccgtgtcccagcttacaacacccgtggtcctttcacatcaggctccgggctgttccactttctgtagggtgggcttttacccccaacactcgccccagatactacacctgccacaagagtggccacttcctcaggactaagcagcaaaacctaaaggtctgcctgcccagaccacactacacatttgggctcaggcaacgtccctgacactttaacctcattccaaagccagctcaggtctgcaggaaggcaggcaaaattccctacacctcatttctggatttctgcaccacacagctctcactgtttctgccaatggtgaaaagaccaccaataagctgctgcccttctctcccccaaccattcccaactttcaggccaaagacccgcaggagtttcattctgtcctgtctgtacagatcattattttccagaaaaagtgacccatgaagttggctggggcgggtgtggagtgttatgtcatgggacggaccttgggatgagggcgttaatccatgggcccctctgagatcactttaaacattttggtaagactgcccaggctgatgaagggctggagcgtgtgttaaaaacaagggctagtgttggttaaaagggatctttggcaagtgggaaactgctcgccactgcagaatttcttcagaccaaggaagggactgaaacggacttggaaaactaaagcaaaaccatgactgccgggatggtctcgtgtggtgattctgcaagaaataatcaccagagcgaggggacaggtacttgagagacatgtgggcctggctgccactctgccctctgagtttctgtagggtgcccggctgccactctgccctctgagaagtgtaagaaggccacagagcatgggggtgttggcgatgaggagcggtaaagcagtgctagtgatctaatagccaaatacattaacacggacactggaagagattaagcggattttaagtcatctcctttgccaaatgacaaccaaactaggtgtcccctttttctctgcccatcttcccctagccttgtttcataaatgctgaagagtgaaccagcagctcaggctagccagttttgtttttttgaaatgtcagtctcattgtgttcctggtctgtctgctgcagtggctggtctgttccaccaagagttctggtttgcacctagtgtactcaggatcttctcagccccctgaacaagcttgcatttcttaagattctccaatatgtccctcaagagtccagtctaggacttatttctgaaggcattttacaacagcaatattttagggatggggtttcagccccacaaacaggctggagggctttgtataaaatgaattacaaacaagcaacaaaagcaaccacaagaactctctccaggatttgagaaaactgttttaaggcactgtgacatgaaaagggctgccagggatgtgttcctccccccacttcacagccagcacataatcgcccctctccttgacgacgtatgtgacgttgtattgctggttgcctacatgcttcatggagacctcctcgcagggggtggtgggcccatggaccccgatcagcagcatgttggagcctaggaggcaaaaggtggttactccacccggatgcatcaggacaggcacaggaagaagaggaaatatgagagccaaaggtaaggtgcttccacgataatgctggggcccctaagaggtgggagagcgtggcaattacaagcagaggctcatagagc

SEQ ID NO: 29846 - DNA, 2300 bp, Homo sapien
tgcttttaagttcagcttacaaaagttctcattctttttataaatccagctagaatttccagataaaataaaagttgcccaattgaatacgaactaccccaaattcaaatctacctactgttctatatttttatttgttaaatctgccaatcctaaacccaacaaacctaaataattacttataaggggtttgtggccaatttataaacattttatactttatttaatatgccctattttcttttaaaagttcttcaattgtctgaactaacaaaaaagctacttttaaaaaatactaaatcatttgaattctaataaagtaaacaaacaaaacattgatgataacctaaagtgtttataaatgttccagaactgtattcagacaaaggtttcaacgtaaagtcatgaacctgaatcaaaccctaccaagtgcacattttataagagagttacaagattttctatatagttggcccagcagctctcattaagtccatgaaataccgcatattccatcttaaaacacacaaaaagagtataccatggctctgagtctcttaaacatttctacactttaattctaaatcttttttctggttggaagatgcccattcaccaagaaagacaattaaccattccctagagctcctttttttttgtttttgtattttattgagatggaatctcactctgttgcccaggctggagtgcagtggtgcaatcttggctcactgcagcctctgcctcccaagttcaagccattctcctgcctcagcctcccaagtagctgggattataggcgcccaccaccacgcctggctaatttttgtatttttagtagagacagggtttcaccatgttggccaggctggccttgaactcctgacctcaagtgatccacccacctcagcctcccaaagtgctggggctacaggagtgagccactgcgcccggcccagagccacctttaccagagattcaaccaggcctgaggtcttaggttgcagacaacagggagattcattgcagcacgaactcaggaaaccatttccttccatgtactatttggggttatcttatagaattcctggcatgcttggccagtatgctgcctggatgtatgttggggatatatgtataattttccctgtggctgtggccacagacccatcaccacaagaggggttggtccacagatcccgatgctggcttggagttattcttattccctacccttttcacagaattgtctttgccaaagtccattaatataccttgattggattttgcttttttttttaatttttttttgctttacagatcttcatagtttcctgcccatatctctaaaagtcattttgcttgagttgatatcctacagttcttacaagacctttctctcccagggtcacacaactctcgccaatattaaattaatatcagcttcaatcacgggtctctccatgggtttcacgggctatttgctcgcagagtccagggacattttcctcatccattccatcagatccccaattgctttctctggcaacacactcctagtatttgtacggtaaagctgcctaaaaaaattaagtaattcaaactactcttgaccttactttacaccaccagggcaattagagtcacagtctgggtgtgtctgaggacagcaggccgccaaatcccagtgatttagagaaaaccgagcagaatttcccatgcctcctgcctcattgtcccccagcagaaggttccgtcaccccaggtgccctctagggtggaccacttccgagttcatccactgtcaggaaaaggcacatggcatgcaaccgcaagaccgatgactagatgtcagagctggctcccggttgggatatgagtgactttgtggaggatggcgcctaaatgaggcatgccaatttctgcaccagggtgacgaacataagggctccttaaaggctagcccaatgtatctgtatttccttggggattaaaacccatgatcttcagttcctcagagaactgaaagttgcaaggagaaatccagtaattcctgttatctgcaggctttataagtcagtggagcctgcggaagtggccagaatccagcactccaagcactgctgtcttctcacagagtcttgaagccagagcagcgccaggatgtcacgggagctggccccactgctgcttctcctcctctccatccacagcgccctggccatgaggatctgctccttcaacgtcaggtcctttggggaaagcaagcaggaagacaagaatgccatggatgtcattgt

SEQ ID NO: 29847 - DNA, 2300 bp, Homo sapien
tcaagtacaagttcaggggcagatcgtgtctttactttgttactttgttcatcatggatttttcttcattaatttttgatttttcaaaatattgcattgaatgttatttagcttgattactgagttatttggtaactccttaaattttgtgcctaaggctagtgtctcattcgccttgccctagtcctgtcttgacagatctaatccattagtcgtatcgccaccagctcagagtttgcaattaggcccttttgtacctataaagaaaggactgacaaaaggaattaatcctgaggacgtaaatacctgctttttttttttttttttttgaggcagagttttactctgtcacccagcctagaagactggaatgcagtggtgcaatcataactcactgcagcctctaaatcctgggcttaagtgatcctcccaacctcccacctcagcctccagggtagctggggccagaggtatacaccaccatgcctggctaacttttttatctttagtagagacaagttctcgctatgttgctcaggctggtctcgaactcgtgggctcctgcctcggcctcccagggtgctcgggttacagatgtgagccactgcacccagtcaaatgcctgcttttgatgtcacttcacagccagcaactggagaccaacttctttatctccgagtctcaatttcttcatctgtaaaatgaggatagcaattgctcctttgcagtttattctgaaaacagagtatcaccccaactgagtacccctgagggccaggcaccgtgctgagtctgccctttagttataacctctctaaattttcacagccctaccatgtaagagatactattaccccatgttaaaggtgaggaaaagggcacagagaagtttggttatttgtccagggctgaacagccagtaagtaaaagtgtatatgctttaacgtcatcagcattcccgacgtgagatgacccccaagcccccggagatatttggcaacatctgtcgaaatttttggttgtcacaactgggggatgtgattggcatctagtgggtagaggcaggggatgctgctaagtgtccaataatgcacaggatggtccccacaacaaagtactatctggccccaaatgtcaatcgtgccaaggctgagaagcctgctctatgctatgctcccgagtcagaaagttacatgagcacttagcacttagtgctccatgaaaggtagatactgttgtggtttttgttattattacattttgtctctatggctgggggttcccgtggcttccagggaagctgagttcccttggtaccacacccacactgtgatcaagaaccccgtctctaggtcaaacgtggtggctcacacctgtaatcccaacactttgggaggccaaggtaggaggatcgcctgggccctggaattcaagaccagccggagcaacatggtggaatcctgtctctacaaaaaaaacacaaaaattagccaggcatggtgacatgcacctgtggtcccacctacttgggaagctgaggtaggaagattagattacttgagcctgggggattgaggctgcagtgagctgaaattgtgccactgcactccagcctgggtgacagaacgagaccctgtctcaaaaaaaaaaaaaaaaaaaaaaaaagaacttggtctctggagtccattagagtatcatacgtcgcattcagcaatgatttatgagcatctgctgctacatgacaatcctgttccaggcagcacagacacacggaggtgccccctgcccctatgtggcagcctggtggagagacaactttagacaaggaaacacacaagctcagagataataagatgttacaatgcatgccatgatgtgaaaaacctgggcaccatgagagagaagacgagggaagaccctgatggggtcaggaggccaggagggcttctctgagggtgtgacatttaagctgagccctgaggctggaggaaggaagagccctgtaggcggagagaacagctgtgccaaggccctgaggggggaaccgaaagccaggcagtgcaagggcagaccagtaggggaggaagaggggagtagagtgttatgacctgggaaatgtgagcaggtagaggctacattaagaagtttgctctttgaccaataaaagccctggaaagattttaatcagagcaggcctgcccttcagaaagtgactcttgaggtccaggcacagccctgtgtggaagatagtgtgtgaggctgaaacccagagtgtgtcatcatctggaaacaaccctgca

SEQ ID NO: 29848 - DNA, 2300 bp, Homo sapien
tttgggatgactaaaggtgccatctggaaagtaccaggcccctgggactgctccctggtctcccacctaggtgggattcctcagtgacagcactcaggggtatcaccggctcagggaggggccggaggtgagttcccttatctcctcttgcctccttcactgtaaaactggagctaataaggtttctctcctgtcagccatccagtggagataagtcacccagaatgtgactcccacatggggctcaaaaaggtgtttctaaatataaaactctgagggaaaaaaaccctcgggatatagaaattccaggcccttggagacgcccagggtcacaggctgtgagttaaataaaaaacccaccaaactgatgaactacccatttttaaggttttggagagggaaaattaaaagactaaggagcaattgttttaaactttataccaggtgtattgatggcttctaggctggggccttccaggaagtcattcatcaatttcattgtctatttattcaccccctggactcctgttttggtgaatgttcctgagtccaagatgctaatccaataggtggccagtagtgactgaaggacatttaatccccacattttgtgctatctctgtggacctgctctggggatgttggtggactgctggcttggaaaggttctgcttcagccgtaaggagagataaagccagagaggtgggactgagcaacccgctgtttggtgaataaattgccactgaaactcgggggccattccctgaagtgaatcacatgcagccattgaagtctaagtgataaggcagccaacaatttaaaggaaaatgctccagcccaagccagggggactgtcccaaactccggatgaattccagctgccctgcagagcagggtttacaggcatggggatcactagtggcttcagagatgcccctttgccacttctccgggacttcttgactgtgtcctattcttaaaacccaggacctgcaccactcagccaggctccaccagcgtggaggccttggcaggctgaggcccaaaggctgcctttgtgggggatttaaacggccaagagagtcttgctgagccctggccccttgacgtctggagtggcaggccaagcactcagtgcagcaggaagatctgggtgccactaaggcccctaacaggtgtagtaaatatctgttaaatgaacgaatacatgttttgatgaaagaagcccacagtgcagtgtgagcccaaaggggtcttactgaaggcttcctggaggaagtggcagctaaactgagacatggaaaacacggaagagtagccaggccaagctggggtttaactgtccctaaaagaaagaaacgaccatagcaggggtttaaccagaggtggccgaaggcctttccaggtgcccatttctcccgtatagctttggagtcagacgatcctcggttggaattcccagttcagtccttacagtctgacgtcccgcacaacccgacgccggcaactgtctccaaacacccgagagccagggcgggagcatgagcgcctacggtgttccttggggtggagccctcgcagtgtccagaggatttgggggctcctgcgcccccatttctcccatttcctggactatccagggcaagcccctcacctccctgagcctcggtgtcttctgagaaaagaagtcgaccccagtgcctacctcataggattacgtgagacaaccgatgtcaagcagtgttgctttgctgcctgagaacccctgcctgtccctttctctctgatgcccttcggggcagagatccagagatcctgcctgagtcactttggcgggtttaatgcccagccgcgccaggcacacagtaggtgctcagtaagtgaaacagtgccgggaagaattcgggccggggatgtggaactgtgtgtggctctgcgggctcagaggccctccccgcgccccgccaccgtgtgcgttccggggcggggcggggcgggggcgggggcgggggcgggggcgggaccgggcgctcgggctccgcccccggtacctctgtaggcgatcctgctctcgccgtggctttcgggtgctaggagacagttgccggcgttgggttgtgcgagacgctaactgtaccctccgggtttaacgctgtgaggcagcgcgcggaggaactggggataagcgccccggagcccccaaacagagcgcggccgctgggggacagcgcgcggcgccgggtcggggcggggcggcttttctgtcggaggacgcgaaccggcacgctgcgcctttaag

SEQ ID NO: 29849 - DNA, 2300 bp, Homo sapien
ggctgacccccccacctccctcccggacggggcggctggctgggcagaggggctcctcacttcccagtaggggcggctgggcagaggcgcccctcacctcccagacggggcggctggccgggcggggggctgaccccccccacctccctcccggacggggcggctggcctggcgggggctgaccccccaccttcctcccggatggagcggctggccgggcagaggggctcctcacttcccagtaggggcggctgggcagaggcgcccctcacctaccggatggggcggctggccgggcggggggctgacccccccacctccctcccggacggggcggctggcctggcaggggctgaccccccacctccctcccggacgggtcggctgccaggcggagaggctcctcacttcccagacggggtggctgccgggcggaggggctcctcacttctcagacagggcggttgccgggcggagggtctcctcccttctcagatggggcggctgggcagagacgcttctcacctcccagacggggtcgcggccgggcagaggcgctcctcacatcccagacgggccggcggggcaaaggcgctctccacatctcagacaatgggcggccgggcagagacgctcctcacttcctagatgggatggcggccgggaagaggcgctcctcacttcctagatgggatggcggccgggcagagacgctcctcactttccagactgggcagccaggcagaggggctcctcacatcccagacgatgggcggccaggcagagacgctcctcgcttcctagatggggtggcggccgggcagaggctgcactctgggcactttgggaggccaaggcaggcggctgggaggtggaggttgtagcgagccgagatcacaccactgcactccagcctgggcaccattgagcactgagtgaaccagacaccgtctgcaatcccggcacctccggaggccgaggctggcggatcactcgcggttaggagctggagaccagcctggccaacacagtgaaacccgtctccaccaaaaaaatacgaaaaccagtcaggcgtggcagtgtgcacctgcaatcgcaggcactcggcaggctgaggcaggagaatcaggcagggaggttgcagtgagccgagatggcagcagtacagtccagcttcggctcggcatcagagggagaccctggaaagagagggagagggagaccgtggggagagggagagggagagggagagggagagcaattttttattttttgtagagatgaggtcttactatgttggccaggctggtctcgaactcctgggttcaagagatcttcccacctcggcctcccagagtgctgatattataggtgtgagccaccacacccagcccaggaaaagtttttgaccatttatatgaatattctatctaggaaatcgctgaaatggttcccacagatgtgcatatctcatcagggggtcgttcagtagttgcacatacctctgggtggccatggagaatgatggatttgtaacgctaaccagcaaacagtgccaaagccagcagctcatatgggtatttttgcctgtgagttgtggtttctgatatctctccaggatagacactcagttttgcctgggcatgatggtgcgtacctgtcatcccagctacctggggggcactgaggtgggaggatcacttgagcccgggaggtcaaggctgcagtgagccatgatcgtgccactgcactccagcctgtgcaacagagcgagaccctgtctcaaaaaaacaaaaaaagacactcagttgggagtttccactttttcatgctgttttcacctattgactgcatctgcgtttcttctgagtgtttccacagtagctgggtgttattcctgctcagtgggttgccgtggcagccttagctgtgagtgagtgacaaggcagaggtttccatttccttggctggaattagctgttaagctccccattagctgttccttttcctggtccagggatgccctgcaggactcttttccttgactgaggcatcgtcttaccttaactccccagtgggcagaaaatcttggttttaataatttgagttggtgagaatagagcaaagacacagaaggtgcttgagtttgttggggcttttgcttttgccgttaaggatggggaggaggggccctcttgtctaggatgaattgaaggtaaaggcagctaagagaaggggagtgaatgcggatccacttctgagggaggatgttggggaaaaagatggaggtggattggcat

SEQ ID NO: 29850 - DNA, 2300 bp, Homo sapien
cagaggatgcatttgaagcaagttctggcagcttctgaaatcaagcttttttgagaaagataatacttgggtctgtggggtctgtgtttgctttctccacctcttcccacatctggaacaagccctgtctcctctgaaggaagaagaaagtaggaaccacagaactggagagcatggccaaggttgaggactgaagcttctggaaacaacacagtgggattttgagaaaataattgaggaaggagatccccgctgactcaactgtcctgtgcaaggcaaccctttgccccccaacccaagcaaaaccagcacatccatttatgaacaaatgccttcagtaaatagatgttgggtcaccattgggtaccaggaactgggatgcagtggtgagaaacacagacaaggccccatcctcatgggggttacactaaagtttcccttcccactgcagcccctcaattggtggtaatacagtgcagtatggagagcactggctagaatcagacagcccatgccactgcttataactgtgatcttgagcaaataacttagcctctctgtgcctcagtttcttttcctgttgccaggctagagtgcagtggtgtgatctcggcttactgcaacctctacctcccaggttcaagcaattctcctgcttcagcctcccgagtaactgggattacaggtgtgcaccaccgtgcccagctaatttttgtattttcagtagagatgggggtctcaccatgctggccaggctggtctcgaattcctggcctcaagtgatctgcccgcctcagcctcccaaagtgctggaattacaggcatgagccactgcgcctggcctgtgcctcagtttctacctctaaaatggtgatgatcatagtaatagccatctcaggattgtgtgagggttccatgagatgacatatgtaaaatattttgcatagtgcctagcacaaagtaagtctttactttgtgggtctttccaggacggcctagatagaacacctactatgtgctgggagtcacaagggacactgagagtgggtcctatctttggggagtgcttgacataggagatcttgaggagaggagatgctagatataattttgtaggctgggcgcggtggctcacgtctgtaatcccaacactttgggaggcgaggtgggtggattgcctgaagtcaggagtttgagacctgcttggctaacatagtgaaaccctgtctctactaaaaatacaaaaattaggccaggcgcggtggctcacgcctgtaatcccaacactttgggaggccgaggtggacagatcacgaggtcaagagattgagaccatgctggccaacatggtgaaacctcgtctcgactaaaaatacaaaaattagctgggcatggtggtgcatgcctgtagtcccagctacttgggaggctgaggcagaagaatcacttgaagggaggcggagggtgcagtgagccaagatggcgccactgcactccagcctgggcgacagagcgagactccatctcaataaataaattataatataatgaaaaaaatgtgtagaatgactcgggcgcagttgctcacgtctgtaatcccagcactttgggaggccaaggtgggcagatcacttgaggcgaggagttcgagaccagcctggccaacatggtgaaaccccgtctctactaaaaatacaaaaattagccaggcatggtggagcatacctgtagtcctagctactcaggaggctgaggtgggagaatcgcttgagccctggaggcggaggtagcagtaagccagatcgcgccagtgcactccagcctgggcgacagagtgaaactgtctcaaaaaaacaacgaaaaaattgttgaatgaatgaatgaatgcatgaagaaatggataactatgaagcaccgtccaaggcggaaaaaacccgccctaaaccgcaccccaagcaaattgcacacacggctttcccggagtggacaccagagggcgctgagctcggccgctctcagctccggatcaggattcgcgcctgggtccttaggacgacgccgcgtggtgacgtcatatccgcctgggcgtcacgcttcgtggggcgggacgaggagaagccaaacgtaaagacaccaggagtttctcgggcccagctgtggctgctgccggggagccccaagccttggcgggtccttgcggcgaataggagtctggtcaggcgtcaggctagtccgacgaagagtgggtaggtggaagccttccaaagagcggcggttgtctgggagccgtctcagttggc

SEQ ID NO: 29851 - DNA, 2300 bp, Homo sapien
aaacacactggcacaaaagtggaatggagggagagttctgattattttagggctgaatcatgaaggtccaggattccttcttcacatctcgctctattagatcttggcccctgggaccaatctcatggctacttgactcaacggggctgcccaccaatcccaataagcttgagatctggagaagggaccctttatgtatgatgtgggcctttcctgtgatgtcaaattttggtggtggtggtgggattaccaaggaactttgttcccttatctgaagtgtagaaatttagtggaggcaaatttaagagttaggaaccttccattctgtcaactgtaggggaaggaggaaactaatattgactttgttttgttttttttttgtttttccggagacggtcttgctctgttacccaggctggagtgaagtggcatgatcatggctcactgcggcttcaacctcctgtgctcaaaaaactctcccacctcagcctcctgagtagttgggaccacaggtgtgagccatcatgcccaggtatttttaaaatttttttgtagagacggggtctcaccatattgcccaggctaaactcctggactcaagccatccactctcctcagcctcccaaagtgctggaattacaaaggtgagccatcatgcctgaccacggtttgaggtgtttttgtttgtctgtttttttgtttgttttttgagacagagtctcactctgtcacccaggctggagtgtagtggtatgatcttggctcactgcaacctccccctcccgggttcaagcaattctcctgcctcagcctccagagtagctgggtctacaggcacgtgccaccatgcccagctaatttttatatttttagtagagggggttttgccatgttggccaggctggtctcaaattcctgacctcaggtgatccacccaccttggcttcccaaagtgctgggattacaagcgtgagcgatcatgcctgaccaccgtttgagtttttactatgtgccaagccccttcccagtctactgcattccttgtattaaccttttcatacaaataatattatctccactttgcaaattggggagttgggactcagagaggttgggtaacttattgaagatcacacagctggtaaatgccagagccatggagatgatggtcctccaattctaaatttaactcttcactatcctggaatgctgccctaggagagggcagtgtgggtgaaatttctaggtgtatatggagatgggggggatgaggtggtgccaggattatggctttgggttcaggcagactgtgggcagatttagggctgagaagttgatcccaaggttctctggcttggctcttggtttgaagttcttctagtccatatggtgggatcaaaaactcccaagtctaagggatgtggttgagcccgcagtgggggccaagagtagaggctaggggtctctggaccattttatagggtctccagttcttagagcttgggtctgagggttctggggcccaagacctccaattatggggtccagctcttaggtgttcaggcctgaggagccacgttcaagagtccctgtgaagtttcaataggaagggcttgtttcagaaagtctctgggtttgcagggctcagactgggggtcccatcctaaaggccctttttctgagttttagggtccttgggcctgggggatgagagagatccagttctgagggtttcaagaggtacggtccccgaaaagcccagttctgagaggcctggtttggaaatctcgccctgaagattcctggatcccagggctcaggaccaggcgtctctggatctgaggatcctggtagtgatggcttagggtggtgttccctggtccgaagcccggagctaagggcaccgggtctgcggtgcggctgcgaggagcagggaagcgcaggcccatggcagccgcgaggcggaggagcgggccagcgggcggcagtgctggcggcccccacacgttctgcgctgggtcggcgctaggactccggggcggcggccgtgggaagggcggcgctaggaccccgcgggcccggcggcgcgtggggcggcgcgtgttgacagcggcggcggtggaaccgggcgggcggcgggagtcggcgcctcgggttcctacctcgcgtccctaggcggcggcggccgggcgtcccgggatggccttcatggagaagccgccagccggcaaggtgctgctggacgacacggtgccgctgacagcagccatcgaggcgagccagagcctgcagtcccacac

SEQ ID NO: 29852 - DNA, 2300 bp, Homo sapien
tggagagaaagggaagtttcaaatctgcagaggaagaggtgtgggagcccgccctctgaaggtctgcttaaaattcaactcgcaaaacagatgaataagagaaaaggcatacaagtttatttaataagagaaaaggcatacaagtttatttaatatgtatacacaggagccttcagaatgaagacccaaaggtacagggaaaattgtccatttttatgcttaggttcaacaaagtatggacagctgtgtggaaatatgattggaagaaaaggctatgatctaatgctaataggctgagtggggaaacccagcaagtctgtctgtctagattcttctcagcctctctgagcagcattccttccttctgggtatgggcaggactctctctggaatgggggtcttacaacctatagtcagacaaggtaggtcaggtgatttcttttcttttttgagatggagtttcactcttgttgccctggctggagtgcaatggctcgatcttggctcactgcagcctctgcctcctgggttcaagtaattctcctgcctcagcctcccaggtagctgggattacaggcgcccaccaccatgcccagctacttttttgtagttttagtagacacagggtttcgccatgttggccaggctggtctcgaacttctggcctcaggtgatccgcccgccttggcctcccaaagtgctgggattacaggcgtgagccaccacacccagccaagttatttctttatggacagtttttacacagaaaggtggagggagagtaatatttttaggtatgatggcttgctttggggaaaaggggttctgtttctgtgacccaccttggagaaggagggattcaagtttctctggctagccttggggaacaatggtactgagaaggctggagggcctcttttccgtttcccagcccctttccaggaaaaggctgtggggcagagttggttcattaggaactctgagatttaccaaagcatgatccttcacatttagctggggatctagtcagtttaaaagaagacaagaaaaacatttgccttgctttcctttttaaaacggctttatggccttaagtaagtttcactgcccaattcagcctctagggaggggctcacagggcctcagggaggggcccagtgcttccgccttgaggatgcttgcccaggatctctggccttaggcctgctcacactcctcccaactttaaagagacaaatctattgtagactctagaagacttgcttggaaaaaagttatgggttttcatttttctcccatcttgatcaactgtccttgtttaataatagaactaagcacactcctcatatccattctgctcttcagaggtaaaaccttcatggcttttctgaagtgagcgtcatgcttgtaaataaataaaaatagtatctaactggctcagaggacaaagaacatgaagaaagtgactcattaggtggctcaaaaagcgactcattggttattctataaatacgtttgccatgttttaaaaggctcacaatcgtgtttacaaaccagtgctgtggttaatttgagtatatcctagtttcgaagtgagaataatcagcttgtgattcagactaatattttactgtctgttactatttgattaaatgacactaaaatctgaataatgacttgtgtcccccctttctctctctctctttgctgttttcagtagagcatgcaccattttgaacgtgaattttcggtaaagtaaactatgctgatttctcagactttaaagatgctctgtttctgtgtgtgaaataggacccaaagtgtctcgattgctgaagtgatgaacaagtgggaaagcagatttgagactatttccttatctgaatatttaaatgaaatacagcatctttaaaaagcacccagtgacttcatctatattcatttcattttcatcatgaccttcaaaatcttcattttcactctgatttcagttttaaaatacagctctaaaacctgcaaatcaactgcatggcattttggtatattttaattttggaaaccataactctcaaagtcccgttgctgcaaaaatgttgattcctagttactctgatgaagaggaaagagtgttaggcacttgagctcttagttacagggagacaacttactggcttttataactgacggtagggaaaaacagttcttttgtaagcatcctttataattctcgagctgtgacaggagtacagcctcctcacctgcctgaagccaaaggagaaggtggttctcccgagagctgg

SEQ ID NO: 29853 - DNA, 2300 bp, Homo sapien
tcttgaagatcttctatccattttacagatgaaacagtcccagagagtaaatgtcatctctatgcagctgtccccaaatttctacctttagccctgactaggccctaggctccaggcaacctgggtatgtcccagtcatctaaagaataaaggctggctgcagtggctcatgcctgtaatcccagcactttgggaggctgaggcgggtggatcacttgaggtcaagagttcaacatcagcctggtcaacatagtgaaaactcatctctactaaaaataaaaaaaattagccgggcatggtggcaggtgcctgtaatcccagctactcgggaggctgaagcaggggaatagcttgaacctgggaggcagaggttgcagtgaggcccactgcacttcagcctgggtgacagagtgaaactccatctcaaaaaataaacaaaaatacactcttacttccccagctcctggcacttacactgccccaggctcctcccttaccccatctatccatccagcaatgacaaaaatccaaaattttcctctgctcttccctagcacttacagcattcctattgattctagcccaaatagatctcaaaactgtccccctcctctccatctggaagttgcctcctagtctgcctctgttgctgccacagacttcccagcatccgcctgttctgcctttgcctccaccccctcccattcccagtcagcaacctactggaagttgcaaattcctaatttggcagcctgcagctgtgatccatagaagggaatgtttggaatgtcttggggatgggtggagactgggtgctcaattgtcccatctgacccccaagggccaaattaagactaatgagcttccagaggttgtccctatggccaagtgtttggcacctccccataagggaggagaccacccctcatattgtcttatgcccaatttctgcctccaaagaaagaaaaagtaaaaactaaaaggcagaaatgaaatccacaaacagacagcctggtgccacaccctgggcctggtaaagatcgaccccgacctaatcggttatgttaactatagattacagacattgtatagaaaagcactgtgaaaatccctatcctgttccagtctaattaccggtgcttgcagcccctagtcacataccccctgcttgctcaatcaatcatgaccctctcacgcacacctccttagagctgtgagcccttaaaagggacaggaattgcccattcagggagctcggctcttgagacaagagtcttgcccatgcccctggccgaataaaccccttccttctttaactcggtgtctgaggagtttcgtctgcggcttgtcctgctacatccatagggccgcccttctctaaagttgttgtaaccttcccccaagcaggaatccacttctgctttaggaagcagtgggaaaaagaccatgctttagagtcaagacagtcctaaattaaaatatcggctcatttaatcaatttctgcttcagtttaaccgtcttcaaaatggagataataataacactaattacccaagtggggtactgtgagaatgagctatacagcacatatctcaatgcttggctcacagtaggtgcttaatgcaatcaatgaaagctatgatgtgcattataaggaatcaacagacagcactgtccagggaagactagactcactcatgaagtgttaagttccccatcagtagagcgtgtgcaagcacttcttggtgcccaaaggattccagcacccacaacaggttggcctaactcttaaggtctctccagcttccagagatcatgctcctcagggtctgacttctagtccccacgcttcaagtaacaccgaccaggcacgtgtgcccagcgtgcaccccgcctgtcggtcaccgcctactgtcaataaagttgatttgaggcggctccaggcagaggggcacggccacccacacgccacctcagcccggccccgcggcccctcacccggtgggcgggtgggcgggtcacgcagccggcgcgccttgccattggcccgcgccggtggaggcggggcctgctcacgtctgccggcccctctgttgtcgtttggcagcggatagaggacacgaccaagatggcggcggtgtctggcttggtgcggagaccccttcgggaggtaggcagcagcgcgcggcctgtattcccacgcgacccctgcccaccctgcgtcccgccgtcatcttcctctctccctgccaggtctccgggctgctgaagaggcgctttcactggaccgcgccggctg

SEQ ID NO: 29854 - DNA, 2300 bp, Homo sapien
tttagtcagcacagtacagcaagaaaaaggaaaaaaaggacaggaagataccacactgttatgacttgcagactctatgattatttgcacagcgaattcaagagaacctacaaacttattagaactgaaagagttcacttttgctgaatataagattatataaaacccaactgcatttcaatagccatctatcaattataaaatacaaaagtgaaagtacaattagcactagttataaaaattttaagataggagggactaggtctgacaaaatcaccaacaaaattaatccatcagtttttatatggggaaatagaagccctgagaggggaaatgactctttcaaggatacccagtaaatcagaggcaattctgggttttcagtggcaccaaattctggagatctgagtattgggtaattttggtattgtccttctattaaaaaacaacaaaacccagtggggtggggaggagtggggggcaaaaaaaaaaaaaaagaaaaaccaaaccaaaactcattgtatttttctgattataaattcaatatttatgtgttctgattataaattcaatattcatgaaaattcagaagaacgttatgaagtaatgccattaacattcccatactgttatcttgaacacgatggtcaatggtttgatgtatttccttcaaaatttttgtctgtatatatttatgtttttaaaaataaaatcaggatatcatgtgtactagtttgtgtattgatcattttcacacacatttccctgtattctcacctagtctttgtgaatttgataatgtagcactcagttatgttgatgaagcatatgtcatttatttaacctatcaatttgagcttttggagacaaatcaagtatcagatataactgtgatgatcatgctgatacaatttcaaccccagagctagctcacacacatgcagacgtgaaacccaagtgagtttctaaggccagtggttattctggtggagaaggttaaacccagcatcaggtaactggtcccaccggaaggggacagtggcctggctagcaggaagtgaatggacttggaacgagtggacggatggagaccaattagccctgaggcgttaggtgctgcccatcctctgcagccttggcttccttcctggtgaagtggggacaataccagcgccagtctcatctagggtcgagctcctccaggccccagagcctttgcatgggtcgttttgtctgctgaaggtagctctgcccttctctccacctggctgcccgtgttgctgagcttctgggcccagcagccctttgctgtcttgcccgtcaggccggaccagaccgtcttgccccggtggccccgggggcttcttcacaggcctcatcgcagggttgtctccccaatgcagggcaggcaggaggagctctggccgcaggtcggggtccaggtcttcctcggccactgcgtttggagcaggggctcccttcccttcttctccatctaagtcctctaatcatgtccctcccaacacttacggccataacttgtcattattttgtctattagctgtttccttgagtcttgtctgtcttctcctttgattaggacccgcctccgtcttggtggccgctgtatctcctaaacccccaggcctgagatatagtggggggcccatacaagttcgtgaaatgactaaggagaaacagctgtggaggcaccacccctgaggacgcagtgggcctggggttgggcggaccccaggctgcgggcggaggcgggacgtaggggcggggtttcggggcttcggagcggagcctaaggggcgggactggggcttcggggcggggcttcggggctgcggtcgtgtggtcttgaccgcgcggctccgactgcgctggctgagttcctcaggccgcccgctctctggcttccagcccgcgctgccgttagggggcgcccgcgctcgtggcgccgcggctctgctgggaaggcgccgcccgcgccgggcagctggagccgcaactccgggcgcgggctcagtcgtcccctctgccgccgccgccgccgccgtcgccgggcgcgggctcgcttgtccccgcgctcgcgctctccggccgcgggcatctcccggcccggccgcagcagccgccgccgccgcgcagtgagtggggctggcgcggggcttgcggggccggggtttgggagggccgggtttcaggagacgtctgcgccgagcggccaggggagcggggctgaggaggatctgggcgggggctcctggaacggggcggcggcggggccgcgt

SEQ ID NO: 29855 - DNA, 2300 bp, Homo sapien
gtgactaatagtaactttgcttcaatttattttgatgtatcttatacacaagtataggaaggcttttgggtggtttttaagaaacatgggctgtagattcccataattgctttcctgaattattaagcgtgagctttcattacatctttgtaccggaacttttgcttttgctgtggaacagattcagggacatcgtctaatttttttttttttttttttagataactgctcaagaagttaccttgttttgatttagcagtaaaaaagaaaaaaagggttaatagtggacagacttttcgttaacggctgcaacattgatgtctgcttttttccttgtctttgatcttctgtttctcatttaatcatttggatattcacggattggagttctttatgtcactacagacaggacagcaaccgttattcacactagttgaatgggttcctgcctttttttggtgggggggcctcaggagaatttttacaaacccattatgactgtttagttaggctgagttactgtaaaatttgtaaataaaaccctactggatggatagggttaatagatggctatagagagtttaaagttaagctttttcaatttcttgtctcttggattctgttctttcaatttctaccctaggaggggatttatggaaaaatctagactaagagtcagaacatgcaagttcttatctagttacttcccagctgtggcgccctcagctagtcacttaatctgccttgtttctctgttttgcatctttaagatgaggatagtaatccctgctcggcctactggtatcaggaatgttgtagggggaaaaaaagtctttcatgcccctgtctattaaattgtttcttccttctagaatcccttctcaggttgtccgaattttctttcaaggattcaactgaatgggctcttcccagaagtcctctatttcccatttgaaatcttgcttttcccctctcacgggcctctgctggtccatctgttatacagcactttgaattctgttctgtacttcagtcattgcatgttgccttccattatagatggaaagctccatgagggcaaagattgtctttttcctctttctgtgtgtccgcattgcacataggcaccccctccactccataggtgacccacaataattgttggctgaatgaatgattattgaggctgtcagaatgaatactttgggtgatgggaaaatgccaaagatgagcatcttaccagaacttttggatgagtggccttttaaattgctcagttactaatctgttgttatcagtaactgaatcagatcctggcaagacaaattggcaaagcccatttcttggtcctgtttacttcggatactatttgtgaagcaagtcagaggaatgaaagactgtcataacagtcttgaatttgacatttgttccatttctcaccccatagcatgtggaggcctgtctatatccaactgctgagtgtaaagaataaaaactgactgccccatagtctggtccacattttagttgtgtgctttgaaggatttgcaaggtagagaaatagatgcttcaggctctgatttcagcccatgctgtgctatgcaaatgttctctacatgcctgagtgaccttttgagaaagagcctttgtgatcttctgtagctagggcttgttctgggaattctgtgccagattcctctaaaagtgggaaaagtgaatctgttaaaggaccacgtaaaaaagccagtgcttttcctggatgaataccaataagtccatgtttcttaccatgtcttgccagagctttagaaatttgctctgcagtttgctttacaggttgatttgggattgaagtgtgtgagagggaactgactaaggcagttcagtagctgggaaactgtttgtttaaatgcttttgaattgtagataaaaataaattcacattggcatcattagtatctgagcatttctcagtgtcttaaggctggctctccatgagtgctggctgattgactctcatctatatcggtaaggttctttttgccccaaattgtgctctttaacacttcggcatttaaatcactttctatttgttttaattgtacaaagagaaatacatcattatttaaaagcatcatcttttttttttatattgtaagataaataccattctgatgtatttctcttggaaagggatgctggtatcctgggaggtttatgatttttgatgtttttactcaggtgattggcttgtatagctgaaatgctgatgaaaaggagttttcccttctccctttttc

SEQ ID NO: 29856 - DNA, 2300 bp, Homo sapien
ctttttcaatttcttgtctcttggattctgttctttcaatttctaccctaggaggggatttatggaaaaatctagactaagagtcagaacatgcaagttcttatctagttacttcccagctgtggcgccctcagctagtcacttaatctgccttgtttctctgttttgcatctttaagatgaggatagtaatccctgctcggcctactggtatcaggaatgttgtagggggaaaaaaagtctttcatgcccctgtctattaaattgtttcttccttctagaatcccttctcaggttgtccgaattttctttcaaggattcaactgaatgggctcttcccagaagtcctctatttcccatttgaaatcttgcttttcccctctcacgggcctctgctggtccatctgttatacagcactttgaattctgttctgtacttcagtcattgcatgttgccttccattatagatggaaagctccatgagggcaaagattgtctttttcctctttctgtgtgtccgcattgcacataggcaccccctccactccataggtgacccacaataattgttggctgaatgaatgattattgaggctgtcagaatgaatactttgggtgatgggaaaatgccaaagatgagcatcttaccagaacttttggatgagtggccttttaaattgctcagttactaatctgttgttatcagtaactgaatcagatcctggcaagacaaattggcaaagcccatttcttggtcctgtttacttcggatactatttgtgaagcaagtcagaggaatgaaagactgtcataacagtcttgaatttgacatttgttccatttctcaccccatagcatgtggaggcctgtctatatccaactgctgagtgtaaagaataaaaactgactgccccatagtctggtccacattttagttgtgtgctttgaaggatttgcaaggtagagaaatagatgcttcaggctctgatttcagcccatgctgtgctatgcaaatgttctctacatgcctgagtgaccttttgagaaagagcctttgtgatcttctgtagctagggcttgttctgggaattctgtgccagattcctctaaaagtgggaaaagtgaatctgttaaaggaccacgtaaaaaagccagtgcttttcctggatgaataccaataagtccatgtttcttaccatgtcttgccagagctttagaaatttgctctgcagtttgctttacaggttgatttgggattgaagtgtgtgagagggaactgactaaggcagttcagtagctgggaaactgtttgtttaaatgcttttgaattgtagataaaaataaattcacattggcatcattagtatctgagcatttctcagtgtcttaaggctggctctccatgagtgctggctgattgactctcatctatatcggtaaggttctttttgccccaaattgtgctctttaacacttcggcatttaaatcactttctatttgttttaattgtacaaagagaaatacatcattatttaaaagcatcatcttttttttttatattgtaagataaataccattctgatgtatttctcttggaaagggatgctggtatcctgggaggtttatgatttttgatgtttttactcaggtgattggcttgtatagctgaaatgctgatgaaaaggagttttcccttctccctttttcttttcttttctttttttttttttttttgagatggagtctcgcactgttgcaggggctggtgtgcagtggcacagtctcggctcactgcaacctccgcctctcgggttcaagtgatgctcctgcctcagcctcctgaatagctaggattacaggtgcccaccaccacgcccagctaattttttgtatttttagtagagatggggtttcactatgttgggcagtctggtcttgaactcctgacctggtgatcctcctgcctcagcctcccaaagtgctgggattataggcatgagccactgcgcccagcctgtccctttttcttaaatgacctttttggtgaggaccattataggtttgtaccaggataaggttgtagagttaatcataatattctcttatataaattctaaaaattgatgttctaagaagagaggtagaatttgaatgactgggttacttcctagactcttcctccttctcttaagtacagtatagttctttctctgaaaatcttcagtctcttagttccagatgggttctctatggtaagaatacaggacatgtagaaggccctaggggaatgctttcttcc

SEQ ID NO: 29857 - DNA, 2300 bp, Homo sapien
accttttccttctactgattttaatctgtaatcttttgctgtaataaactgtaaccatgagtattacagtttcttcttgtttgttctagaggcaaagtctcactctgtcacccaggctagagtatagtggttccattatagctcactgcagcttcgaacttctgggcccaagcaatccttccactgcatcctcccaaagagctagcactacaggcacacaccaccacactgggctaatttttacatcttttttggtagagacagggtcttgctatgttgtccaggctggtctcaaactcctggcctcaagtgatcctcaagcctcaacctcccaaagcaatggaattataggcgtgagccatcacgcctggctcagtataacagtttctaagttctatgagtcttcctagcaaatcactggacctgaggttgatcttggagaacctctgacacactcaaataagttctgaagattagctgacaatattgcagcagtgttaatggcttggtttcataattgtaccttagaagaagctgagtgaaggatatacaagaactttttgcagctttctgaaattctaaagttatttcaaaataaaaagttaaacacaaagaacaaggagacaagtgtgatcattgttagtgctgggtgttaggtacatgcaggttcattatatttttctctccacttttgtacaagtttgaaatattttgtaatttaaaaagcctttttaagctagagaattcaagatttcagtgcaacaaatcaaaatgatcacatccaaaacatacagaacagggtcagcttcaaagcggatgagaaaacaatttaaacatggagagtttattaaaaagccttgctccaagggcccctgagcaaggctttcttcactgggcacttcctgcaatccaagcctttctctatggcagagaggaactaagtcattgcccatggtcagtgatagcataaatccttggcggagatgagtccaggtgtaagtaagaactttcacctccaaacagtggggccaagaccaccttccctgaaaccactgcccacagcaatgaggactgccaggagtctgagccccacagctccagaaggacctactaggtgataagttgcaaagcttgggccacaggtcctgcctcttcctacagacacaagctagacactaccttggggatatgatggggtgctgtgaggctccttactgagcaaataccttgcattacaggggaggccaaggcccagaaaggagtacacctgctcagagtcaacatagctcagaagtcctgccagaacaggagccttgatctcctactggccccttgatttctttcccagtcttacacaaatgtgttacgtaatctacttattgtgcaaacccaaacaaagtgacatccctccctgagcctgtttccttacctgcaaaatggggagccgcatctgactttccaaggtggttatgcagggagggaacctctaagcctctcattcctctcactaagacccagctctcatctggatcccacacactacagatggatgcttcacaaatatttttccagggaatgtcaggggatgctaagcataagacaagccatattttagagcagaaacatggggagagaggaaaaacgtacaccttacagagcaatcctttcacatgaggaccatctcaggggagcctattaagctcgtgtgatattaacagcttgagtgcctgaagggcacacagtgaaagatcagggaagaccaggatatcactttggaaacactgctggggtacacagctttttggtacaagtagtgtcaaaggaatccctggctttgagatgtaagggctccaacctcccagaagtcctcccagggcagccccagcgacaggcacaaaggtcacacccatgcaggaagagagggaggaaggagaggagctccataagcccagacaagggcttgagagcagacaagggcttgagagcagacaagggcttgagagcagacaagggcttgagagctggccaagcagtttctctcagcttctgtgttccagcccctatgtgggaggagagaagggcaggaccacaagcctgccagaggctgcggcctacagccggggagaggccagcccggcctacagtgcggacacaggacagaggggagccaggtgagccaggtttttgggcagggagggactgggagaccccagaggagagggctgcccccatgatgaccctgtccgcagctccgagagaccctgagcaaggctttcttcactgggcacctcctgcaaatc

SEQ ID NO: 29858 - DNA, 2300 bp, Homo sapien
tttgtgggagaagcacagtgactcccaactgcccacggaaaatgacgcccaacatccgaggactactgcccagttctccttggctgtcaggtgcgtgttcctctgaagtgtaccaggtgatgggcttctgtcttctccggggatgagcaggagctgtcagaagttcccccgctccaggatccttcttactctccaactgttagaaggcactgggattggttcatctgagccaccaaagaccctaggaaatattcaaaatacttctttgcagagcaggaggatgtgtgcaaggaaccagggtcagcaaagagtggtttgacaagaatctagctgtcctcttctaccaggagagtttggggaagttaaggcagagcagggtgggaggctgagggggctaccattcatagtgcctcaagaaatgcagaattggggaagaagaaaaaaagggaccacacattgtttccagaaaattgttttatacccaagaatttaggaccctcttagtttaagtggctcgagaatggtcagcgtggccaagactccctggacatgcctgccctgtccctcccactccacccctgtctcccacctccctcactcccaagatggcacccagcctgcctttacatcacaccaggatccacccagtctgggcctttccactggctcttcccaccctacgaagactctcccatgtgtacagacttcacacaactgactccttgtgattctgctaccctaaaacaccacccgctctcacctcacccagccttgcgttcatcacggcattcctcactgcctgacgtcatcctgaatgtccccttctttactgtgtgtcccccttgaaggtaggttccctgacagcagggatattacctgtgtcattcacatggtacccccagcacttagaacagtgccaggaacacagtaggaattaaataaatgtttgttaaatgaacaaataatataggccaaagaagacacaaggttgccttgttaaagcctccattcacctgtgatgcatgtcctaggcctcatcaccttctagccaaccaagactccatgagaaagtaaagttggggtggaggcctggtctaactggtagaccccagcttcctcactggggaactaggatgacactaaacgatagaaaacacttccagcttttcaagtgaaagctgattctgaaattaggagaatgcctccattatctataagcatccaggctggccttaaggatctacatacattttttacttttcttgggtttttttgtttgtttgttttttgggtttttttgagacagtcttgctctgtcacccaggctggagtgcagtggcccaatcttggctcactgcaaactctgcctcccaagttcaagcaattctcctgcctcagcctcccaggtagctgggattacaggtgtgtgccaccacccctggctaatttttgtatttttagtagagacagggttttaccatgttggccaggctgttctcaaacttctgacctcaaatgatctgcctacctcagcctcccaaagtgctgggattacaggcatgagctaccatgcctggcctacttttatattttacattcacatgttcattcattgagccactacttatggaacacatattctgccaggcaaaatgcaccatgctgggctctggcctcagatcacgtagagtccaggtctctcttggagaaaagtcctatatgctgagctttgactatgtgcttcactaatgtcatctcatccatgtcatctcccaaccaccctggtatgctccacatttgacaaacacagaaaccaagacacagagacactgagtggctgctgaaggggctggtgctggagccagggccaacacatgagcctgctgagacccagacacggtgcatcccctctcccacgctcttccgttggctcctctgtgaagttccaatgacattcaaggtatcaggaaaacgctgtgtacggagtttctgacccattcgtggataattaagaactgacccaatgctgagcagtttcccctccctttacaccccacccttttccccccagagccattttctcctgaagaatccacaccactgcctcaggaagcttggcttcccctcccatggggaagtgctggaatccactcttgcctgaccctcccataagaaacaagggaaattcctttacgtgagccgccttgctcagaacaaagcttggcgtgtttcttattcctcatcaatctgacaaaatgggtatttatttgtgcctctcaagcgtgtggcttggacatgat

SEQ ID NO: 29859 - DNA, 2300 bp, Homo sapien
ggttcaagggatttagaactcctctttttaaaacccaaagcccccctcacacttcgtaagccttacttccttctataaggttgtgggtcaagaaggaacacatgtttactctcatgttttagatggagaaagagagtctaagggatgtgcccagccacagagtgagacagggcaaagatggatctagaacacctgctccttggtcctccaccaccagctgtcacctcataaatcatctgttcacgtattccaagtacatcctctgcgccaggcatagtgctgggctctggggcctccacccccattcctcctgcccatgccatgtggcctgaatgttgcattttgggccatcatcctgccagggcctggacttcagagcccaatcacaggctctgtcaaccaggctttcactgcagcactaagccacatttcggcagggctccaaacagatggaaaacattaataaatgcgtaagaatcattttctttcctcccaccccaccaagagtcaagctggtggataattatgggatggttgccaaaggagtttgatcttccgtgttgacttacagcatttttactgctccatctgaaggccaatttagtcatttccctttacaattttgtggactctctcctttctgcaggaaatccgaaactgtaatcaggccacgactggaacagggagaaaaggagtggggagcagccgaggaaggcagaggctgaacccaagggaaggggcggaaggaagaagctacatgtttgcttggctggaagggtcatgggtatcggaggaaatacagtaacaataacaacagtattaagcagtgccatgaagcgagcactttcgatgagtcaggactgtgttaagcactcgacctacttagactatttcatttaatcctccatcatggattcttccactaatattgctctagactcggggtaaactgaggagcaggacagaccaggccctggtctttgtggaactgccattccagaggaatggcagaggagacggacaataaacaccgaagtcatatcatttcagttgctgatgagtgctacaacaaagtaataaacagagagcctgggaactgctttgcacaaggcaacagagaaagcttctctgaggagcctgaaggacaaaaaggatagaatcaggcaaagatcaaaatatgggcagtggaggggaagtgggggagagaacattccacgcagagagaatagcaagtgcaaaggccctgagaaggggggaaaggtgctgtgacccagaaactaccagggagagggaggagagggaaatgaggtcctagcaagacagtcaatcagaccttgcagaccatggggtgtttggttctgttggcaaggctggatctagaatgcctaattcttgaccctccaccagctgccattccgtaagtcatctgtgtatgtgttgcaggcacctactgtgtgccaggcatcgtgctagaggaaaggaaagggtggcaaggtctccccaacccccccacctcttgggaaacggtgttgtgcttagtgaactggttattcgggactttccactgggcagtggatatcatttgtgttattagcagcatgatagcagtggcacctaacttctctgaggaattgttgttcaccagatgctctgcacatccccacagccccatgcagtgggggcaactcttaccccacctttggtgaagtgacagataaaacagagcaacatgctctgatttatgctttcgcaaaacgatggcttcagctgtacacacacaccttaccccatttagctctgcagtatgagtgcttcacaaacacacacacacacacacacacacacacacacaacatcgtgcccccaaggccacacaactatcagggacagagctacagttcaagcccaaggtctctttagccttaacctctgccacaagctggcatcacggagaaggacagggctggcaaatgaggaggagagtgactgccgggggcactttgagaacttggccccaggcctggaatctggccttcagatattttcttggcctgggcccagaccagcagccctccagcccttccaggcagcctgctgcccagttgaatgaaggagtctgctctcagagtatctgctgtgggagagccccggaccccaagcatcttcaaaggtctattattaatggggctgtccagctgaagctgacatccgcacgcagccctcccagagctctgcacctcagccagcccacggcctccaccgtctggccctgtcggctgagtggtgcccagcaaggtgag

SEQ ID NO: 29860 - DNA, 2300 bp, Homo sapien
acaaaaaatgtttcttctggagtctccagaaaggaatgcaagcctgccagcaccgtgattccaacccagtgagacccatatcaagctcctgccctccagagtggttagcttcacagctgtgttatgaagctgctggtctgtgtttgtttgttactgcagctcctcaaagcacccctcctcagagaggccttccctgaccacctgctgaggaaagttctcctggaatcactttcatgggttctttcacagaatgtctcaattttaaatgatttgcttgtgaaggagttccgaagtaactccccaaaatatgccactttgagactttgaactgaggtcacttggggaacagcaactgcagggaggggctttccgagttttccttttctgtctaaagacagattgtccagagcaaacgcagtggccatgaatctccgcccagggaatctcatcagccggaaggactggctcgtttcacaggagtctaaaggtccacactacgtccagatagcctttgtcacaggctgtcgtcacctgtcctgctgagggcccactcctcttccccagaaatcatttactctccactacggtgctgacaccccacccctctctcccttgtgaagagggtatacaagcttctaaatcttactgggtgtggggaattccttttctttcctgggatgcccccatgcatgtgataaatgtctgtaccttttctcctgttattctccctgctgtcagtttaattcctgaccagccaaggcagctagaagggtagagaaagccatttttactcccctacacttgtgtgcttatttatattggaagtgagggtcaggagggcccccctgaggaagtgacactgcaggtcaggtctgaacaagacccaggcaccagttatgggcagaaccgtcctagcagaataagggagagcaagaggcaaggagatgggacagaggacaggaccagtcctaaagccagtcagagtgaaggaaagcactgcctcgccctgggatacatcctgagggggcccacgtgcctacctggggatgggcagctggaacagcagaactggggccactcccggcacctcatcacacagggtccgctccctgctcttcccttgcaccagctccctgggcatgcatcttcatttcctgaccagctgctggacctcatgcccctgaatattccttccaagtgggccacacagcctacggaagcattcagagtcagcaaacaagggaggaagttgccaggagcctgtgtgccaaggaccgaggcaagaactcctcctaagaggaaagcgcttgggaaagagaccatgatttgtgacaaagactgggagtgctggatcaggggagggggaagctgagcccctctcagtgcaccttgggtcctaaggagagagaagggagacaaaggctgcattcaccatttcactaaaagtctgccactgagcagcccttcttttctttctccgtctttccctttctccacaccccaccccctccacctttaacctctaattcaatatgccccacccaaatccagaatcttttcccaaaccacttcctctcccccatcttcctcactcttgaccaagaagcctcccttttccatcatccaagctcaatatcttgcagttgcctttgacctcctccatctttcctgtcctgagtttcttgcctgggttcccctctttccagtcagcccctccagcacccccccacactctagtccagaacctcaaagcaggtgatcatcagctgcagttactcgctctaccagccccacacctcccagcgcctggggaggttgttagcacagggtcgggttttttgtaaggttttttggctgttttcgaaggcagattgtggtatctcattcctgattaagttgcttgaattcccacccaaacctcccttgccaaggtcaggatagctctacaggaagggaacaggcatggcccttctccccaggccccagccaggccctaagccactcctcagccaggcaagactttagactcatttcctgccccgtgagcacttagaataaacttcctccttccttgtgagattgtttaacagggcagggagagttgatggcaaacttcctcaaaggaggggcagagcctgcgcagggcaggagcagctggcccactggcggcccgcaacactccgtctcaccctctgggcccactgcatctagaggagggccgtctgtgaggccactacccctccagcaactgggaggtgggactgtcagaagctggcccagggtggtggtcagctgggtca

SEQ ID NO: 29861 - DNA, 2300 bp, Homo sapien
catcatctttattgtcagcacaaccatttattgagctctcactgcactcccaagcatcgcactgaactgtatgtgcatattttctcatttaatcctcgcaactgtgttcatctactttacaaattaagaaactgaggcacaaacaggctcaggaattgtcctgagtggtgatgcaggaatctatcagacctagctgatgtcaaacctcatgacttaactgttggtggcactattgaccaacaatggttctattgatggctaaagtccaaattgcttattaatagatggagcattaatcatggcgcctttcttcctgcttagttgttagctccgtggttgcagcttgaaaaatattttgttctgtttatctgctgtaccgcatacttaaaaagaatctatattttttaaaagcccttgagaatttaccttcacatatacctaaatacatttcaaggttattgatatttttgcatattagcagcattcttcttattacctatgaatttaatgaaaggaaaacattagacgtggcatgcaggtattatttcagaaatttatttcttctccacatggcatcctttcactcttcccattcccctggtgtttttatagtaacctagcatcctgagctaccaccttttttgctggcaccaaaggatcatttataatcagccctccacttgttctgaaatgtgccctacaattcataacacaacagacagtgtgtaagtttaacaggactcgaagcatttcttatcttgaattaaactcacatgttcagaggagtgaaaatatcaagaattgtggtgttgtaggattcagctttcagcttcacaactaataaaaagaacaaactgttttctggaatcttgggagtcagcctaaccctctttccatccttcactttcccctactgcatacacagtgaagactacaactgataagggatacagccacatccacgaaaggaaagtttcagaaaattatctttgctaagattagtgtaatttttttctcctgaaaagcctctagctttttcatctacggaacaggatatgacaaggcttttctgttgttgttgcatttaataaacaaataagctctgtacttagggcctgtcatggcagaggcaaaagagccatttgagctggacctcttgaccacagaggcatccgtgttttctccaagcagagttagacacacactcgcagggatacccaacatcccctagcagagaaaatggttgtcattcacctttcaatttgtgttatcactgaaccacactgcttaccgtgtatgatgaattactttaaaaaaaaaaattctgtagttattttatgaatagcccagttacatgtgtttgtcatttggggaggctaaaataatttttcaaatgtaaacattcaaaattcaccaaaccagcttcattcatagtctttctccagccatagtcacccctacctcaacggatggcaaatgcatctgattgctgagataggaaacttggaaagacgctttgattcctcctcttatctcatgtcccactttcaaatggtcaggagatcctactggttttactctcagtatattcagaatgcgatgccttttctcctccaccccccggcctttatcacctgggaccactaccaccatcatttcttattgtctcattgaacagcctactaactcatctgcctgcttctaccactgcctgcaatctattttcttgtttaacttttaattgacagataataattctacatatttacgaagtacaatgtgatgttttgatatatgcatacatgatggaatgattaatcaagttaattaacatattcatcatctcccatacagtacttaccaatttttgtggtgaaaacatttaaaatctactctgagcaattttgaaatatacattacattagctatagacatcatgctatgcaacagatctcaaaagcttatttattctgtttaatcctcaacacagcattcagagtgagccttaaaatgacaaaatgacagcatattgtgtcacctgctgaaaaccttgcagaggatttcaactttctttttttttttttttttttttggagacaggtttcgctctcattgcccaggctggaatgcaatggcgtgatctcagttcaccacaacctctgcctcctgggttcaagtgattctcctgcctcagcctcccaagtagctgggattacaggtgcgcaccatcatgccctgctaattttgtatttttagtagagacagggtttctccgtgttggtcacgctggtctcgaactc

SEQ ID NO: 29862 - DNA, 2300 bp, Homo sapien
ggtgggaactgaacaatgagatcacatggacacaggaaggggaatatcacactctggggactgttgtggggtggtgggagggggaagggatagcatcaggagatatacctaatgctagatgacgtgttagtgggtgtagtgcaccagcatggcacatgtatacatatgtaactaacctgcacaatgtgcacatgtaccctaaaacttaaagtataataaaaaaaaaaaagactatacagactgatccctttccatctttgctcatagtgatttttaagtgttagaaaacaaaaaagtaaccaatggaaacttttcaaataaaaactgctgacacgaacacatagaaaggtgaacaactagctgtctgaggctagacatcctcacctacaaatggatattgatggagttcaggacatggcatttacagtagcaggaaggtcactctcaccttctcctgttctcccctgcagctggtcataaaacatagctaggattttctgaacaccccctggagcaggtcataagatactcatttgagagatgccgtccctatcccctgaagaaaggaacatccttatctctgaagacacagggacacagagaagaatctgaacaaaagccttgctgattttcttcgtttatttccattagctcatatctcctttgcccaatcatatttctccaccactttcctctcttcatcaaacctggagtaaaaatattcaagtttcactgtttgttcagttcttcatttccttataaagactcctgtatcatggaaaacttacatgaaataaatttgtatgtttttcttttgctaatctgtcttttgttgcaacagaggccttggcgatgaatccagggtgggtgagaaaaagatatttttcctcccctacaatatgcttataaacatatgtagcagtaaacctatttctaggtaggtagcatcctgtgaaagcaccaatgaaataatatagaatttgttttgattttggcattcagtcatacctagagaatatcgtaagtagatgcaaagggatgacaaccagtatctacaatgaactacgaccatcatcataatagcggcgattgacatttattgagtacttatgctaattcttggtagatatgatcttatttgatcctcagagcaattctatgaaataaataggatgaacaactacattcaacagaagaggaaattgacactgggtattaacccaggatcgtgcctgccaggaaagagtggagctagaatgtgaacccaggcagtctgagtccacagcttaccctctcaaccactagtctgtagtgtttattccagctcgagagtgcatctagagtggtgactatttaagtttttgaataacaaaatgacaaaatcagttctgtttgtggcaggaaaaaaaagtgaccctgaagaaatacatttatttgaaatatatatgactatctccttaccataaattaatttcattgttttcattctcatgacatgtcactatgtatttacaatttaaaaaatcagttttgccacgttactaaatttgggacaatcataaaatgtaatagacagtactctgagaataagaaaagtttatttcctggggtgactttcatagtcactaaacacagaacaacttgcacatttcaatatttcctcctgacagtacagatactgtctctattgtcactattacactgactctaatatcagttttcgtatatcatttctatagttgtataagaacatctgctcatatgatttatctgcagcttagcacaatcaactgcatacctttttagttcaggaggattaaaagaaaactcattctacccaaagagagctgagaagttaatgaatctgtagatcagaacaaattaaaacctattaattataaggagtctgaaatgccaatatattatattttgaatacacagcaaccaggaatatcatgcaaaaacgctgatatgctgtggagcaaagaaatggaacagatcccagaaactcaggacctcggccttttggtggcgctgttgctatgtgctagtgccaggaaaacagtattcatatataattaactaccacggagcacaagcagctttgcttttccatgatcaagctgctagagattttggggtgagggagcgaaatgaaggctaaataaaagaaccggagataagataatcctgccatgttaaaaggtaaagataatatttttatgttgttatgtaaaacctatgaaaatggcgataatgttgcaaggttaatcaagaccataaataacttgtctgagaac

SEQ ID NO: 29863 - DNA, 2300 bp, Homo sapien
ctaataacaatacaatagtctactgattggcctccagttctactgtctccacaagccaacccagacactccacaaacagtatccataaacgtatacccatgccttctattgtgtgtcattgtgacattcccctacttcacacaatgactcctctttgccttcagaatacagtccctggatggcagggattatgttctggtctatcattacattccgagaatctgcagcacctagatgtacttggcccgtgatgaagaagaaaggaaaacagaaaaatgataagatagatcccctctaattaaaagcttttgtagatctctcccttgtcccctgcccaactgagagcaaaccctctcacctttacccatgcttcacttctgaaaggaagatttcaccggagactgccaccattatgttgagtgtgtatgatggtaaaacattcaggaagaaattgaacagttcaatcagtcacccaaatatttgtttttaaaatgccaacccttagaaataactagattctgggttctgtgtgtctataaattgaagggtgaaggaatagcttactgaaactgaatgtcaagatacgcattgtcagacaccaaataatgtcttcaaaatggactgtgcttttttgttttttctctattctaagtttatcatttcacatccatttattatatattttgtttggttggttggttggttttttttgttgttttgtcttttttttttttttttgagatggagttttgctgttgttgcccaggctggggtgcaatggcatgatcttgcctcactgcaacctccgcctcccaggttcaagcaattctcctgcctcagtctcccgagtagctgggattacaggcaagcatcaccacgcccagataattttgtattttttcagtagagacagggtttctccatgttggtcaggctggtctcgaactcccgacctcaggtgatccacctgccttggcctctgaaagtgctgggattacaggcataagctgccatgcctggccatatatatttaaataaatgagtcaaattcgaagaatctaccatgacaagtatatgcagtgatcacacagtttaaatgtattattttataacataaaaatctaccaattgaaatagcactacatttctcattttcattatctactttcattgccattgatttcatgtttgtaattctgcctttatcagattttaaaaatttaaacttttgcatttctatggaaaatcacagaactgtggacttgtaaaattattgtagctttcattttcagctttccaagtatttatatttaatgacgttcatattttgtggaaaaatatactttctaaaactaaaattttcatgtaagaaaaatactttataaaacatgttccattatccattgctcttgaaaaacaaaactgccctacaataaggtaaaaatgcttccctagacccacttgtatttattaatagagtaccatttctctgcttaagtaggctaaataccataagttttagttgtttctttttccatggagttaacttatcagaaagtcaaagtatacgattcttagatgttttagatgacttgctctggatcctcttcttttagacattttttggaatgaatatgagtaactacttcttaaatgttctcttgtttttcatgagtaaaaaatatgccttatccagaccaaataccgtatagcaggacattttagcaaatggcttataactgtttgcattgctacttttagttactcatgtttttctttgcagattaaagtaaaatctatatatagatgcttttgctttattcatagaaaatatgaatttattaagaacttgtactcagtaacttattcaccacaaatttctgctcaaaattatttttactttgttccccaacatagggtaaccacagtatccagggttctcgaggcccaacaactggtccttcagagttaactcagttaacattagagagcctgctggggaaggctgcaaagcggacaagtaaggaatatctaaggagcgcctacacagaagcaggagcaacagaaagccaggattcctcgatggagcaaatagatagaaataactttgaaatgagtttgttgcctacaacatgcctttctccaactggaagaaggtgtgggtcctgtcagaaaactccagagcccgtaatcaaagcgaaggatctatcagcccagcaagtgccagcttcactaaacaaaacctccctgaaagaaatctcaggggaaaggctgagctcgatccccgaagcatctgtaag

SEQ ID NO: 29864 - DNA, 2300 bp, Homo sapien
tgacaaaagcaagactgtctcaaaaaaaaaaaaaaaagaaaagtcggaattcagtcatgcggcccatataacgacagggtatgctcagaaatgtaatttagctgtgtgtgcagaagggaaggcagcaggatttggtgagcacacctgccctatcctgaaggtgacactgttttgctctctttctctctaaaaccttcagggattccttgttgcctaccaaatttagaataggctcttcacattttaaggctcttttcagtatgaccctagcctctccttccagctaaaccagccacttcctgactcccaggtacaccctgcccttcccttcttccatgcctttactctggtactttcttctgcctagggcatcctacatctcttattcttgaaattgtatccatcattcagggtccatgaaggggtcacttattcttcattgccactggcctgccttacattggtgacctgtttactggtcttatccgcctctccattctccattttgtgtcactgacggcctctaggaaatgcctgagagagtactcagttaaatatttgttaggttgagttgaataattatatttaaattatttccttaaagagaaaataagatgtattttttagtagcttttccttttttcttttttttttttttttttttttttttttttgagacggagtctcgctctgtcgcccaggccggactgcggactgcagtggcgcaatctcggctcactgcaagctccgcttcccgggttcacgccattctcctgcctcagcctcccgagtagctgggactacaggcgcccgccaccgcgcctggctaattttttgtatttttagtagagacggggtttcaccttgttagccaggatggtctcgatctcctgacctcatgatccacccgcctcggcctcccaaagtgctgggattacaggcgtgagccaccgcgcccggccctttctttttttttttaaagaaaaactttgtggtggtggttctcaaatgatggtgagtataaaaattacttggggggacttattaaaagtactgtgatactgccgagatcctaattctatacgtcttgtatgtatctctgatgttgggccctagtatctgtgtttttaatacatgctgaggggggaggggggatttggatcctatggcacctggactggatttttagaaagattgcagtgtgatgtttgtcattacacccattaatggactattattaccttcctttaacaaaacagatcagttcattaacagaggaacaagtattacacggaacagtaaaaatcaagatgtttgtcatatcgcatttggatccaaagttcttgggccacctccactctctggcagaaggaataacatgaagatatccagcgaggtaggagcaaggtttggagagcttatctaagcacaagtgacctggtaagggaagagtgtcttccccttgtagagggagggagggagggaaagacagacagacagacagacagacagacactacatgccaaaagcagaaggcttgaataaatttggaacagaaattctggattttaaaagacttcaaaagtgtttcctttttgtcatatcaacataattaacattttcgagtattcttttcattaaatatgttcacaaaatttaaaggcaaatataagtgagcacattttgctgtctctttcagaggagttggatcataaccagacaccttaggatgaacagattctcaaatgttaggttttttatttttaatttcctccgaatttctgacatacgcgtgatttttaattcggcttctacctactgaagatggagtgtagcaaataagcacattttaatttatgtgtctaggagacttgcatgtcttctattttatctcgttatttttctccttccatttctaatttcctataataatttcctttttcttcacatcttaacctcatttcctctagtttttttctcactcttcattggtccaaatattatgttttctatatagcttctacagaaaacaaatgtagttgctatattttaaaatgtacagattaattcctttacagacagtgagatccgttgggtccaaaaataaccgatcatgccagccgtccactgtagagaagtgtgttaatggtacagaaatgtcagccttgctgatacctgagtctgaggaacaaggaaataaagaaaatattcaccaaataaagcagactgtacctattcatggtaagaaataatcatgcataaagattgatagctagtgaaaatagtgagaaatgttcttg

SEQ ID NO: 29865 - DNA, 2300 bp, Homo sapien
gcattaacctatgccattgacctaactcaaccatgagtgcagcatcagataagagttcctaactggtgctgtgtccggaatcggtgggttcttggtctcactgacttcacgaatgaagccgcggaccctcgcggtgagtgttacagctcttaaggtggcgcgtctggagtttgttccttctgatgttcggatgtgttcggagtttcttccttctggtgggttcgtggtctcaccggctcaggagtgaaactgcagaccttcgcggtgagtgttacagctcttaaggcagcacgtctggagttgtttgttcctcctggtgggctcgtggtctcgctggcttcaggagagaagctgcagatcttcgcggtgagtgttacagctcataaaagcagtgtggacccaaagagtgagcagtagcaagatttattgcaaagagtgaaagaacaaagcttccacagtgtggaagtggacccccagctagttgccaatgctggctcgggcagcctgcttttattctcttatctggccccacccacatcctgctgattggtagagcccagtggcctgttttgtcagggcgctgattggtgcgtttacaatccctgagctagacacgaaggttctccacgtccccatcagattagctggatacagagtttggacacacaggttctccaaggccccaccagagcagctagacacagagtgtcaattggtgtactcacaaaccttgagctaaacacagggtgctgattggttatttacaatccctgagctagacgtaaagactctccacctccccaccagactcaggagcccagctggcttcacctagtggatcccgcactggggccgcaggtggagctgcctgccagtcccgcaccgtgcgctcacactactcagccgttgggtggtcgatgggactgggcgccgtggagcagggggcggcgctcatcggggaggctcgggctgcacaggaacacacggagtgggtgggaggctcaggcatggcgggctgcaggttctgagccctgccccgcgggaaggcagctaaggcctggcgagaaatcgagcacagtgccggtgggccagcacgctgggggacccagtagaccctctgcagccactggcccgggtgctaagtccctcattgcccggggccagcagggctggccggctgctccgagtgcggggcctgccaagtccacgcccacccggaactccagctggcctgcaagcgcggcacgtagcccgggttcccgctcgcgcctctccctccacacctccctgcaagctgagggagtgggctccagccttggccaacccagaaaggggctcccacagtgcagtggggggctgaagggctcctcaaatgccgccaaagtgggagcccaggcaggggaggtgccgagagcaagcgagggctctgaggactgccagcatgctgtcacctctcagtgccatatgactttggccaagccatttaacctttctgagccacagttccttagccaaaaattggcaatagtaccttccatgtaagaagtggctctgatctagaaactaaataaagtaacttaatagttacacttaagccagtgctagtctcaataagttattattttctacaaaaaaatcttggcttcctagggtcttctgaaacaatgaaagggtccagcagaccctcttactgcctcaacgaacccaaatttgggaaccttctaagcaaaggccgcgtgagggttccatgagtccatgactgtatccctcaggaacctaccagttatctgtttaccacgaggagagaccaaaccgatgtgacagtactctagaagagtccagtacctggtatagccctaatccacgctgagtttagcctttttagtcggcagaggtcatgacctaagtaaggagcgtgctgctcaccgtttggaccgcccaccatttctccaggagtcccgcggttgcctgggcaacgctacgtcaccgcgtatcctcccgtgcccgtcggcgagaagcctagagagcgcaacgcgcaggcgcccagtgggaaccaatgggcgcggccggaacgcgggtggcgctcggcgctgctctttcgcggtttgattctggggtggggcggcagcgggagcgcgcccgcttttcctaggccagcgggcggttgtctgtggctccgcgactgggcgccccgtcacgtaggttacacacacaatcactccccagggacggcccggagtccgtccaggcagctgcgccctccccagacccgggcaccgcggaggctggagccgcaatgg

SEQ ID NO: 29866 - DNA, 2300 bp, Homo sapien
tagaggtagccacttgggacacagagagtttaagagacttgcccaagataaacacttcataaggtttgggacttaggttatctcactctgaggcccaagcttttggctattcatttatgttgccttcttctaattcatggaaagcgaaaggaacagtgcctagcaaatgccaagaatctcattcatttgccagcaaataatctcagagagaatcccctgtatcctagcttcttgggatacagtaatgaataaaactgataaaaatctctgtcttcttagtttgcattttggttgaggggaatgagggcccacaaaaaaataagtaaaatatgcacatgttaagtggcgattagtgcaatgaagaaaagtaaagctagaacagggactagagaaggctgggcattggcactgaatataagtaaaattatttgtaatgaatagccgtggtagaatgcaacctgcttttgttgggttggtatattgaccactgataaggtctggagttggtgtagaacttttctctctactatagactcaatttccatatctcccccgacaaccttagaatattaggtagctttgcaacatgaaactggaattcacacacctaaaggcactttcagcttatagtgtgagttttgtgatttaacatttattgggcttggctgctgtgcacacagcagtcatttaggtacgtataaagttgatattctctgcccgcaaacatggttgcctttacatagactcatccttcactaggtttgctgattgtgtcactgccacttaaatgtcacagtattaagcacaaggaaatgcaagacagatgaggtagaaaataaagtctgtgtttgtttctcatgcttggtgaaggtgttttatagacactggaatagtcagtggaactaggccaggatggcctaaatacctggtgctgaagccagtaggtaggtgtttaattgtagaaatgaagcatctaaccaacacatttagaagcagtgtttaaagacaaatttcaccatttttactttggaaaataagactcctggacttactgtacgaagtgaggcaaaactatgcacagaatgagaacacggcttttcttttattattcttccttctcttgggcactgtgtagcaaatcatctgtcattttggggttggggtacaacttggcctaatagacaggcaatggtaactctctggagtcataacagttccctttggcttgcctttatggccagtatagattgctaaggctatagcaattatgaggcagtccatatcagttgttgaaaacaatgccatttttgcccaagagaaccatattcttccttatatgtggcacaaactagttttgtgggttttttttttcttttctttatcccctacaaatcattgtacttgaagatgccacactacccctgtgaagtactgctgctctggtcctacttaatagtaccacaagaagaaataggaagcttttaaacattatacctgtattttcattggtggtgaacagttagttatggaacctctcctttgtgccagaaatcagtgggctgagaagaaaaatgaaacctggtctttggcccaaaataacttcaatcagcaaatatttaattgagcaactattatataaatattctcagaacttatggggatgaaatgttgaacaaaatctaacatggttcttgccatcagggaggttacaatctagtgggatagcaggaaattaataaaaaacttaaaattacatctttatgctataaagaagacatgtttgtggtaggatatcttagggaaaactggcctagttggaaagaccacaagagatcttctttaaaacatgattgaattgggttgtaagggatgaataggtgtcagtgaaggcagagacagaggttggggagggatacagcatgtgcagagggcctgtggcagaagagagaggttggtgtggtgggagcacaaggcaagagaagaccaaaaatgcaagataaggcagtaaagataatggggccaactaaagccttctaggcttcgtttgggatccaagtctctatttttaatatggtaggaaatgactgaaggccagaaacagagggaatcagaattgtgtttcaagagcgtcactatacggttaggatggaagacagattagaggaaatgcgagtggataaggcaagatgcatttggaagacagtcaagagtttaaccagaaagagaagacatgtcagtaattgccatcatgggaagcagtgagaagcaccagaattgagaaaccaagtactttaagagtt

SEQ ID NO: 29867 - DNA, 2300 bp, Homo sapien
ctaccaacagagaaacagacaacctacaggatgggagaaaatatttgcaaactatgcatctgacaaaggtctaatacccagaatctatatggaacttcaacaattcaacaagcaaaaaacagccctattacaaagtggacaaaatacatgaacagacacttctcaaaacaacacatacaagcagcaaacaaacatgaaaaaatgctcaacctcactaatcatcagagaaatacaaatccaaaccacggtgagagaccatttcacaccattcagaatagttattaataaaaagccaaaaagacacagatgctggtgaaaccgtggagaaagggggatgcttatacactgttggtgggaatgtaaattagtttagcctctgtggaaagcagttgggaggtttttcagtgaacttaaaacagagctactgttcaacccagtaattccattactggatatatattcaaaagaaaagaaactgttccaccaaactgatacatctacctgtatgtttattgtagcactatttacaatagcaaagacatgaaatcaacttaggtgcccatcaatggtggattagataaaggaaatacggtacacatacacagtggaatactacatggccataaaaaaagaatgaaatcatgtctgttgcagcaccatgaatgcagctgcaggtcattatcctaagcaaattaacacaggaacagaaaaccaaatactacatgttctctcttataagtgagagttaaacagacaaacatggtacacatggacatgaaaatggcagccataaacactggggactagtgggagggaaggagggggtcaaggattgaaaaagagctattgggtactatgctcactacctgggtgatggtattaatcataccccaaacatgagcatcatgcaatatacctatggaacaaacccacatgtgcaccccgaaatcaaaaataaaagttgaaattacaaaaacagataagtagacaatgcagtgaactcatcgagtttgtagaacaaaaaaaaaaatcacttaacgtttgtggttattgtacttcctctttcttttggcaagtttatcacaggtggattcaagtaactgaaaaagaaacaggaaaagatgcctggcatgcatggctgttattcctggcactctctctgattagggtcctgtatatatctctcaaaacacacacacatattcacacaccccacagatctataataaactaggggttttccttattatcggatagttaataaaccgcagcataattaaataagagcctacatttattattgtcattcagtaagcagcatatagttttggatttcctggttggagtccatccatagttaataattgggtaggatatgctggtatctcaatcaggatatgaatgattagccaatagttccttgaacagaaccttattactaatgaggagcagtagattgagttgagttttaaggaacttcaggatcactctgttttccttggtgggagaggagggagtgtgatacagagaagtaagtggatcaggctgcatggggttgtggtgacaaggctttgaagacacccatttatactgttggtcaagtaaacagtaaaatagcacccttggatttagggagtggtctgatcttaaattttaatatgcagaaccaccccccaaaacgtatataaaatgcaaatcttagagtcccagccacagacattcaggctcaccagacctgggtcagagcccaggaatctgcattttaaataaccccctcaggtgattctaatgggaacattcctgcaccaaacttggagaagcactgcattcctctaagatttgtctacctcattccatctccctgtctatttctctctctttgctttctcttgcctggtctctatcccttcctttcattacatgtcatgtaccttgatagagatagatgcctgcactcccatgtctagaggtacatggttgccaatgaatgcaaaactcagaaaggagactagaactctagccctctctttcactcctcctctttcctggcaaggtcacaagaacagtcatctatttcatccaagtgtttgcatctaacacaatcactgcattcagttttgagatttgtcatcaaacaaactgcacccttggtaagtaataccattgccctcctgagctgtggtgctattttcttcttttgcactcccttctttgtaaatgctcttacagggttgctaatcctcacctatttcttctttctcggggactttatgaattcaaacaggctcagacagactggc

SEQ ID NO: 29868 - DNA, 2300 bp, Homo sapien
taaaatacttgctcttgaatacctgtctccagatctgcttctgggagaacccatactaaggtggttattaattcagtcaagttgcagatcagacagtaacctcccactgattgtcttggcacttgaaggtcctgaatccaatgcaagttctatgtcttcatgctctttgtgaatgtatctgttgctcaaggtcgtgggtgaccttgagcccagcagtcagcattatccacagctgaagtaatacctatgtgctcatattaggctatctgacaacagtgcaataatcattagacaccactgtttagaccctgagtatgttcatgacatttgccttttgactgctaagtagaagatgtaatgattataggctgatgctttctcaggaggaggaaagttattgagctttacagtttcaaatgcttctgattttcttccacgtttagtctggctgctgacacatgtgttgaaatctctcatgtcgatcagcttgagaatagctgggactgctgagctaagtctgtgctcataaaagcaacaaagaattgtattacaggaaatgaccccaaattgacagaagattaggctaggaagcctgaacaggtgttttaatctctatgcacaaaatcagtctgtacatatattgctcacattcctgctgttttaactatattttttttttcaatttcactttgttattcacaatttgataatattttatgtggccatggtgtctgtgtgatgaactataatccaatgtgacattctctgagagtcaagcttccaaggacatcagattttcacaccaggacactttgtaggacaccttgctactctccatgggattcaaatattagaaataatgagagatctaagacttgatgtaattgcctgcatgtaatgaatcaggccaaataaaaaagtgagagacagagaaaggaaatggtgctaaggaaaatggggacctatcttagtgtttgtctgagagaaaactgctctttgtttttcccgatgtaatggcaagagtctgcagccaggaatctagtccttgcttaggagctgcatgaccttgtgaaaattacgtaggtgttctgcaatttgtaattgcatttattgtaaaattaattttacttttcatacgtcactagacagagcattttgaggttaggaattgggtctgaatcaatgatttctccagcacccacatggcatttggcacagaatacatcaataatgattttggattaaacaggggaacaagcacaaggaaccatggtggtcagaaacgggttgatctgcaccagagaaagggagactaggggagaaaggtcactctagatttcgttcaattattgaaaatacggtgtatttactatgtgctgggcacttttctaggtgctagaaagactacagtgaccaaaacaaaaatccacatctgcagggatcttgcattctagtgagaaagtaagatggtaaaaaagataaatacgtaaattttatacaatgcttcgtaacgacaaatgctaaggagaaaaacagcacagaaaagacagaaaggaaaagagaaggggcgcatgtggtgcaattttgttaggatgccagggagggctgagcgtagtcgtaaatgaccacattatttgatggatcaagccagggactgcaagtctgtgtttctgagagacacataaagaaaagaaggcttaaggaatccagaaagatccagagtggggaaatgaaacgaaaagaaatccagccagtgggaagtcgtgaagggatagttaaacgcgttttgggaggaaagaaaaaagcaaaagtgcggtacagcctttcgttacacgtgaaaagaatcatgtttctttttctagttagaaaaagccaaagattgtgcgatttatgccccaaacccccttgtaaggggattctcacctcaacttgtcttctgtggtcagtgtttcccgcccctgaatcagggttactgtcactatggctttcaattggcccggcgtaggcgcatgctctgcgcgtattggcctccgctcctgtccccagacaagcggccatcttgggtcccgcccctaccgtggggtcttctgggaattgcagtccccgctctgctctgtccggtcacaggactttttgccctctgttcccgggtccctcaggcggccacccagtgggcacactcccaggcggcgctccggccccgcgctccctccctctgcctttcattcccagctgtcaacatcctggaaggtaggggcggggaggcaagcccaagtggaatactgtttctggggcgcggg

SEQ ID NO: 29869 - DNA, 2300 bp, Homo sapien
tttgttgaatgagcaagcagtttatggcatgaattcagcacaatgcctggtagacagtaagcattccacaaaggacagcttttactgtccatttcacagaggaggaaacctcacctgaggacgctgacacaagtatttgacgagtttttcctattttatcactcgacattaagaaggtagtcagggatgctggggtaatctaacttgaggaacgaatatccctcattacaacacttccaagaaaaatggccctcgcaatcctttataaagaagtcaggattccaataaaaccaggaaggaccacattccaaagcaaacaaactcgcctcattccccaccctgggggagggtgttcacccccgttctgctaaagatagagctagggccctccccaggaacttcctggcttttattagtttgtaatcccatacgtaacttttcaaaggtttttcttttggaagtgtgggtgtgaaaatgcttccttaatcacatcgaacgggaggatctccgaccatctgtactttatttgaaaacctagcatccggttgggatgtttgggtgggtggaggaccctgccgtgttgggatgaaacagcagggacacgtttaaaacacaagaaccatgcgcggtggctcacgcctgtaatctcagcactttgggaggctgaggcaggcggatcacaaggtcaggagttcgagaccagccttgccaaaacggtgaaaccccgcctctacaaaaaaaaccaaaataaaacaaaaaacaaacaaaaaaaaccaccaaaaaaataatcagccgggcgtggtggcgggcgcctgtagtcccagctactcgggaggctgaggcaggagaatcgcccgaacccgggaggcgaaggttgtagtgagccgaaatcgagccactgtactccagcctgggcgacggagcgagactccgtctcaaaacaaaacaaaacaatcccacgtcaagatcgctttgaaacacaggcagaaaaattaggcaaaaaatgtcaaacggctaattaccttggctcagttacacatttactcgaaagcccgcctcccccacttttagccccagcgttaagaatgtaaaatagggcgcttagaagtctaagcgataaagatcttcttaccgagagccaagggacaaaactcattacagataagcctagtcctcccatttcccccggacgcctctccccgattgctaaagaagcagccgctccccgggtagctgccaggaaatcagtccggccccgcggcgctgctttcaccctgcagggtgtaagaggcgcacttcctgcgccctccccgcggccaaaccggggtgcgggaaccttctccagagaagctgcgagttggggaaactccgccaccgatccatcgtggcgccgggaaaggggatgcggggctcggaagggctagatttcgcaatcctgggatcgacattcctcccctcccccactttccccagccttggactgggccaatgaaagcccgaaaaagaaaaaaaaaaaaaattaaatctcaatgtagccggagtgcaaaggccgctcggctttgtttcccggcgggggaatgcgctgtgttggaggcgcgaacaggagccgcagacggtgagcctcaccgctgcaaatgccagggcagtgaagccgaacagaaaaccccatcgctttaaaaaggcagctgtccgccctccccctttcccctcgccagggcgaggggcccctcaagtccgggatccgcgagctgcgcggaggatctcgccaaacccgagcaccgtgcggcgtcttttaagagctcgaacaacgggaatccagcaaaaaacaagccggccccagaaggcagcctccctcctctctccgcgcacgggctacaatcgcccccagtccccaaactgtcccagtagaggccgcgcggagagagcagagccgagggacccagcgcaaggcgggagccaagcgcggctgctttaagaacgcggagagcgcgcgcccgccgccagctggcccgggctgcgcgcccccgccgccaccgcgcgccccctgttcgctcgctccttcgctcgccggctttaaagtctctgccaggatccatgctcacatgttacttcctgtatggaggcatggccagtttccagccccgcgctcttcgttccttcccagcctgcgccggagccacaactttcaggagcatggactgaaggcgccctcgccccagcgcccctctgagatcctttgtgttttcctccgtttcctccggccgtttctattttggggggctctccgctccccctgcctc

SEQ ID NO: 29870 - DNA, 2300 bp, Homo sapien
aattgagagtgatgaatggcaaaggaaaaaggagctctgtaaacctgtaggacttttcatgaaatcccgataaagatgagtaaccaagtgtggattcctggtctagagaattgctttaaatgcaactactaaattccaggatcatacattaagcctaatctaacagataagcaaaatgtcaccgaggcctctcacagaagtgcccctgactgaagcaaaaggtatggccctgtatcatcatctattttccaggatttgacagggacagactcctaggactggtttccatcggcaaatgagaaaactcctaattcctcagccttgggaagggattaatatgaaaacaaaacacaattataaatgctaataggattcaccctccccacttcaaacgcagcttgagcacggacatggcttacttactgttaattcataatattaatggaaactagttaattcacaggttattcatctccagagaattgagattcatggtcagagaaggccacttgaggaaatgaattttgtgcttttgatctacttaaactgaccattctctggcctcctgcccctgcctccccaacccaccagagtatttaccatctcattgtcagacttggcttggaggagtgcattactggaaaaaccaatccccgcagggtgacagcaaggctggtagcaaatccgtacaaaatggcagattttgccaggagcagtcttgcagattgtcaatacatgcaatttctcattttcatgaggatcaaactttggattctctcaacacgccatttcaaagccagagcagaagagagggaggaagtgggatggctggggtgcctggcaaatggtactcccgtgggggcccgcatggtgatttttgtccttctgtctttttaatacactgtgtttcagagacaagaaggttttgggaaaggctttacagcatttcaagccggggtcccagaacctgtctgtcccacccctgccaatcttctcaaagtgcaggctgctcctgaaccggagaggtaaaacagaaattccagctttgcaaagcatgacctagagtcttaagctacgttgcaaactgtttcacacagatattgtcatgacgtttgaatttaaaaaaaaaaaaaaaaaaggtatgagatctggggaagcctggggcaaaaggagcttatttcaggttcagtgacttgcctacaagtttctcctgattctgtgtggcagtgctggacaactttgactttcccttgttaataatcccgccatacactgaaaagccccaacaatatcaaaggcttagtggagaaggcagagccgactgttttcacatgtagcaagtgacttcaaccaaaacacattagatgtgaactctcacccttgttttttcattccctggaagcaaaaagctactcaggggcactccatttacaaaaggctcgaaatccagaaaacactgagtggggatggctttaaattcccatcatgcatgcagcatgaaaaatataagagacaaggcacattggatcaaacaggttgccaggttgatccttcttttgaaaaagaatccctccataggagtaggtaagattatcattttgcagtattaggaacgggggaagaccatgtaaatatcatgtaggtatcatatgtagaatgttaaaatgacgtaaatgaccttaaatacccctttatagttatataaaaaggtgacagggggacaaagctaggggccctcagctcaaattataagcactggctccttaaactcattgattcaaccaatatgtactgaattctactgcagactgtgatgggctcactctaagatgatccttcaaagacccctgactccaggtattcagacccttatgtaatcaccttcccttgagggtgggctagatctagtggcttagttttattcagtagaataaggcaaaagcaatgttatgaaagattctggccatgcgcagtggctcatgcctgtaatcccagcactttgggaggctgaggcaggaggatcatttgaggccaggagtttgagaccagcctgggcaacacaacatctctagaaaagaattttaaaaattagccagtgtgattctgagccaagtccggtgccaagcgcagctagctcagcaggcggcagcggtggcctgagcttcaggacagccagctccctcccggtctcaccttccctcgcggtcagcatgaaagccttcagtcccgtgaggtccattaggaaaaacagcctgttggaccaccgcctgggcatctcccagagcaaaaccccggtggat

SEQ ID NO: 29871 - DNA, 2300 bp, Homo sapien
tctcagagtcatctgccctccggccgccccaactcccgcttatacccaaaggactcatgaaccttcctcatcagcctggctctttacgttaacaacatcctccccagcggtcctgcaaggccctgcgcggccgtcaggcagtcagggcacccacccactgtccgactccactcaccgagcccgcctctgagcccttccgggaaggcaccagctactgcgccgacgccggggccttagcgcaggccagggcgtggtcacgttaccatatttgcgcacgcgcggcgcgcggtgacgtcaccgcatctttataaagggccgccttggggcgcgaaaagttcgtgaggtgtagtcgcggcaaccaggaggtgggcgtgtggtaacgcggcgcgcgggagggtggcttgaaagggtctttatgaaccctagggaaaggccgtctggtaggaactccatttcaagaccttttaaagtgagacctgcatatgttgaaagagtttcagagagtgaagctgggttcttagaagctggaatgtcccagcagaatgtagaaatgcgaaaaattcggcacagtagtctaaagtgagtcgagtttacagtcggtttattcaacgaatgcctgtggagcagtttcgaggtgcttcgtcctgggcgtcttatactgagcagagcagcaagagcccctgcctgctcatagttggtagaccctgtgttgacagtagtattgcttgatcatgccttgcggggtttctgagtgtcagtcgacatatttacgttggttatctcattgagtccccgcaaagccctgtgaaatgggcacattagcttcatttgacagccaaggagacaagcttggttgttaatttagcactttgtaatatctcgtttctgtaaagtgcgtttcttaattttcgttccttgaaataagtatatggtagtgtcagtcctctaatatacagaggaagaaacaggttcaagagaggtaaagttgttttctttataaattatactctgctggtaaaagacaaagagctaggactccaaaatccaaggtgttttttaaattttctcctcgtagaatatttacataaaacgtagctcttgcgtcaggacttctgcacttaatgtttcctttgcttggaaagccccttctgacatttatagatttgattccttgtatctttcgatctgtcacctcacaggaccattccttcaatctccaatataagaatatctccacctcctggctccctatcctccacctgctttatttttttccgtaacacagtaacattgcatatattgtgtaatcactcatttatttgtttagcaggtgcacccaccactagaatttgaacatcctaagaacaggtatttttgtctctgctttgctgatgtatcctcagcaaccggaactgcctgacatgtaagtgctcagtaaatatatttgaatgaacgaatgaaataattcctcccgttaacattcatcataatttcagagtactctaacttcacttgataggaactttgattttgctgttccttacccttaccacttaggaaagatgaaaagtagacccttgagtggtcctctgttctaggaatgaaatagagcttttgcatggttataaggaattcttgtttattttttatgtacatttacaaataaggatttttcttaagttggtaatgggttgcatgaaaataataactgtaggctcattacagcatttgtatgttgcttgacaaactgcttacctccctgctttgtgtaagtttgcatagtaacacagttgggacaaatccggctctttcaactttgagcccaacttttgtaggtcaccatccgccttagctgtgaactaaggaataccttgggagttttcttgcagtttttaagaacagcaatcaggaatatatcacagacacttgggggttatctagatagactttgataatttattttatagcatccaataaaggtggttactttctacttaaaggtctgtgatagctgcccttctcattatattgcccacagctgatcctttctgtgagacaccaggctgttgaggaagaatctatggcaacattgtatctattaatatacagcttctgtatttatcaggtaagtttggatactttctggagtgaggcattcacagccatgaaaattattgcaacctactaagtaacaactgacccataatgagataatctgcaaaggtggtgtgaaattaatgtttcctaacccctggactagttctatgcaccagcatgcgataattatctcctcagcctca

SEQ ID NO: 29872 - DNA, 2300 bp, Homo sapien
ctgaggagataattatcgcatgctggtgcatagaactagtccaggggttaggaaacattaatttcacaccacctttgcagattatctcattatgggtcagttgttacttagtaggttgcaataattttcatggctgtgaatgcctcactccagaaagtatccaaacttacctgataaatacagaagctgtatattaatagatacaatgttgccatagattcttcctcaacagcctggtgtctcacagaaaggatcagctgtgggcaatataatgagaagggcagctatcacagacctttaagtagaaagtaaccacctttattggatgctataaaataaattatcaaagtctatctagataacccccaagtgtctgtgatatattcctgattgctgttcttaaaaactgcaagaaaactcccaaggtattccttagttcacagctaaggcggatggtgacctacaaaagttgggctcaaagttgaaagagccggatttgtcccaactgtgttactatgcaaacttacacaaagcagggaggtaagcagtttgtcaagcaacatacaaatgctgtaatgagcctacagttattattttcatgcaacccattaccaacttaagaaaaatccttatttgtaaatgtacataaaaaataaacaagaattccttataaccatgcaaaagctctatttcattcctagaacagaggaccactcaagggtctacttttcatctttcctaagtggtaagggtaaggaacagcaaaatcaaagttcctatcaagtgaagttagagtactctgaaattatgatgaatgttaacgggaggaattatttcattcgttcattcaaatatatttactgagcacttacatgtcaggcagttccggttgctgaggatacatcagcaaagcagagacaaaaatacctgttcttaggatgttcaaattctagtggtgggtgcacctgctaaacaaataaatgagtgattacacaatatatgcaatgttactgtgttacggaaaaaaataaagcaggtggaggatagggagccaggaggtggagatattcttatattggagattgaaggaatggtcctgtgaggtgacagatcgaaagatacaaggaatcaaatctataaatgtcagaaggggctttccaagcaaaggaaacattaagtgcagaagtcctgacgcaagagctacgttttatgtaaatattctacgaggagaaaatttaaaaaacaccttggattttggagtcctagctctttgtcttttaccagcagagtataatttataaagaaaacaactttacctctcttgaacctgtttcttcctctgtatattagaggactgacactaccatatacttatttcaaggaacgaaaattaagaaacgcactttacagaaacgagatattacaaagtgctaaattaacaaccaagcttgtctccttggctgtcaaatgaagctaatgtgcccatttcacagggctttgcggggactcaatgagataaccaacgtaaatatgtcgactgacactcagaaaccccgcaaggcatgatcaagcaatactactgtcaacacagggtctaccaactatgagcaggcaggggctcttgctgctctgctcagtataagacgcccaggacgaagcacctcgaaactgctccacaggcattcgttgaataaaccgactgtaaactcgactcactttagactactgtgccgaatttttcgcatttctacattctgctgggacattccagcttctaagaacccagcttcactctctgaaactctttcaacatatgcaggtctcactttaaaaggtcttgaaatggagttcctaccagacggcctttccctagggttcataaagaccctttcaagccaccctcccgcgcgccgcgttaccacacgcccacctcctggttgccgcgactacacctcacgaacttttcgcgccccaaggcggccctttataaagatgcggtgacgtcaccgcgcgccgcgcgtgcgcaaatatggtaacgtgaccacgccctggcctgcgctaaggccccggcgtcggcgcagtagctggtgccttcccggaagggctcagaggcgggctcggtgagtggagtcggacagtgggtgggtgccctgactgcctgacggccgcgcagggccttgcaggaccgctggggaggatgttgttaacgtaaagagccaggctgatgaggaaggttcatgagtcctttgggtataagcgggagttggggcggccggagggcagatgactctgagaaggtg

SEQ ID NO: 29873 - DNA, 2300 bp, Homo sapien
tctatttcattcctagaacagaggaccactcaagggtctacttttcatctttcctaagtggtaagggtaaggaacagcaaaatcaaagttcctatcaagtgaagttagagtactctgaaattatgatgaatgttaacgggaggaattatttcattcgttcattcaaatatatttactgagcacttacatgtcaggcagttccggttgctgaggatacatcagcaaagcagagacaaaaatacctgttcttaggatgttcaaattctagtggtgggtgcacctgctaaacaaataaatgagtgattacacaatatatgcaatgttactgtgttacggaaaaaaataaagcaggtggaggatagggagccaggaggtggagatattcttatattggagattgaaggaatggtcctgtgaggtgacagatcgaaagatacaaggaatcaaatctataaatgtcagaaggggctttccaagcaaaggaaacattaagtgcagaagtcctgacgcaagagctacgttttatgtaaatattctacgaggagaaaatttaaaaaacaccttggattttggagtcctagctctttgtcttttaccagcagagtataatttataaagaaaacaactttacctctcttgaacctgtttcttcctctgtatattagaggactgacactaccatatacttatttcaaggaacgaaaattaagaaacgcactttacagaaacgagatattacaaagtgctaaattaacaaccaagcttgtctccttggctgtcaaatgaagctaatgtgcccatttcacagggctttgcggggactcaatgagataaccaacgtaaatatgtcgactgacactcagaaaccccgcaaggcatgatcaagcaatactactgtcaacacagggtctaccaactatgagcaggcaggggctcttgctgctctgctcagtataagacgcccaggacgaagcacctcgaaactgctccacaggcattcgttgaataaaccgactgtaaactcgactcactttagactactgtgccgaatttttcgcatttctacattctgctgggacattccagcttctaagaacccagcttcactctctgaaactctttcaacatatgcaggtctcactttaaaaggtcttgaaatggagttcctaccagacggcctttccctagggttcataaagaccctttcaagccaccctcccgcgcgccgcgttaccacacgcccacctcctggttgccgcgactacacctcacgaacttttcgcgccccaaggcggccctttataaagatgcggtgacgtcaccgcgcgccgcgcgtgcgcaaatatggtaacgtgaccacgccctggcctgcgctaaggccccggcgtcggcgcagtagctggtgccttcccggaagggctcagaggcgggctcggtgagtggagtcggacagtgggtgggtgccctgactgcctgacggccgcgcagggccttgcaggaccgctggggaggatgttgttaacgtaaagagccaggctgatgaggaaggttcatgagtcctttgggtataagcgggagttggggcggccggagggcagatgactctgagaaggtgcggatcttcgattctaaggggagaatgtgatttggttttgtctaaagtgctgatagtgggcctcacagaaaagttaccatgaaccgactttccgggattcccttggcgctgcattaattggcctcgttgcaaaaggaaaccgagaggaaggcggcaagacttggcctgcgggtgatgttagcggaaaatatctgtaatttagaccccggagggcgggcctgtgagcgattgctgtccgcggtgctgaaggaaaggcagccacgcccagaggaggaaacctaatgagggcagggcggtgtttccgttttccttggccgggttcagcaccctacactcaataagcgtgggctttctagcaggactggacactcaggcggtgtgtcaatctttagacaatctttatagagtgcatagatgtttaatttcataaaatttaggaaagcttcatttcaggaaggaattttattcctctttttctcccttagggcaagcactttaaccttttaagcccaaccagatgagttgcctgcagttttggaggccttcagagcatttcactagacctctgtctgtgtcggtccagtgtctttagccaaggtgagcttgctcgtggtgtgaagtgtgccacgaaaatgggctttcctgcactccacaaatgagagtgcttagcagccaggggaagggg

SEQ ID NO: 29874 - DNA, 2300 bp, Homo sapien
acgtctggtaattaattaaagaaaaggaaaacctgaaagcccacaaacagaggaggaaaagagtgaataatacaaagcaaagagcaggactggctacacaatttgcagggtccagtccaaaatgatgcaagacaatggcatgagagcattaaaccaaatgcaggacctgtgactgtatataagtcacatacccaagaagccagccctgtgtaagaggtttagagaagcccattaaatgccaatgtggagcctagaaagggtgggaggaggggcaaatttatctatatattacttacaaagagtaaaaatacatagaacataccttttaatcttgcttattcataagaaacaatgaaattccctaacactaaaacctcttaagtgtcagaaaattaaaatgacatgcttgcaaatttttaagtcatcctgtgtatacaatatttcactaacaaagccagtccaatttctatatctgaatcatccctttaaaaaaacttacatttcttcatgtcttttagaaaggcgaatttcttgagcaaacaaggaagtcatctttaatcaaagctgtcataaagaataaaaacatttaaagttacttctaccacatgtcctcagctttgcaacatttgattattttagtaccttaatccattggttctctcagaagagaaaagaaaacttaagatgtaataatgtataaaatgaaaggatgcaattaaacacatttttattcagcatgccagatacatctaagaatactatgaattaggtaaacccaacatatttcatattgtcttctctttctagactctaaccttaatcagaattaaaaacaaacaagcagctggtactaagactactaaacgttttattgaatcaacagaaaaaaaatctgctctgtaaaattcaacacaggaacaccatcccttatgcatgtgcaaacacacatagacagaaaggcaggcaaacaagtatgagaaccaactggaaattcaaggtctttcctttattggaagagtgcccagttctaccatctctcttctaaataggaaagtacttttcatgtgtaactgcgaggaaaagcacaattagatagataccttccccttcccctggctgctaagcactctcatttgtggagtgcaggaaagcccattttcgtggcacacttcacaccacgagcaagctcaccttggctaaagacactggaccgacacagacagaggtctagtgaaatgctctgaaggcctccaaaactgcaggcaactcatctggttgggcttaaaaggttaaagtgcttgccctaagggagaaaaagaggaataaaattccttcctgaaatgaagctttcctaaattttatgaaattaaacatctatgcactctataaagattgtctaaagattgacacaccgcctgagtgtccagtcctgctagaaagcccacgcttattgagtgtagggtgctgaacccggccaaggaaaacggaaacaccgccctgccctcattaggtttcctcctctgggcgtggctgcctttccttcagcaccgcggacagcaatcgctcacaggcccgccctccggggtctaaattacagatattttccgctaacatcacccgcaggccaagtcttgccgccttcctctcggtttccttttgcaacgaggccaattaatgcagcgccaagggaatcccggaaagtcggttcatggtaacttttctgtgaggcccactatcagcactttagacaaaaccaaatcacattctccccttagaatcgaagatccgcaccttctcagagtcatctgccctccggccgccccaactcccgcttatacccaaaggactcatgaaccttcctcatcagcctggctctttacgttaacaacatcctccccagcggtcctgcaaggccctgcgcggccgtcaggcagtcagggcacccacccactgtccgactccactcaccgagcccgcctctgagcccttccgggaaggcaccagctactgcgccgacgccggggccttagcgcaggccagggcgtggtcacgttaccatatttgcgcacgcgcggcgcgcggtgacgtcaccgcatctttataaagggccgccttggggcgcgaaaagttcgtgaggtgtagtcgcggcaaccaggaggtgggcgtgtggtaacgcggcgcgcgggagggtggcttgaaagggtctttatgaaccctagggaaaggccgtctggtaggaactccatttcaagaccttttaaagtgagacctgcatatgttgaaagagtttcagagagtga

SEQ ID NO: 29875 - DNA, 2300 bp, Homo sapien
cctattgcagtccacctccaagccactttccctcagggacctctctctgttccctctcttttctttccaagtacacttttccttcctttacctgctatgtccaaatcctgcctaaaattgcacctcaaaggagccgcaactggatgggtgggcagaaggaaagagacttttattgaagggaaaaagggagcgatttgcctgaagttaaaactagagcttttctcccccgtcccttaacgttctccagggatgtttcgcagcatggaggggcctaggacaggatactcagccctctcaagacttgttcctgggtgaagaaacagagggtttacctctaccaccactttctctggcttcacatgatcgtgtgtctttggagatggaattcactatcaaaccctgtttgctcatattatatccacggtaatcctcttaaactgtgattgcggctacaaagctcgtggtcttgcaaaagctggctagcaagatataattgtcccgcgaacaaaaccagccaaaacttttcaaaaaacccttgcacccagtcctccccctttcctaaacctaattctctcgctcgctctcttgctagccaccaccacccccctccgtaagaaccctcagcctcgaccacttttgttgtcgccaagagcacccggcctgttgaaagtgctggagcgtctttgagcagtttgttgtgatacgcaggtggaatggtctgcaaacagatgaattcagcccctccaaaccaagcgcggagcgcgctgcttttgtgcgccaggcacaaaacgctgaattcctccgaacttacttggggcctgtctagaaaagggtcttttcttccctctgcttgtacctctggccacactaagtctctgcccgtcccccttcaggccccctccctctcctctctgataatccttctctttattttagaaaaacacaaaacccggttccacgcggtgctttagtggctaaaagtgaaagagctgccttggcagaattcagctctatgaatcacttcggaaaattggttcgactgaatggccttaggaggaaaaacgttttaataggatccagggggaggttctgctgtttcaatctgctccttaaacaggtggagatgggaccttctcaattatacaaacagtaagtacccatcagctgggagagctgccctccgaatcctccccgcacgcagccctaaaccagaagcagaactcggctttgcctcagaaacccgatcataaatcaacaattctgatctattaggatctccgaaagtcttccagctctcggtttagtctcccccagcctcagacccagagctggccataaagctggaggcgcacctgcgcggcgccgaggcccccgagatgccggcgagcggccttgctctccgtgacgcttcggggtcgtccttagtcagtgggagctttctcccgacctccgacgccagccaaggcgagctcattgcttttgcataaattaatatttccccattaacaagttcccccctccaaacgcggcgcccgcgtccatgcgccacatcctaatgaggtaattatcatttgcgcgtgttcggggctggcgccggttccgtgggtaaatggcagtttattagcacgatgcccagctcggctgcggagggctaagggatacttcggctactagactgatacccaggggccctttgggggcgccgcgtccgggaccctccgccctccccgcgtcccccaaacctgcaggcctccaaagttgtgaatcacgcacggaactctgcctaggtttgggtttgggtccccccccccctttccttccaccggcaaaaccatcacgattcctccccctccccctcccgtctcttccctctttccctattcgcaaaccgctcgcactttcccgagaggagcgcgggcgccagttgcctccttttaaagtttgaggggcggtggtggcggcggccggcaggcgcgggggaacacaggggccgctacgggagccgcgccgccgcccatgtcattccacttcaagtgacttcatgtgatgtcagctgaatgtaaaagacagtgatctcacgcggaggggaagatgtttgccatcaaaatgtgacagaagagacacgctgcatggctcggaacgcatctccttggtggtgggggaaagaggtaaatgcgaggtggctctccggtcctctttaactttgccccttcactgtccagctcccagcacgcgtggcagaggcccgggtccagggaagggctcaggggggttaatttgagactcttttctcaccgccc

SEQ ID NO: 29876 - DNA, 2300 bp, Homo sapien
tgagaacataagtaacttgcccaagatcacaaacccaggtggatgttagagcctgtgctcttaaccactacactgtagaaagaagaattaagtggcaaatttttagataagccttccagcttcttttaaatagagccttcagatccagttcagctgctgaagaagttcccacctttccaagggccctgttgtctatgatgggcatccttttgggtgacaagttcaaaaccttcacagaattttccccagagggcatattttaaaggtgcccaggctgttgggggctttatttctttagtgctgtgttttaggattaaagtagctttatttagcaagtttcaaattaatatatttgaattaaagggaggcagtaaaggagtagaaattatacttaaatacttagtacatgtcgtcagcccacaattcttatttctacagacttagagtatattttaccgaaaagttagtgcccaggtgttagggtagctctggaaaaggcatatctgaaccaaggactaaacaaaatagggagcacttaaaatattttattaatttcctcctttgaagatcataacaaatctgctgcattcccatccatctcaaataaagcaaacccgattaataagcactgtgagccccgtgaggaagagcagaacaacccagacaccaaggattgtgctgataaatgtttaatgactggctttctgggagggagaaagccctggtttgtggcatttgccaattcccatgatgaaaaaatcccccacgaaggcctatttctagctatcaatgtgatatccctgaacgcggattcgggaagagatgtgcaagatcggctgtcatgaccggcaaacacactgctccatcccttagggaggaggaacggaagacagtccgctctttcaatgctgtggctatcttggagagctgctgcttccggaggcactcactgtgtgacattggcaagtcacttcacctctctgggcctttgtttcctcctctacaacagataacgtggaagatcccctgtacctctaacattttaaagttctagaaggcattgcctcctgttttttccgacatccaaatgccttgaagcgcctttctggaaaaccaagttagcactgtgctgcatccaaaagtgcctccaatttcatctcctgagcataaggtttggaaaggagtgacttactcccttttgcctctttaaatgtgtagccaatggggcatcatacattttttacacttcttttgctagatgtgagatccaggaaggaaagcatggatgttccagggctttcttgttctcctggggtgggaggctgcgtgtgatgcactgattcattgctgtatgcaatttctacctccctatcctttcggcagccgagcaagattgttgatagtctcctacctttttatttttatttttattttttactactagaagccatttacaagagtgggaactgcttacataaaatggaggggcggcagggggttgcgttattttattttttttttttttttcctgaaaggtggcacgtctctcagcaaagagaaaaaggcatgttgcacaaggcttgctggcagtgatataagccagcgccggtttgcctgttgtcacagccaaagcaaaatgccacctctgcctagaagccagagtgccacactcctcttttgtgtccctgagatgtacccctcatgaggccctggaattgtaggtttggccaggagtttgccaggattgctcgaaggtcatcttccaatcccaggaggctgggggtaaggggaggttcatcatagttctcaaaatagatctgttgagccccccccccccccagattacatgtcagctacaaccagtaaatgtggaatttgaggcctggggttagcacaagagagccctccagttgccaggagtaaggtagggctgccagaataccagtgacccagtgatcaccctgtccctgggccccttcttaacaagcccagatgcagtgacagcaaaagctccagaatcccaaggcaggaggtgccaaaaacaccccccaacaaccattaacaaaaaaaattttcagtaaaatgttctcacccctagaggggaaaacctgtccatgcctgaagcagcttgaccccagcaaacaccctgcctccatggagtgaactgcaaatctccaaaaaaaaaaaaaaaaaaaaaaaatctacttcctacccctcctgctccctggggagggacagaaggttcctaaaactgacagtttcgcctccatgatctttaaaagagcagaagctggctgtga

SEQ ID NO: 29877 - DNA, 2300 bp, Homo sapien
acagagaagttaatttgctcaggatcccacatcgggttagtagaagagctgagatttaagccaatgcccttacaaattctgccatactgcaagataattccagttagtgcataaacaaacaccttgatttggatagtggtaattattttagtgcatattagaaaaagtatttttttaccagctattaatgacttaggacaaagctaaatgttaagttgattaacatacgctttaatagctaataatattatagtaaaccttttagtaaataaataacaattttatagaaaacaatagtacataatacacgtatattctatatgtacattgtttatatatggtagataatagtaatcatttgcttctgaaatcaatcctaggaggggttaatattatcattctgttttatagctgaggaaactgaggcacaaagaggttaattagcatgcccaaggtcacctggtgaataagcagagtgtgactatcaggtgctgtcagttggaccataaagcctgcacttccaggggtgtggtagagtagctagcactggttcccaaggtcaattatgtgcatctctctccaactccgccttcaatgagagcacattggtagctcaaaattagccttgatgggagtatttacaccatgcaaattggtaaacactacaaatcagggtgttttgttttgttttgttgttggttttgaagagtcagtttatgccgggcgaagcagctcacgcctataataccagcactttgggaggccaaggtgggtggatcacctgagttcaggagttcaagaccagcctggccaacatagtgaaactccgcctctactaaaaatacaaaatattagccgggtgtggtggcgtgcacctgtaatcccagctacctcctccagagaggctgaggcaggagaatcacttgaacctgggaggcagagattgcagtgagccgagattgtgccattgtactccagcctgggcaacaagagcgaaactccatctcaaaaaaaaaaaaagagtcagtttaccagcataccactaactattacctattaagtcagcagtccccaaactagaatgtacagcagcaatacttggcaaaaaaaaaaaaaatttctggtttgtttttgttttttattaattaatatattcagcttttattattattttttaatgggcacataattgtttttgttttgttaatacagagtcccaggccctcacctccagagattctgattcagtcattctggggtggagcctggatattgctttccattaagttcttcacataattctgataagtagtacaagttgggaaaccaatggactaaatcagtgattcttgaccttggctacatattggaaactagggagcttttgcaagcattaatgcccaggtcacttgccagacaaaattgaaacagcatctttggggttcagggcccagacatcagtatttttaaagctccccaggtccttcagatttgcagccaggcttaagaaccatcagataaaatcatttctcaactcatttctatctctgaagcctctgagatcacctgtgtttccctgtgaggtttttgttagaacatttaatggtttagttccatgtgggcactagcagttagtcacctttgagatttgtctcttaactatccacactactggagggaagttctagtaccagtcacctaaaacattacatgatccccaaagcatatgtctttgttttagatgtagtttttgacccattggtatatgtaggagatttgcattcataagtagggctgacttaggatgctggaagtttgagctcatttttctcaagctcagaagtattccggtaggggcaagttcagattaaaatgttcttctttttctgagccacagggtagcttattcacaaattatgtcttccacacatggatgcagttaactatacagatatttgtttaagtgttttctaaaatctgtgtcatattcaatcagtctgtccaagccacatttaaaatacacaatgtcattatgagatattaaaaaacatctaaaagtttgtcccagtgtgtgcgggtagcacaatgatataaaagcataatttaatagtatcagctgtctggtcaagtatattttccagctataactaagggttagcttgtttgtgaacagtttttcttttaattgttttgattggaaatctacttgaaatgcattacacaaccttcttgcctttttaaacagggtactgactataatcttttctcaatgactcaggatcaccattgtgaccatgtct

SEQ ID NO: 29878 - DNA, 2300 bp, Homo sapien
tcccttttaaatcagcccaaaagcagacaagagcaaaaatgggtggaaatacccccggacctacagattcagaggacagagcatggacgagtttttgaatgttttaatacatagaatctacattagaagagcctagaaccgttgttctccttggtagaacagattctgtgtcccttgttctaagccaacatagcaaggacattgtttcataggtataaatatgccatgacaaaaagtcaataaggcactcctcatgtttcagtgctccagaaatttaattcatcaatttgacagacatttacagagcctctagtctagtctatatcaggttacttgtgctgaacacaaaacaaggcatgctgtcttttgccctcaaggagtcagttgagttaaatgacctctccttttctggcgttttggtcctacagagccctctcagtcatattaattttgcattcagcttcctcttttcacagccctgcactccaagggctatgaacagttctcctgtgaaaactgaagacgattacttcattggaagggagcaatttagcatttccatttctcaaattgggccggaactggcacacaagcctcagaagatcagcacagggacctgtccaactcagtcctcatcaggcctccttttcacaaaaccggcaaatgatgtattttcagcgtagcttaaaatgatcatcatgattagaaagctacttgagtgcactgaatcttcagaagccaagatacatttatctttaacatgatcatataatatataggggtgttttaagggtttgggatttttaggtgttttttttttttttttttttttttttttcttaagaactgggctcccaaccttagaaattatacttggcttctctgcatgcactcagggtgtgttagcaagctggcatcctttcctgagctaactagctgtgtggtcctcctatgcactgttagaaaactgctacaaattcctcttaaagtaatgctttcctggtggctgtatgatctccagaacttgacagtgaacaatgccaaaaagatgcatcaggcaaatggggccttaataaagccacttactaaccaggtgcttttctttaaagacatttgatgatatcacccacttccctgaaaccttttaaaatataactaggccccttttacaatgctgatgtcaaggataagatctcccacctgtattaccagctggccatgtcaggctaggctttttctatgagttgttagcacattgctgagatcctaatttgaccaatgtcagaattatgttactttcagattccaccatcacacaattcttgaatttgtatatgtatattaagcgtacatataaaatagttgtatattatgacattttaaatcataaaataatgtattttattgcaaaataatacattgacattgaaaacaaaacatagtggaagtcccccaataccacacctcctaatttccctcccctcctcaaaggtagccatctttaacagcttgatgtattacctttttatgtcctttaacaagcaaaataaattttgtagtctttaaagcaatgtaatacacttgctggattttaaatttttgtctctttcaaaaccagaaaggggaaaataaaaacccacagcaataaacatcatttaagatttttttccccaccacgaggttttgaagattaaaaactgctttggtttttgtttgttttgttttattaatgaagtaattcaaggtaggcagttgccaatgtgagagaacttacatatgctatactgctataatcgagtttttgtgaattcattcattctcctgcaattaaggttctccatagcatgtaaactatagagagaaatacgccaagctacaagtgttccgggtactgccggaaaggaagggtgtgcatgtctgtctccgtgaataggccttccttagttgggaaagtcatttaaaagggaacacatgtgaagtcattgttgactgaaactgattacagccttcaattttctttttcactgacctctcagaaaatatctcctccacctgctgccatctgaacgctgaattggtcttttcctactttgttttaatagaaccaggattgcatttgaagttaagctgcaaaaaaccagtcgatcaacagattttcgagtcccacagtcaatatgcaccatgtttaatgttatggttgatgccaaagctcaatcaacaaaactttgcagcatggaaatgggccaagaggtaaaaaaaaaaaaaaaaatacagatttttttttccctcttcattgatca

SEQ ID NO: 29879 - DNA, 2300 bp, Homo sapien
tctagtttagtttgcttttctgttcacctttcttcttgaaattttgtttcagtttggaacactaagctgagactcgggctctcaagtataattttataggttttgagatactcaaaagagagcatttatttccaaatgtccacatattttttgtctagctatgtctgacatatgcaacattttcaaatctcaatgtcagcacaaaataacattgttgttgcgtaacattttgcatgacaattttttctgtgttatgagcttcaattctattgtatgaaatggttcttaagtatactatatttttagttccattttatcagtgctccagctagcgcaagcttgggggataggaatattgtaattcatctgaagacagcgttaagtggccaaaaaaaaaaaaaatcacttctaagcacaaatttctccttgacctctgttggggagagggaagaagtgctaaaggattttgcacaatattttctttaaagacaacatcttagggaatttacttttagttccattttgccatttagctagtagtacagcagctatgcaaacaaacaggaaaatagtgcagtgtctcactaatgtggcttgatctacagatgatggaatcacagctaattaatagtaaatgaaagactggctacatgggttaattggcagatcaagtgttctagattaaaggatccttaacctgcttactttaatggttttatgttcaagtaaaattgcaaagggttttattaaacatactgtctgtatatatacatcaggcatacacatatctgcgtacatgtgcacacactcatagaatggctgcatgcacatgcacaatttatgtgtatctattgatatctattgtagtcaatctaagagtactgcctattaaaacaaatcttcaggtggtcctagcttcaacatcttggatttttccaaacataaaaattattgacttttttttaaaaagtgcataaaaatattggtatgaattatttatttatcctatgtcataaacagccagaattcccctagatttggggagtgtttcacccaaaaggacaaagctctctatttttaaagcaagagatttcaaagatgtgccccaagtgggatttcctgaagatttgtattaatgtgcaggcttgtctgttactagaaaatgtatgtaagtgtgtgatgtgtgtatgtgggtgtatgtgtcgaatgggtaataagcataggatgaggaatttgcaaattgatgtgtaaatgtgaatatcaacgaacaaaaaatagtagcctgtgcatatttactatcaaaatgcaaatacctcactctacacatattacccaaaaatatatacacagtatgtttgtagaaatgcctgaaagtctacgaatgaaattatgatagtctatttatcaaattactaacaggtcagatgccccaaaagcacagaagtcaatcttgtcatacactctttctctaaatatatgttgctctagaccaggcaatgggctctcagcacctaagctcccacatctacttattctgagtgttggttgttctctgcctaatccacatgtttatgtttcccacagccccaccttcaggctctaaccagatccagccacatttccatctgggtttggcagagataatggagctttccattgacttgaatccaggaagcccattttcacactagccctcaggccctgttagactgagactttcaacacctggctagtcttaccctgtcccactaatcaccttacatcccatttgctagaacactcttcttgcatagtgtctcgctgaatttatttttcattattaaatcctaaattactaatgacctgatatgttcattacgtaagaaatgcataaaagaatattaagaacctttttttttgtaaattagcaatctcttatgattttaagtctgcctacttcctcccacccactgctgcctgccagaaaccttcctatttagtaataggtaattctttctagcaagaaacatcctgaagccaaaatatacctgtttcagatgaagagatgaaaagaaattttgccagttcttttgcaaatgtatgtacctacttggggaattctactaaatgatgtttatttcactatatcccatgtgctctgactctgagacttcaaggtttgaagggggctaaacatgaaatacaagttcccctggaattcagactggttgaatccaagcagtttcactggccaagaaaacctttatgttttggccgggcacagtggttcacgcctgtaatgccagcactttggaaggctg

SEQ ID NO: 29880 - DNA, 2300 bp, Homo sapien
ttaggcaaggacacaaacattcaatccatttcaataaatgctaccaagaaggtaagttagcaaatacaacaggaggacccaacccagggaagtgaaattttgaagctgaaatatggaagatgaaaacaaggctgttagttatgcagggagatagggagagaggggaacaagacttatgacagccttcatgtaggaaggagactggcactggaccagcacaaagacatctccaagctctatggagaagaagcactctccgtatttgactgaagctgtgagatggcaaggaagaaaaacccttttaactaacagtgggtgggggaattactgaaagaaaaataaattcttaaggaacaaaattacaggagaaataactagtcctgtggaaattagaaaatgataaaagtcagagttcctttctgtaactctagaaagcatctttcttttcttttcttttcttttctctcctctcccttttcctccctccttcagtccctgcctcccttacttcttctctctctttgtctctacctctttctctctcttctttgttaagtgtcttattctgctttgacctgatccagtgtggcagccaaccctgagtctgtaagatgttactgtttcagttctaccagccaattgcagtctcaatgtctctcagtctagttcaactgcttgacagagtaaatctgattgatgacagggcactaataaaattagttggttcatcttgactcagatgcccatatgttacacagcttattttttttttttttttttttttttggccacacagaattggcataccaattcatgttccatgggatctaggtggggttctactcccagccacaaggacagaggacataagctatgcctatgcacatcagcacagcatattactggccatagaaattggccagtaatatggccaattggacatgtacttaagttagactttgggtgagaatttggggatgaaagactgtctccatcttccttgcatattacaagaggaaatattcacttttccgttagatagcatgatgtgatgttgtgcagtccacatctttagcaacatttctgtgaagataggggagccaaactgagcatgaagccaccccagaggaaccaaagccaagattttaacaaaaatctcagttgtggtgatatcacctgagccctgattccagcctttcctgaagctgggtctaccccaggatattttcttttgttgttttaagccagtttgaggtggatttttctgtcacttgcaaaaaaaaataaaaatgtcaaactgacttggcttgcttctcactccatcagttatggaatagggcttggggagggcaagtttatgtttcaagtggtaaatgactgtttgggaaggtgattgatccaaagcacattccaggtgacttagaagtatgaagaaacaaatagcatggttagcacgtgttgcaattacaactaaatgtataagcaagaaaggaaaaaatagaggtcagttatgataccaaattgctctatcttctaaagaattttaatcacatttttcatcacttcattaatttggttcaatttttcttgaaaacagtaactattattcttagaaatagacacagactatgtttgaaacctctcaaatgagctccttttgaattattcatgtgagaaaatctctgtagatatccagaaatagggtctctttctgtttccctcacttaaaaacaaatgactgcattttactaaaaagaaaaactaaactgaaaccatatttgaaaaataacaccccatttttcttcctacaaatcaaatttgctgaaggaaactggggaaaaatagaactgtaataaagcatttcaatgtttcttactatatgtttatgtacgtgtttcttacctgttacaatgtataaataactagcaggcaggcagctgtctactcaaataggctgaacatttttctagcacaaggccatgagatctgggtgaatttcactagtagtagatgtgattctaactctgggccatgggacaaagaccttctttataaatcagctttctattttctcctctgctcatacttttctttttcttcccaaggaacgcaaatttcccaagtttgtatccaaagaaatggaaaacatgtacattgaggagctgaagtcatctgtcaacctgctcatggccaacttggagagcatgccggtatccaaaggcggggagttcaagctccagaaactcaaacgcagccacaatgcttccatcatcgacatgggcgaggagagtgagaaccag

SEQ ID NO: 29881 - DNA, 2300 bp, Homo sapien
gaattcatggccactttgccaccaatgtctgatgtgacagtatttaaatgcctaaagagaccttagaagaaatatttaatctgtgaatgacctgtttctggccttcaacagcatctcctccccaaatcatcacatactccttaatttgtgtcctaaacatggtccctttatttcgccaaatggattataatttcagctctttcctcctcctgtcacctacccataccctgtttccataacactctttaaccttacttgatcccttgccctattactctggcattgcaaaccacttattccacttgcaataccttctcttttcaccacccatgtatatggtatgttcccttaagattttattctcttctttgagaaatatatgattcccttcacttcaagttgcttcattcacgcaagctttttgcagtttactgacctggatttgttgatatgttgcctcagaataagtgctgtcaatctttttcacatgtttatgttgtagctcccaaaggagattatagactctttaagagaatgccttctaaaaattctatctatcccaagcacctagaacaatgtgttacttcattaaaaggtgctggataaaggttgttgatcaattgattggcttactatattttctgttccaggaaaaccaataccacatgatttgaacatcctttacttcttgagaagaattaaaaagtgaggctgcaaaactgtcacaatccccgcactgctcaattttttttaaattttgtgttgttaccaaatgtgtgatggccacaaaagttgtgtccttgaggtatggtggtgaagtcaaatataagccatccaagtacttaactcaaaagatcaaacagaattgttgaggttaatgtgaaaccagttgttctgagttcatctgcaggtctcaaacaggtcactttactatcaaagctagtaaaactcatggtaaattataaaatacgtaaagacaaaagtgatttaaactttaaactcatgctacactattaaaatcactcccacgagtatctacagataattagagaactagaaaatacataaatataggcgatgaagtggagaggtctctagatagcctaagttctgaaggtggctggctggtggtttgttttcatccatctgcgtgcgggtcgcaggttacattcagcacgttggccagctccctcgtttaccaggtttactggcctaagtgaaaggagcacggggaaggcaggcaccatctgctgctttgtattaatagtttacccgagaggcaggggtgaacagagtgcgacagtcgacgcattagatgttgacgccgctgagttcttagggtgtctttgtctgatcgcggggtccccaagcctccaccgagccagaatggagggagggttaagcaaccagaaacccttctatttttctggtaggctcacctcagcagaaagcattcccaggtcttgggaactgaagaagattcatcatagattttgggggtgggggtaggcaaggtcgggggcgctacataaatggttgagttgcctggtcgaaacaccaatccattcaaaatttgattcacttttattttaattagactgggcgcatgcggaataagttgctggaatcagagtttacacaggtgggacaaacacgctgcccagcccccacgccccccacgccccaggtgtaaagaagcctggggaaaggagatggaccctttctttcccgtataagatctcacggacttcctcctcctaagtaagacctctcgatttagcgtctccaaacagcccgctcggctggtttctggatttctccctcccccaagaactttttgtccgcgggaggggaaaaggggttgaggcaatgagagccagatatcaacaaaaaaattatccacgaagccggcaggggaggagggtggcaaggtattggggtcagaagtactgaggctctgaggacgctccgcgctctcccccctccagccctctgcagcagccctttacgccgcggacacgggagagttaagccaataaacacgtaagcgccgctccctccccaatcggcaagatgcctcttcggctcttggctgcatcgacagcttgcaacactcggcatcttttctggaggcgcctccttcagcagccgcagatggcatccggctgcgggctcggggctcgcaattgattctcccccttgcccacctcgagtccacggacgcacctctcccttcccctcctcccttcgcgcttctgggtctgagcccagctcgcgaccgccgggcagaggatcagtcg

SEQ ID NO: 29882 - DNA, 2300 bp, Homo sapien
gtctatagaccatttgaggataactcaccctgcagatcctcaggaataaagatgaaatattccagtactttcaaggaggctcagaatctgtgttaatttggtctgaaaaaaaatgtgccttgtgcatgttggagtgggctaaactctgtttaccctaaagcgcatggttaatagaaggaactgagttcaaggagctgaaaatgtagacattgccatgaaatttacttatacacctacaaagtaagaatgaacagggtgctgtatggtctacaagccacagtcatgtctttcatcaaacatgattgaatgtccctttttgagaaaactgctttgctcagaacatcatatttctagcccccagagaaagcctttgtggtaccaaaccggactgtcctcctttcagtgctctgcgcaccccctgcactgtccccggcatcccttgccccagggccaggctcttctccaggagtgaggctggcatgctaggttgtgccactgttattcaccctgaaatgtatgattagttaatattcatgaggccttctacccagtggagtttgttggggcatatggaaaccacagtctctgttctcagcaagtttgcaccaaagcgtctgagtctatttactcacaatttgccgatgttttgacatttccttgctgatttgcctcatgaatgagtgcctggtgatactttcctgatcggaagtaataccccaatgagccaaagattggcttctcctgttgccatggggcatcctgtctcattttctcacagaataaatgttgcacttgagggaaaataaaaaaaggtggcagccctaaatgtctccggtttctgtgtcttatgcatagtctctgtagctaaaaaaagtaagtagatttgtcacccagctctatagcacttacatgtggatgatagcatttttttcaccttaatcttgtgagattagggataaagacataattctttttttttttagtttgaaattaaaacatattttctgtcactactatacaaaaagtgtaaaaaatataaaacctaaaaaccaaaactactcttcctatttcagtctccaaccctatttacttaatttttctctttggaactgattatggcttatttggtatgcacactcctagatatttctcagtgctctcatatgtacacttatacatgtgtgtatgtttctaagcatagacatacacagtgtaaagaaacatatgaacacatctattcacatatatatgtggttctttttgcacaaatatattaaatataagataccactgattgtacaatgtgacattattttatgtacagcatcaagactattgcctggccaataaaaattgtaagacaatagcaattatagaactcataataatgtgaaaatgtgcaaaataaacatcttgaaatcgatgaaatatggcagcttttttttttattgttgttggtttcttttcttttttttttttttgagatagggtctctgtctgtcatccaggctggagtgcagtgacataatcacagctcactgcagcctagaactcctgggctccagtgatcctctagtagctgggactacaggtgtgtgccaccatgccatcttttgtttttgtttaatggaacagcacagatatattttcacttcagggcaaatagttccacctgtttttaaactactggctattatagtcagttgtctcataatttatttagctattctcatattgttgaacatttagtttgcttccagatttactattaaagaagcattgaatgcacatatgtcagtataaccctttgcatacatatgtgaaaattatagaaaacatattcttaaaagcatacctaagggttaaagaccataagtgatatggtttggctgtgtccccacctgaatctcatcttgaattgcagctcccacaattcccatgtgctgtaggagggacccagtgggaggtaattgaatcatgggggtgggtctttctcatgctgttctcacgatagtgaataagtctcacaagatctgaaggttatataaagagaagttccctacaccacttctgtctttgcctgctgccatccacgtgatatgtgacttgctgctccttgccttctgccataattgtgaggcctcctcagccacacggaaatgtgagtccattaaaacctctttatcttctcagtcttgggtatgtctttattagcagtgataaaacggactaatacaataaattggtattggtagagtggggcactgttgtagatacccgaaaatgtggaagcaactttg

SEQ ID NO: 29883 - DNA, 2300 bp, Homo sapien
ctcctcctcctcagtctactcaacgtgaagacaatgagaatgaagaccttcattatgatctactttcacttaatgaatagtaaatatattttccttatgaattttaaataatattttcttttctctagcttactttattgcgataatacagtatatataatccatataccatacataaaatgcattaatcaagtttatgttattggtaagacatctggtcagcagtaggctattagttaagttttgggggagtcaaaagctatacttggatttttgggtgtgggaggttagcactcctaactccattttgttaaaaggtcaactgtatatttctgtttgtacttacttaaaactcttcaaaggtttcccatatcaaatagaagaaaagccaaactctccatgatgtataaagcacagcataacctgatgacagctgccccaccttgctacatagtagtgtcctccgcctcctctgtactctggacgcactggccaactttccgtttcttggacgtgccaaaatcttttcctgctcgcagacttacaacattgtttttcctctggctagaaagatcttccactcacgcttggcacgtctccatcccactactcaggtttgggctaaaatgtcaatacccatttctgactactatacatgtacaagaagtcctctccctcattagtctctgccacttctttctcttcaattccttcatagaacttatcttgacttaaaattttaggcaaatatcttatttggttattttcttggtaagcagatgtctctctcactagactctaagcaagaactgctgtaagagcagggatcatgtctgtattcctgcatatagcatcatacctagtgctccataaatatttgcaaaatgaattaaccaattaaaagctccaaggagtcaggttagagttgtttaacccagcaatactcacacttgtttagccgcagaaccaatcttaacataatatctttcagccctcccggagagctcatgtcctgttaatataatttggggaacacagactttcagttggcattctctctggccctttgtatcgctttatgaaaaaacacctttcaggcagaaggcacacacctgtaatcccaggacttttggaggctgaggcgggacggatcacgaagtcaggagacagaagctttactttcttaagaggcaaaaagcaaagagtttacaggtatttcactttatagcctgagaggcatcctaggttagaggcaaaggtaggatttcagaattataaagagattggatttcaattctaactctctcctataaaataaagatcataattccaacatttcaggaatgtttggaggacacaaagaagtagaacatacagagaactgggtgcaatgtgaggcacatagtggattctcaataaatgttcctcccataccttaactactcccttcatccctctattggagaaatatatttctagcaacttttagagaacaatggggaaacagcaaaacgctggtgtggattatattgactgccagtgaacagggttatcaactaatatatcatttataatttttcatttctagtatttgctccaccctcctgtaaatattagacatagccttgcccttgaggatattttattttattatttattaatgtatttttgggacaaggtcttgctctgttactcaggctggtgtgcaatggcacaatcttgggtcactgcaacctccacctcccgttgcccttgagaattttaaaacttagctgtggaagaacaatcaaccccaaagaaatagctagagagaaataacagtagtcaataagtgttgtaagaaatccttatagacataaggattgaagtatctaaggtttctcttattaaggatactggagagcatggatttgcaattcctcttaagtgggcccaaatactaaatagtttaccaaatgcttttgggtggagttggagaactctacccaaaatttaatgaacttctcatttaacaatgtgcccttctaggaccacaacacattttaaggaatctgtcctcataaatccccaactaaagaaagattcaaggaataggaacagctccggtctacagctcccagcgtgagcgacgcagaagacgggtgatttctgcatttccatctgaggtaccaggttcatctcactagggagtgccagacagtgggcgcaggccagtgtgtgcgcgcaccgtgcgcgagccgaagcagggcgaggcattgcctcacctgggaagcgcaaggggtcagggagttccctttcag

SEQ ID NO: 29884 - DNA, 2300 bp, Homo sapien
ctcagcttcatgtccatcaaggtctggttgcagatctgcctatgtcatccttacactgggacccaagctgtcagagtaacctctatatagaaattatattcatcgtggtagaaggaaataagttggcaaatcacttggtggttcttaaaacttctgcccagaaatgcacacattaccaataaaatgcccacattttactggtcaaaacaagacacatggctactgctgggtccaaaagggcaaggatatatagatgttgaggtgcactgttgagggcagcaggacattgctacaatctaccctgcctctgatatggacctctgagtcttcccctttgcttctatagaagtgatatgtaactaatacatgctgagggcttatgaaatgcagactgccctagatgggctatctgcaaaatctcattgggttctcacaaaaaacagttaagataggtattttggctccattttacagattaaaacaaagaaacaaactgaggtcttgaagaggttaagtaacttcccccataagatcatatacatacatggtagggtacacactaagtaattgatagtgttagttccccccacccctcccccatagttgcataatggcttatttttgaaacaactgtttctaattgttttaggctctatctgcatgtaggaagagcagtaggaacaaaactggctgactgcagatggtgcaaccagtccactggagttcctactctctaaatttctagtttttctgcagcaaaattcatgagcagggggcatttacactagaagctgcctccccctcccagacagcaaattactgatttccgtatttctcatctacttctacatatcaaatacccaccccccccaccaacacacacatacacacccatgaactccaaacctttttggcaaatctttatagtaaacagatggactatctgtgttgctgggagaccactcataaatggaatccagtccaaagggagtgagaaggaagaggacatatcactacttgatgtagtagctaagagctctcctctccttcttcttcttcctcctcttccttttttccccttcttcttcttttgtttttctgattttaaaaaaatcaattctgacttcactacctgctagctgggcaaccttgggcaggccactatccttccatgggcctcaatttcctcatctctaaaatgggaataatattattattaacttatgggggtttgtgaatattgaatgaagtaatgtttgtaaagcccttagcacagttttcagctcatagaaagaactcacttgtttggttgttgttgtttttattatattcagcaagattagcccactaagagtaaacaacgtgaaccacctttcactaagtttcaagaaaacagtctaactttggaggagggacccagtgttatatttatgagtttgacaagggagttcatttgggggtcagatatcaggcaaaagatctcagtagaaataaaatgagtttgaaaggtacctaaatttcattccctgtttagcctttcatgagatgttttaccttggccatttcatccttgctaaatctgttttccactggcgcatggtcccacattcaagattaatttgtttccacctcttctctccaggcagtttcctctgtcctggtcctctctctggcatccacaggccaagatggatcccctgccctgtgcccatggcccctgtgctctgctctgcgccactgtccagaccacattgcaagttatttttccccttttgcttcccctgggggaagtgacaatgcttatcctgtttttttgatgtaccccagcacctaagcactgcctgcccacaggaaggatgctccataaaggcttgaaggaatgaatgaaagagccaacaaatagttatttttttatttttatgtatttatcattattattattttgctgtttggaagtcatcagaactcacacagatgtctcaggtaaagtgtgggtgtcttcctcctacctggaaaccccttcttcaggtggacagccgtcttgctgatggtgccaagcccgctttcccaaaccaacagacccaaagtttccccggagccagagggcaccgggcgcacggctgagcctgcaccaatgtctgtgggccctgcctcgcccacctcctcgccctcccctctggagcgcggctggccaatgacagccttcccctggctccatgggtttccccctcccctgttgtatctaccctgccccagctcttccctgcccacccctcgctgactcgcttcgcttccccgac

SEQ ID NO: 29885 - DNA, 2300 bp, Homo sapien
taaaatgcccacattttactggtcaaaacaagacacatggctactgctgggtccaaaagggcaaggatatatagatgttgaggtgcactgttgagggcagcaggacattgctacaatctaccctgcctctgatatggacctctgagtcttcccctttgcttctatagaagtgatatgtaactaatacatgctgagggcttatgaaatgcagactgccctagatgggctatctgcaaaatctcattgggttctcacaaaaaacagttaagataggtattttggctccattttacagattaaaacaaagaaacaaactgaggtcttgaagaggttaagtaacttcccccataagatcatatacatacatggtagggtacacactaagtaattgatagtgttagttccccccacccctcccccatagttgcataatggcttatttttgaaacaactgtttctaattgttttaggctctatctgcatgtaggaagagcagtaggaacaaaactggctgactgcagatggtgcaaccagtccactggagttcctactctctaaatttctagtttttctgcagcaaaattcatgagcagggggcatttacactagaagctgcctccccctcccagacagcaaattactgatttccgtatttctcatctacttctacatatcaaatacccaccccccccaccaacacacacatacacacccatgaactccaaacctttttggcaaatctttatagtaaacagatggactatctgtgttgctgggagaccactcataaatggaatccagtccaaagggagtgagaaggaagaggacatatcactacttgatgtagtagctaagagctctcctctccttcttcttcttcctcctcttccttttttccccttcttcttcttttgtttttctgattttaaaaaaatcaattctgacttcactacctgctagctgggcaaccttgggcaggccactatccttccatgggcctcaatttcctcatctctaaaatgggaataatattattattaacttatgggggtttgtgaatattgaatgaagtaatgtttgtaaagcccttagcacagttttcagctcatagaaagaactcacttgtttggttgttgttgtttttattatattcagcaagattagcccactaagagtaaacaacgtgaaccacctttcactaagtttcaagaaaacagtctaactttggaggagggacccagtgttatatttatgagtttgacaagggagttcatttgggggtcagatatcaggcaaaagatctcagtagaaataaaatgagtttgaaaggtacctaaatttcattccctgtttagcctttcatgagatgttttaccttggccatttcatccttgctaaatctgttttccactggcgcatggtcccacattcaagattaatttgtttccacctcttctctccaggcagtttcctctgtcctggtcctctctctggcatccacaggccaagatggatcccctgccctgtgcccatggcccctgtgctctgctctgcgccactgtccagaccacattgcaagttatttttccccttttgcttcccctgggggaagtgacaatgcttatcctgtttttttgatgtaccccagcacctaagcactgcctgcccacaggaaggatgctccataaaggcttgaaggaatgaatgaaagagccaacaaatagttatttttttatttttatgtatttatcattattattattttgctgtttggaagtcatcagaactcacacagatgtctcaggtaaagtgtgggtgtcttcctcctacctggaaaccccttcttcaggtggacagccgtcttgctgatggtgccaagcccgctttcccaaaccaacagacccaaagtttccccggagccagagggcaccgggcgcacggctgagcctgcaccaatgtctgtgggccctgcctcgcccacctcctcgccctcccctctggagcgcggctggccaatgacagccttcccctggctccatgggtttccccctcccctgttgtatctaccctgccccagctcttccctgcccacccctcgctgactcgcttcgcttccccgacgcgctgggttcccggagcgcagagcccagcgttagcgggtgggctccccgaggccccctgccctcgccgggctgctccagggtgtcgctcctctggctgctcccgaaggggcttctggccctgaggacggtggtgccaagcgaacttcatttttaaaaagaactggtggatgagaagag

SEQ ID NO: 29886 - DNA, 2300 bp, Homo sapien
aacacccacatagaatagtatctggcaaggagtaaatattcaagaaatcttcactattattatgtagaagacagaacttttttccttttacttgcaatgggactcttaatattcagagccaatgagaattactcactgggctccgtgaagaaacaattaagtatggttctaccctacaggtgcattgctggaaactgctgcctctttgaccctactctgactctgccccttatcagccacctggaggaactgtggccttcagcacagagacactattctttcagtcaatccttcatttatttattctgtaaatgtttactgagtgctcacttaaatgccgggtgattctaaggctttttttccctgcttcagatgtgttcacttgcttaatttactcccctgagtaacttctctcattgaagtgcagagatttgtcaataagcaggtgaggggtggccacaggggagtggggaggaaaaggttcctatcagaatttcaaaggggccatggggcatgtacagtttgaagaattggtaagcaccccaaaagctcaggcataggcaacaagcggatcgaaagagatggaggagagagggagctggactccctgagcccagtttgcaggtgtgtagtgtaggtgaaagcactgccttgcccgttgttcatttcttccccacaccttcccactcacagctctatgaggcataagtgtagccattttacaaaggggaaaccaaggctcaggcgcaggccacatgactagtaagtgggagaccaggactagaacccaagttgcctgactcctcgttatggttttttggttggttggtttggtcccccaacctccccctatccaccaagttgttactgtgtgtataagaaaaggaagaaagggagtaagagagatgatggtggtggctatgatatggtagtgatagtgtgtgtgtgtgtgtgtgtgtgcacgcatgaaagagagagagagaaggagacagagatacaaagagacagagataggaaggaaagcgagagagagagagacagagagagggacctcaaaaaaagactttggacaactccaaattaacaacaaattaatacctataaaaaatgtggccagcctatgtgcatttcaacattcccgcaccgagtggggacccaaagtagggggcgggaaggagaggcacacagacttcctctccctgtgctgcggtatctgccttggggaaacattgtccacgatgccagtgtgagaacatgtcacctgtggcagcctctccaagaatttgatacaaatgcccccaacacacattgcctcaaggtgctatgatttcggcccttcgaagtagtcgagctgaactccttcctacagaggtttatttgaagaagaaagcagatccatgtcgcacttaagcctctgaaaccattttaattttgaggttttgcaggagacgtctttaagtaacactcctgtgacgagtgagcaaccaagttgtaatctgtcccttctacagttgccagagccttaaaagcctgtcttccagtacatcaccttaatgattatttatggacagtgtacgagtttcccaaatggggattatgcataacagctatgcatttacattaaaatgagggcaatttatttaacaaacataacaacatttacttaatctatgcaaatctattcgtaagattttataaaaccaccatttttccccatacccttaaaacacaaaattctggctttaaaaaaatctcctagtttgtttttaagcactgtgcttgcaggaggagggggctggcagagtaaaggggagatggtgcctctgttggtgatgcagcctgctcgtgcaaagcagtcctgcacttccagttgtgagccaagagccaagtgtgggagctcaccatggtggcagccacctccccaccaagcaggcagcgttcaccagaggggagtatcaggttcctgtactcagctgtgggttgtcactgtctaataatatgaccgttttgccatctctctgcaaatgaggctgaagctgctatctgattggtataacatctcactttccctctgcattgattttcttcttctcctcctttgcttcataaaaagagggacaagtggctggtgctgtggacagagaagctttatttttagtatgagacaacctctattttctttcaggagagggaagttggattatcaattcttttgtaaatgtgtatggtgatatttgctccggtaagtttacagctatcttgatttacagctggctgtggggatatgtgtgtgcatgtat

SEQ ID NO: 29887 - DNA, 2300 bp, Homo sapien
aaatgcaaatcaaaatcacaatgagataccatctcacaccagttagaatggcgattattaaaaagtcaggaaacaacaggtgctggagaggatgcggagaaataggaacacttttacactgttggtgggactgcaaattcgttcaaccattgtggaagtcagtgtggtgattcctcagggatctagaactagaaataccatctgacccagccatcccattactgggtatatacccaaaggattataaatcatgctgctataaagacacatgcacacgtatgtttatagcggcactattcacaatagcaaatacttggaaccaacctaaatgtccaacaacgatagactaggttaagaaaatgtggcacatatacaccatggaataccatgcagccataaaaaatgatgagttcatgtcctttgtagggacatggatgaaactggaaaccatcattctgagcaaactatctcaaggacaaaaaaccaaacaccgcatgttctcagtcatagatgggaattgaacaatgagaacacatggacataggaaggggaacatcacacaccggggcctgttgtggggtggggggcggggggagggatagcattaggagatatacctaatgctaaatgacaagttaatgggtgcagcacaccaacatggcacatgtatacatgtgtaacaaacctgcacattgtgcacatgtaccctaaaacttaaagtataataataataaaataaaataaattaaaaaaaaaaagaaaatccagattttgggaaacttgcccagactgccccttctgaggaagccatctctagggtctcacttgagcagtgagagtggctcggggtcatcacgtgacccacaggagctaattgcatggggtaactgactacctatggggtgaactggcactaaaactctgaccagcatgggcaatggtaattagtaagaccagtcaaactttcccctgtatcccaaatttgaattgaaaatgctaaggaaattaatgaagaggtagagggaacaaaaaaaagaaaacccataaagagaagcaggcaatgggagagtgacacacatggtcatttgatggtggagcagtgaccagtgaagcagcagtaagatggcagagaccctggagcctatcatagcctgaatagtgattatccttagcttctcttgagaattctagctcctctcacgcatcagctcatcagtgacttaggcaattgtttgacatgtctttcctgaacctgactcatttcgctgagctgatacaacctctcgtttttacagaaagtgctctaagctacaagagaaatagcctccctatcggccttcctatatttactctgtccacctctctaaaccattattcactttgaagttggggtgatctctcaaaaatgtaaatttaacttcattaacctccttgcttaaaatacacaaatggcttcctattcttttgacatacagtaaaaaatccctacagtaacctaaaagttcctgcatggcctggccactgagtctgctctttagcctcagcttgagacacacgcccccgatctctttggttcagtcacgctggctttccttcagtcccttttgatcaccacattccctcctgccccagggctcagcgcaggctattccttctgtctacaatatggatcccttatcctttcacctagttaacacctactcatcatcaagcatcacttccccagggatgcctcgctgacctccctgactgatgtcaatctcatggcatctgccttgcatagtactgttcacaggtgtgactttttgtgcaattacttgattaatatcagtcattcccactaaactccctaagaccagggtctacatctgattttgctcactgttgtttccccagcaccttgtacagtgccatgctaacagtaggcatgaaaatatttattgaatgattttatgtctaaatacaatgacactgtggaaaagttcttctagacatgcaactgtatagttgccatggagtgaatgacaatagtaacagtgggcaagtgactgttgcttaggaaggactgacacaaaacagaagatgagagaatgggtggctgtatgcacagtacccaggacaaatctctccacttggaaggagatcccaatccttctgcagccccaacatccacctgcgcacctaggaaaatgcccaaaaggtcagtggcacttggctgtcttttattgagtttcatttaagcttgcagatatatttccaaagagtttatgtcaacagctttataagccaagttattgcca

SEQ ID NO: 29888 - DNA, 2300 bp, Homo sapien
ataacatttactaccagctgaaattaaaatgttcatttccttgttacctgcatctcccacagcatattaagttatatgagttcagagattttgtgtatgttgttcactgcagtatccctggtgtctagggtggtgtctagggtggtgcctgggaaccactaggcattcaaatatttgttaaataactgaatgactcaaagaagcttgggaggtagcagttattactcctgttttacgaacgagaaaatgaaggtccaaagaggttttcgttacccgcccaaggacccataagcttggaaggggtagatctagaatgtaaatccagacacagctcaaaattgatgtctctctatactctaactctttccccacccccttcccactccttctagttctgtcatctgcttcaggactcctttgggaacctacaagttttgtcacagatgccacagcagcaagtgtttcagcctattacatacacacatacatgcagacatgcacacacagagacatgtacatagacacccatgcacaaataaaaaacagctgtctttcctagcataaaattcatctcattcatctagataattgatgaaatacaacagaattaaggcaggagtgccaataattgcatgaaaaatattgccctgttgctaaagaaaatattcatgtattcatttattcaagcacctattatttattgtgctctgaggatgccaacagatgaggaaaaacagaccagggaggagcatatgtccatttggccaaggcatattagatatgctctacttcagcgtttctcaaataagggacagaggaacatctgcacccactctcctagaatatggattcctgggtctcattccctgctgaagcggaatttctatttcacttgaattttgccataaaactatggcttgggcactatgagttgtcccactttagggatgagaaaacaagcatgggtgggttaaaatgaattggccaaggtcacatagctaagctagaaatgagaactcatgcataattcccaaatccactctcttagccccttaacattatacacttcattctagaccattttaaagctcttttccccagtactgaaacatacaagaccctcactactccaagtgcagtctggcatcatcagcgtcacctgcgggtttgttaggagtgcaaattcttggatcccagcccagatgtactgtatcgaaatctgcatcttaaaaagacctccaggaagtttgtgtgcacttgaaagcttgagaagtatgctccagattattgattaatgcaaacacagaaagcagagtaattcttgtaactcccagaacctttctagaggagtttttcttgttaagcatctagttatttgactgaacaactcaaaccgcgagagggtaacaggaataaatcctagtgtctgctgccaccttgtggtgagaagttccatcacaggcagaattcgctcttcaccacgaaataaatggggcaatgttggaagggaggggtggatcaggtcctcaatttagcaatgtactttgagagaccactgcaaaattccaagatgtaatgaaaaccacccttggggtacattttgagatgtccaaacaacaactggccttgtcatatgtgtcccacaggacacagagaacattcaccagctgtaactgagagatctaacagaagctcaacttgtgttaatcagcgtatcgttggtattcctataggtccctaccacttcagagttcaaatacgcacttctgaatgtggtggtcaattagtgtgtgggtgttttttgttgttgttgttgttgtttgattttttttttctatccaaatgccagcattgaggcaatcagatcatcatttctgtatttgccttgttcaagaatctgtgaagtgttccacaaaggtccatggaatttcacacagctctgtcaaatacatcactggtgacctctgtgaagttgtaaacagggccagtcccacaaataatgtctctaacacctggaagggaataagggaaagactctaaaaatttcctacatattttattccgaatagcccacaccttgacagtacattcagtcactggatgattttgtattgaagtctgtaagttcaagaactaaaacaatccaaaacggctactacaggtgaagttgagagcaatggcccaacctcagctgtatctaccagaaccctttaagattgcctacagaaaagttggacagtgccgaagattccagcaactcaagaagaaaaatggctcattcaaaaggaaggggatagaaa

SEQ ID NO: 29889 - DNA, 2300 bp, Homo sapien
accatcagtgccaccagattcacccactagatgcttctttttaataaacttaaaacatttgtagtaagaaaattctattagtatttatttcctgcattttaatctcttcaaggactatgttttatttgtctcagtctcttcagataataatgttggtggttaaaaaaccgaaagcattagtttgtatttttaaaatataaaattaaaacacttgatgaatatgtagcttgagcagtctgtcaaagccatgactctgagaaccaaacccaattctaaaaatgtttatctgatattatcacaatatattttaaaactggagccatctgccttccaaagtttatctccgctgcacctgcgctcaaaaatacttctgcctacacacaggaactattgtttaaagattttgctgttgattcagcatggaggctctccaggaattattcacactttaaaatttattttaaaaaataattactgcgtactataaaaaacaaaacagaaaaccccccaaattctacaaagacatgcaggaaaattatcttttcccacctctatctgtagtccctcttaccagaaataaccgctattacaagtttcttgtggatctgtccaaggatagtctctgaatacacacatgcatgtgtgatacacatgcacacacgcaaagcctcctttttccacacatatggcaacatattgtatatgcttttctacacctgttttgttttcattttacttaatgtatctaaggagagttttttggtatcagtatatctgcactattcttttggctcatactattacattatgtgaatgtttcatcatttaaccagtttcttactgatgaataggtttgcaatctttctactataaacagtaccactaagaacatccctttatgtctgtctttgtgcatgagtgcacttctataggacaaacttctagaattggaattatggggtcagaatggtagtgtgtttttaattttatttgttattgttcagtggccctacaaagaattaccagtttgcattttattagtgtataaaagtgcagttttctaacacccttgccaacagttttatcagatcttttgccaatctgatagttgaaaaatgacgttttactgtggttttaacttgccttgctcttgttacgatccagcatcattttgtccaggaaagaacactagctcaggactgccaggcagacagatttggaccccacttgttggccatcattgtcatctgtatttttttattttttatttttttctttggagacagcatctcgctttgttgccaataggcgctggagtccagtggtgagatcatggctcaatgcagccttgatctccgaggctcaagtgatcctcctacctcagcctcccaagttactgggactaacaggcacatgccaccacacccagctaatttttattttttgtagagtcagagtctcactgtgttggtcaggctggtctcaaactcctgggctcaagtgatactcccttagccaccccacccagccttaaattatatgtttatctaacaaatccattcctttttccctcacccatctcatttttttttcctagtttgccactacatcttttaaatatttcctgtctattccttttgtcagtgcttctcaacagccagagacattaacatttggagttctgtctgtctgggcaggttatttcacaaaaggttctctatgaattattggcttatttccttgattgtacctgaaaattatttccactcaacaacccagtagactgccaactctgtaacgatgtcttttcactgctattactccagcccctagaatagtacctgacacacaatagtcatgcaataactttcttttttctttagtatataaatattttttattatatacaataacataaactatgcataacataaaatttaccattttagctagccatttttaagtgtacagttcagtggcattaaatgcatttacatttcaataattttcttttgaataaacaaatgaacagtgatactggttatttgtacttgaaagttaccaagagccagatggtaacattgcccttctttcctgcagacgaagttatacggaagcgtctcctcattgatggagatggtgctggagatgatcggagaattaatctgctagtgaagagtttcattaaatggtgcaactctgggtcccaggaagaggggtatttcattttcactgttgtttccataccagtgtcctaatgtgattttaggccctatattaaggtcctgtgagtagatcaa

SEQ ID NO: 29890 - DNA, 2300 bp, Homo sapien
tggagagggaaaagttcttgcttgttagttctgggttgtaatcccaaagcctagtccaggaaggataaatatccactaaataaatgaaactggaatgaagcaaagctgaaattccacatgaagttcctgggtctttagtagcctcccacctccactactctttatcagtctggaaatttgggcctatcactgttcttcccatggccaggccctttaatgtggagaccctggtggtcttcaactcttaagaagtggcctctccacaggcatttacagttaccggtcaccatctcctgaaaaacacccaagagccctagatatccccttcccagatatcaaaggacctccttcctccctaaccagataccttgtaggttctccctccagttgccaatcatgccccttcccccaaagtgtcaccttatttccgctctcagtccatagaccatctcccttagactgtccacaaacccagcctttgcccctctaaattcatcccagctgacaaccacccttcctaacacacacacatacatcttttatcgtcctgatctaccctagacggtctcatcactatactggctcctccttacccccgtaaatctcccaggtacacttcctgatcaccctccggatacctcatccctatctattccttttataaataattccctgctcctccttctcacccacaatccactcgcagttcaaggcctcattgccatcgactccactgtctgtgagtgcttcccaatatgccccaggacccctcctggtgtcacgctctgtatcctgacaccccttgtagacgagtcccgaaattcccgccccgtccctggagctcccactccctcccagacctccacaaaccttccaggcccccagccctaagcccggcaccactgtccacccttcgcggctcctgggtcctcaccgcgcccctagacaaacccggactccctctggtcccacccgcccttgcaccgcttctagccgtctcggccacccacgtgtgttcccagcccaccgaccacgctcccggcacaccctatagccccgcgctgcctccgggagagcggacggggaaagccgagggtctccgaggggcgctcgggctctggcgagaggaggaaggactcagggaagcagccggggaggcccggggctccggggagaggtcgggaaggccgaagcgctctggcgaagaggccggggaggccgaggggttcccggaagcgggccgggaggccaggggtctcaggggaggcccagcgggccgtgcagcgggcgcgtgtggcggcgagcggggcctcaccgtcagtcacggctcccatggcgtgcgcggcggcggcggcggcggcggcggcgcaagctgaggcggcggttggcggcggcggaggtcaaactcccacaatgcagccgggtaaacagccatggaggaggaggcggcggcgcccgcggccgcctgctccgacgcctgagccgcgccgcgccgcgccgccgccgccgccgccgccgccgcgggacccgcgctccccgcgctcccggtactccccgggggcggccgcggccggcgcgagttggggcgaggcttggcggccggcggcggccccggctgcagcccgggctcccgccgccccccttgcagcccccgcccggcccacgcccagaggccgccccggaggccgcagccagccgccaggtgagctcgcccggacgccgccagggctgcgggggtgcggcgggagctgcgggccgcccgcagtcggggtcccggcttcttccccgggaaggtgactgcggccccgccgccccatccagggtgacgctgctaggggtgggctcgtttccctggggggtggggagggtgacggggacgcccggatccggctgagcccaggagaggcgggactaggggtaccgaggggggcgcgtcgctgggggtccccgcgaagttggcgcccacgcgcgctggggcgggtctcgaacgccggcacttgcgcggggcgcggccggcaatcaaaaaaggccccgggttccaggtcgcgcggttccggcccctgcggccgcccccttccttcctgggctcggcgggtgcgggaaaaagggtgaaagagaaacttggcgacctcccggaggagttcgcgaagcgaccaggagcgtgttgccatcgtcctcacccggcacccaattccaccacagagtcgggatttcgtcggtgatcgtgatggggtgcttttatttttctctttgattttcaaaaaatgtctatgtgactgtccctatcttaaggggaagtt

SEQ ID NO: 29891 - DNA, 2300 bp, Homo sapien
ttactttctttttttttttttttttttttttttttttttgagatggagtctcgctctgtcgcccaggctggagtgcagtggcgggatctgggctcactgcaagctccgcctcccgggttcacgccattctcctgcctcagcctcccaagtagctgggactacaggcgcccgccactacgcccggctaattttttgtatttttttttagtagagacggggtttcaccgttttagccgggatggtctcgatctcttgacctcgtgatcctcccgcctcggcctcccaaagtgctgggattacaggcgtgagccaccgcgcccggccgacaattactttctaaacaataactatccccaccaaaatgcaacttggtattgtgaaccccaatcaattgacaatttcagtttacaatctgtagtacttaagatttaaaacaattcttctcttagagtgccctgtctcctaaaaccaaggaaatgaacagggtctgatgatgcccacctacagccagcgtttaggtcagtattttttcaaagtcggaaacttcataccttaggggagagcaagtcacatctcagaatcttcatgtaaagtaatttttgtctttgtgacaaaagtcaagttcttgagcactaattcttgagagcactgtaatggtattattgaagtcactggtctcacataatatgactaaaattgtacatatttcttgctagaggttaaacacacttcactttaatacatttgcatctgcaacttctcctctttgaaagaactgggggaaaacagggagaatgtacctaaatttagtaaggaaagtgaaacaaccaagtttatcctacacaacttcttcatcccggatatgaagatgcaagatctacttgggggacaggaaaattggaaaacaacggtatggctgaataaaataacaaacctgggttcaaaatgagacacgatcctggtgctaatcgtatctatcccactggaggtcaaatcagctgcactggtgcctgtttcctcatccacctctcaccacctaaacgtgccatttacgagaaagctatcgaagttgaatcaaagtgacttttggaaagagatgccaatataatttgcagtgtgctccaaacaactacacacaaggcaacgtttctcattgagcacccccgcccccactttcaacttccccttaagatagggacagtcacatagacattttttgaaaatcaaagagaaaaataaaagcaccccatcacgatcaccgacgaaatcccgactctgtggtggaattgggtgccgggtgaggacgatggcaacacgctcctggtcgcttcgcgaactcctccgggaggtcgccaagtttctctttcaccctttttcccgcacccgccgagcccaggaaggaagggggcggccgcaggggccggaaccgcgcgacctggaacccggggccttttttgattgccggccgcgccccgcgcaagtgccggcgttcgagacccgccccagcgcgcgtgggcgccaacttcgcggggacccccagcgacgcgcccccctcggtacccctagtcccgcctctcctgggctcagccggatccgggcgtccccgtcaccctccccaccccccagggaaacgagcccacccctagcagcgtcaccctggatggggcggcggggccgcagtcaccttcccggggaagaagccgggaccccgactgcgggcggcccgcagctcccgccgcacccccgcagccctggcggcgtccgggcgagctcacctggcggctggctgcggcctccggggcggcctctgggcgtgggccgggcgggggctgcaaggggggcggcgggagcccgggctgcagccggggccgccgccggccgccaagcctcgccccaactcgcgccggccgcggccgcccccggggagtaccgggagcgcggggagcgcgggtcccgcggcggcggcggcggcggcggcggcgcggcgcggcgcggctcaggcgtcggagcaggcggccgcgggcgccgccgcctcctcctccatggctgtttacccggctgcattgtgggagtttgacctccgccgccgccaaccgccgcctcagcttgcgccgccgccgccgccgccgccgccgcgcacgccatgggagccgtgactgacggtgaggccccgctcgccgccacacgcgcccgctgcacggcccgctgggcctcccctgagacccctggcctcccggcccgcttccgggaacccctcggcctccccggcctcttcgccagagcgcttcggccttcccgac

SEQ ID NO: 29892 - DNA, 2300 bp, Homo sapien
tggtatcaatttaaaaccaagataatttttatattctttccaatagaatttcatgacaactcctgcagttttcttaacctacaaaaaaaaaaaaaaagtgctgcaatgatgaacaaagaattatacaaaacctacttttgtatctttattttggaatttcttgttctattataaatatggaagtatccctatttcagaagacatattttgttaaaaatgaattgtacatatttaaatatgtatttttgcacaggtctttttttctgatatcctgttttggtacaattgagatcatctagtatttatttattaattaataaaagtaaatacctttttataatttgaagtggttcactgccaagccaatagttctagaacctgcctcctttacagttttaagggatgcctctgttctgtgaaaagtctttgtcccttttagtgtctcgggagtggattcatacagatgaagtgggcattgcttcttcctggttgcctggtttcccgatagactacatgtaactaagtgacacactgcttttcttttgttagtattttatgtgtgggagtatgtgactgcgtgtgtgtgtgcctgtgcgtgtgtgtgtatactcagcacatgtatgttactatgtgatgtggtttaaaactaatggaaaaaactgaaagtgcctgaaactagttttaagcttagacagaatctctttaaaaagacttgaatgttcagttgaacttttggagtttgctttttccacctaaatattgtttctaaaattttaggggcggagttgaaaaccaccaatgctggtaattttataaggtattttaaaattaagacctcttggttcatagtaattcaattggtgatggattgcctggtggcaccaagggttacagatctttttgtcagccagcaacttacacgatgtgtccgttttgttattcactcatgaaatacaatttaaaatatttaaaatattttgtattccaaaaatataatacaaagaagtacctctgagaacattgaaaaaaatgtataatttgaaaaatgtaacttataagggcagctgtcttcctgcaagagttctgttgccaaggaatttcttaatgtcgctcattctgtccagggggtttggggcgattgggctttgaaaaaatattcttaaaagtttgtttagcagaaaataatcacttttacattttgtgcaaaacattttacattttcagataatttaaatgagcactacatactgtcagtgtgaatgtagggccttgaaagcattttgcttttttttttttttttttttttttgagcttggttataaaagcaatctcctgtgttaaaaacgtgtgaatagtttgataatttgtacacataatcaagagcatctcagctggactttgtgttggctgctgtatagaacatgaacaaatgtcaagggatagaaaattactttggatatttaaaagagaagaaatatatagtctatttgttttgtaacaagtttctgtaaataaaataatttatactatttataagaaaaggttgtgctttgctttataagaaattagcttgtggaacaaacatgttactaaacgggcaataaaattaggacttctcaataaataaggttggctgcatgaaatattgtacgtttctgcctcgttgtgatactaaaccctttcagtctactctgacttttcatcacttttggcatggaacacccttgtgaagccccttcaatttagccttcctcttatataagctaaatacttctaaggcctggggatgtttccatctgggggcacaaagctttgctttggataaattagtaactgtgtaaacagtgaacattactgtattctggccttgcatgtttgtgaaagaaacgagggagttgatggattgagaaacacattctatttgtacttaggtgcaaatttgatgacatgtagttttggtttaagataagctttttatccagacccggtctaatctcttcctttcttttacatacctcccttactggcaatacaagtgcattttagtattatttggaacacagcataatcatttacctctagaaatccagacatttttactgtttgcaaataaaccattctgataaattatttttgttgcttaaaataagaggaggaaccgctgtgtgttagcaagaatgtccatacctgatatgaaagagtcatgttggcttcagttcctactgccctgtggacttcccattccctccttacttgagtcaaccatccactcagtactttccacaaatctaataatgagg

SEQ ID NO: 29893 - DNA, 2300 bp, Homo sapien
attggcaaggttttgcaaatattaataattccagaacatcttgatcaccccaaaaggaaaccgacacccattagcagtcactccctattactcctttcccccagcccctggcaaccactgatctactttatgtctgtacgaatttgcctattctggacatatcatctaaatgcagtcataaaatacgtggctttttgtgcctggcttctttcactttataatgttcccacattcatccatgttgtagcatgtatcagtatttcattttgttttatagccaaatgatagtctgttgtatgtatatactacattttatttatccattcattagttcatagatttttgtgttgattgcactttttggctactatcaataatgctataatgaagatttgtgtacagctttttctgtggacatatggagtggaatggctgcatcttaatggcaaccctctgataaactttttgaggaactgccagttttctaaagcaggcgcccgcaccatttgacattcccatcagctgtgtgagggttccagtgttcccacatccagtacttactattttctgtctttttgattataggtatctttgtgggtgtgaaatgatatctcattgtaattttgatttgtttctaatgactagtttcattgagcatcttttcatatacttaactggccatgtgccccaattgctaaaacttagcactctgttttgtgataatttcctagtttgcctcctttgctaactagaatttctgggagcagaacttatgcttttttttttttaatcttcatgaccctgacagcaggacagcacttggtactaatgtgctctaaaataattcaattggaaaaggaagtagtatccttttctaggtagtacctgactatatttagaaatcaaaaataaattgagaaagtgaaaggttttgtatctcacctcacccccaaatccatacacacattcactcacatataaaatttttcctgagacggtgattttaatattgttttatatccttgtagaccttttatttatttatttatttatttatttgagacagagtctcactctgtcgcccaggctggagtgcagtgacatgaccttggctcattgcaagctccgcctcccgggttcatgccgttctcctgcctcagcctcctgagcagctgggattacaggcgcccgccaccatgcccggctaattttttgtatttttagtagagacagggtttcactgtgttagccaggatcgtcttgatctcctgacctcacgatccgcccgcctcagcctctcaaagtgcaggattatagacgtgagccaccgcgcccggccttttactcgtttattatatgcactttaaaaaagaaaaaacatttaaaaaccgaagttatatgtacacatggaacagttgtaaacagtatcatataaagaagaaaaaggctttctttaatatctgatcaccagtgtcctttctctagaggcaactgctgttaatcaggttttccagtgtgtccttcaggggcactgttatccagagataagagcatgtaacacttttgtgtattgtggatgtattttatatgctgttttgtaagtacctttttttctcttcacaagtaacgtgtatatcttttcatgtcactatacatatagttggtcatttagtcagtaagtgtttttgagtggctatcgtgtactaacattgagaatagcagcaaattgaacaggtagtgttcctaggagcttcaggttatcctttcttaaggacttcctagtatttcaatgtattggctatgccataatttatcctctactgatagaaaacgaggtcgtttccagttttgccctattataagcaaccctgttttgaacactccaacaatttatctttcccacttgttatttccttggggaaaaagtctaaaaaattgaactttccaaaggttaaatatattgtgtcttgaccactgttgccctccagagatatgtcagtttacatttacacaatttatacttctctcaatctatagcatttgagagaacctgtcccaccctctccatactctttgccagtctgagaggacagaaataattttattgatgttttatgcatttctcttattagtgagaatacgcaccatctcatggttagtggccattgatctccatgttgctaaatcatgtgttcccttgcttatctttatctgccttgatgttgaccatcctttgcttctcaccacagctttctcttggttctgcagtaacgtgctcttgttttctctggacctacctc

SEQ ID NO: 29894 - DNA, 2300 bp, Homo sapien
aataacccaaatcaaccagcacttaaggactgatgaagaaaaagttggtatagaaatataatgggccgggtgtggtggctcacacctgtaatcccagcattttgggaggctgaggtgggcggatctcctgaggtcaggaattcgagaccagcctggccaatatggtgaaaccccgtctctactaaaaatacaaaaattagccaggcttggtggcacgtgcctgtaatcctagctactcaggaggccaaggcaggagaatcgcttgaacccgggagatggaggttgcagtgagccaagatcaccccactgtactccagcctgagatccgtctcaaacagagtgagatccgtctcaaaaataacaaacaaacagaaataaatataatggaatcctatatggtcaatccattgtcatccaagatatccacaatacatggtagaatgaataaaacacagtttaaaatgtgcgagtatagaatgatcatgttaatatacccagatgagttttaaagaagctatgcttctctggaatgtaagttccaaagacagggctttgtgctcttcactgctgagtccttgaggcctaagacagtgcctggtactttgtaaccatgcaatcatgtttgttgaatgactaaatgaaagaattttagaaagttttttaccaaaagtttagcagtggtggagagctatttaatagtattttttttttactcttcatattttctctatcatttgagttgtcttcaaaatgcttgtttcatttttatagaaacaaataatagatttaaattatgtgatgatgcctactgcctgtgagatgtggcagtctcacctgtttcagcagctgtgtaaactggttcagctcttttggaaaaccatttaacattaaatatccccaagtcacaaaatccttcttccctttgtccgttattccttcatgggattttatgctaaggaaaaagatgcaaaacatgaagtgatctagacatccaaagtcttcatccaagtttttatattaggtaagtaaaaactctggtcaacctaaagacacctctaacagagggaagagtgaaagtaaattatggtaaatccattagatggaatttaggccaggcatggtggcccacacctgtaatcccagcactttggacgactgaggcgggggaatcacttgaggtcagaaggtcaagaccagcctggccaacatggtgaaaccccgtctctactaaaaatacaaaaattagcccggcatggtggtgcaggcctgtaatcccagctacttgggaggctgaggcaggagaatcgattgaagctgggaggcagaggttgcagtgagccaagattgtgccactgcactccagcctgggtgacagggcaagactccgtttcaaaaaaaaaaggaatttaatgtaaagattaccacctctgaagatctgtagcaatgtgaacaaaaggaagctgaaaatgcaggcatgtaatgatttaatttatgtgtaaacaaaacgatgatgctgttgtactatgacgtagaatcctgggtgcagtttttttttcttcttaaaaccgcagaaagaatgtggattttagagttctagataggggttttcatttaggccttgcgacatggctgttacatgaccttggttggtctgtttccctaacctctttgtgcctcatttgtcttacctactaaataggctaatagtactacctcgcagcatgaagatgattttaataagatgaatgagagtaacgactcgacaaactatggtgattgtttttattaatgctgttattacattttcagttttcaaaaaattttaagctcccatcagttacaaacggaaagtaaaatagctaaaaagggagtgagaaagagattcaagaaattgggcttttgagttgggctgcacccactctgggactccgcagggggccttgagggtggaaaagcccccgtgaccacacaggggcgcaggcgcccaggccgggtgaggcgttcccggaggtgtccagcagaggacgctgccggcggagacgggaccggaagccgggccgcaggcggccgggcgtattcgccgactcctcccgcttccgctgccgcagccggtcgtaaccaagttgtgtcctgtcagccgctgtccccttcgccgcgatgccgctggagaacctggaggaggagggtctgcccaagaaccccgacttgcgtatcgcgcagctgcgcttcctgctcagcctgcccgagcaccgcggagacgctgccgtgcgcgacgagctgatggcggccgtccgcgataa

SEQ ID NO: 29895 - DNA, 2300 bp, Homo sapien
ctccgcctgctgggttcaagcaattctcctgcctcagcctcccgagtaactgggactacaggtgtgcgccaccatgccctgctaatgaggtttcaccatgctggccaggctggtctcaaattcctgacctcgtgatctgcctgcctcagcctcttaaaatgctgggattacaggtgtgagccacctctcctggccctgctattctatcttttattataggtgcctcagctatgaacctcgcaatgggtgaagaaaggatactactttttctcccctgcaggttctctgttcaatattagtggcaatgtaaattgatatatatatcatttgtggaaaataattcataaaatacttacagaatacatcaaaatataaaatattaatgccctcttattcagcaattgcacgtctagagatttagattgagaaataactatttaagtgtgaaaatatatatgtacacggataagtgacactgtaatattaataagattgaaaaaaacaaaaataacccaaatcaaccagcacttaaggactgatgaagaaaaagttggtatagaaatataatgggccgggtgtggtggctcacacctgtaatcccagcattttgggaggctgaggtgggcggatctcctgaggtcaggaattcgagaccagcctggccaatatggtgaaaccccgtctctactaaaaatacaaaaattagccaggcttggtggcacgtgcctgtaatcctagctactcaggaggccaaggcaggagaatcgcttgaacccgggagatggaggttgcagtgagccaagatcaccccactgtactccagcctgagatccgtctcaaacagagtgagatccgtctcaaaaataacaaacaaacagaaataaatataatggaatcctatatggtcaatccattgtcatccaagatatccacaatacatggtagaatgaataaaacacagtttaaaatgtgcgagtatagaatgatcatgttaatatacccagatgagttttaaagaagctatgcttctctggaatgtaagttccaaagacagggctttgtgctcttcactgctgagtccttgaggcctaagacagtgcctggtactttgtaaccatgcaatcatgtttgttgaatgactaaatgaaagaattttagaaagttttttaccaaaagtttagcagtggtggagagctatttaatagtattttttttttactcttcatattttctctatcatttgagttgtcttcaaaatgcttgtttcatttttatagaaacaaataatagatttaaattatgtgatgatgcctactgcctgtgagatgtggcagtctcacctgtttcagcagctgtgtaaactggttcagctcttttggaaaaccatttaacattaaatatccccaagtcacaaaatccttcttccctttgtccgttattccttcatgggattttatgctaaggaaaaagatgcaaaacatgaagtgatctagacatccaaagtcttcatccaagtttttatattaggtaagtaaaaactctggtcaacctaaagacacctctaacagagggaagagtgaaagtaaattatggtaaatccattagatggaatttaggccaggcatggtggcccacacctgtaatcccagcactttggacgactgaggcgggggaatcacttgaggtcagaaggtcaagaccagcctggccaacatggtgaaaccccgtctctactaaaaatacaaaaattagcccggcatggtggtgcaggcctgtaatcccagctacttgggaggctgaggcaggagaatcgattgaagctgggaggcagaggttgcagtgagccaagattgtgccactgcactccagcctgggtgacagggcaagactccgtttcaaaaaaaaaaggaatttaatgtaaagattaccacctctgaagatctgtagcaatgtgaacaaaaggaagctgaaaatgcaggcatgtaatgatttaatttatgtgtaaacaaaacgatgatgctgttgtactatgacgtagaatcctgggtgcagtttttttttcttcttaaaaccgcagaaagaatgtggattttagagttctagataggggttttcatttaggccttgcgacatggctgttacatgaccttggttggtctgtttccctaacctctttgtgcctcatttgtcttacctactaaataggctaatagtactacctcgcagcatgaagatgattttaataagatgaatgagagtaacgactcgacaaactatggtgattgtttttattaatgctg

SEQ ID NO: 29896 - DNA, 2300 bp, Homo sapien
gcctcagcttcatgagtagctgggattacaggtgcctgccaccatgcctggctaatttttgtattttcagtagagatggggtttcaccatgttggccaggctggtctcgaactcctgacctcaggtgattcaccccccttggcctcccaaagtgctgggatcacaggcatgagccaccacgccaggctgaaacttgttatttttatgccaatgtggaaatgttgacataaaaccttctccagggctgagaccttaaaatctttctcattcgagtgtgatgatgacttaggttaacatatctgataaccgatgttaataacttctcaccacccacaggcatgaaaggcagagctgtgggaagaaggcttggggactcctgaatggcccagggcaaggatggcacaagctccttaacctgacttcactggtgcctttgtaactgctggataatattttgaatattaatttatgtgtttttttttctccccactctgtcctattttgccccttctttagtcaagtaaggctctcaggggaggtttatgccaaagatgaaggtagaagtggcctgagaaatttcttttctcaggagatttcctaagtactgagaataagaagagggtgagaagaggtagagtggcagaaagagcagggaaaagagactagataaaaggatttgcccatgctaggggcagaagaggagaaagtgctatggaactctggacgccactgaactgcagaatggagaaggaaggacaaagggtctcaggcagatgggccttgacaacctcccagaagattctatgttttctttttctttctttcttttttttttttgagacagagtctcactccatcacccagggtggagtgcagtggctcgatctcagctcactgcaacctctgcctcctgggttcaagtgattctcctgcctcacccccctgagtagctagaattacaggcacgcaccaccatgcctagctaatttttgtatttttagtagagatggagtttcaccatgttggccagggtggtcttgaactcctgacctcaagtgatctgcccacctcagtctcccaaagtgctggaattacaggcatgagccaccacatctggctaagattccatgttttctaagcatagtacccctcatctaaccttggctcggccctaaagaccacagaactgtggtgcagctctggttcaaaaaacagtgataataactgacattaatcattttgccggaagaacgggaggctagaagtagaaattacgttgatttaaggcagggtttcacaaccttggcaccatggacattttggataattctttgtttggtgggctggcctgtgcactgtaggatgtttagcggcatccctggcctctgctcactagatgctagtagcatccccttcccagcgtgacaaccaaaaatgtctccagacgttgacagatgtcccgtggagggtaaaattgcacttgactgagaaccactgattaaagggaacataaagaaaggttgtgtgtcttgagtttatggacacagattcttaccagctgtatgtactgatatcgattttattatgtgctaagggagaccaccaagacattgtgtttgtgccagatttgcctccctgacaatgttttgcttgggctaattggtaaatattagctttcattctctgagcaacttgtcaacaaagggatggcatccagaaatggagggacatgcgtcttaattatacctgcagtggttaatgggccagtgaggcattccgggtactctaaacccttgctgacttctcccaagctggggcctgtcagctctatcactgtgccaggctgcaacgagtgccagttctggaaaatctggctgcccttcagggccttttaatttgacactaataagcctgatttaggctttgtattatggagcagcaaccaaatattattgccagaaagggcaaatagctgatgtcagcggtcttttctaggcaagaaatgaacgtgatattttctccgcctcctctcttctgactgagaagatgattcctggagataatccacttggttatccgtggatgtgaacataatttggaggcagcagtcactccagatggcccgctgaagctgggagtcctgagttaatttcaagccaaatttctcactccctggaggagcagagtggagggtgtgtgtgcatggagaagtccaagatttcatatctggaaaagaagactgggagaggccagcatgaatggccactgtcctcgccaaatctggatggtatgtcttaggt

SEQ ID NO: 29897 - DNA, 2300 bp, Homo sapien
cggcttgaaagtggggttttgctggagacccacccttatctgcctagacatttgtctgcctcctgcccctatcgcaaataaacaaacaaaaacacatcccctagtccctgatgcttcaagagaacttaacaagcttattagtttgaataaagaaacttgagccagtgacttccattccaattctggaggatctggagtgggttcactttttttcaggagtggcagtcatcaaaaaaggaacaaacttcaattggctttaatttttatgatagaagtataccactgctgcactgaagaagagagtgagcttattgtaaaacacagtctaacaattatgtttggattggagaattgctacttgggctcatagccaatggttttcacacatcaaaattaactgggtagattatgtacaattcaggatccccagccccatccctagagagtctgattcagcagggccctgggtcatcacatttttcataaacatttggagatctagggccacccctctcaccatgggaaagtctttattttctgtgagtccttgtatgctaagggctcagtcctgtttgtgttatagagctttggggttgaagggtctgcttcccaaatactcatctgccctatgtgtaaagtagatactggttttacttttagcttagaatgagaaacaccagcccctttggaaaacccatcccagcctaaattctaaatatagccaattttgacggagacagacatccagtcatgaacctaaaaaggaaagctcattagtagatgcaatagataaataaaggcaaacacagcctgaagtttagggggaaatggttaagctattaaatgacacaattatacccagcaggagataagatgatttaagagctttctcagcaaaatactagcagatacttgttgcctctgcttggctggctgattctgaagataaaacagatcatcagggctgatggatggccttgtgtccttaacacacaagaagttcacaaacagatgggtctagaaatactagaaagtaaactgaataacctaaagaatttgggccataaagggcaatttttttaggctaggttctttggattttaagtaatcaaaacttacttcgcactaacttgggccacaaaaataataataataataataatgtttgtttcaaagataccgcgtatcttgcaagaagctaggggaaacagtttcttgagggcctggagcccaaaatagaaaagccaccaagagatcagaaagtttctaccctaagttttaaagctcagcttctcttccatagtctgcttaatcttttccctttattactttgctttttcagctttggggaactcatggacatatgtggttctctgcagctcccaagttgccatcttcttcatttaatatcttattctcaaaaaatactctgattggcccagttggggtcaggtactcattcctggtctgatcgaccaatgttggaacaggggtgaagtgctaggtgctagcatgctggcagagtgctagttctatttttttttgttgtttgtttttgtttgttttttgagacagagttttgctcttgttgcccaggctggagtgcaatggcgcgatctcagctcactgcaatctctgcctcccgggttcaagtgattctcctgcctcagcctccccagtagctgggattacaggcatgcgccaccacgcccagctaattttgtatttttagtagagatggggtttctctatgttggtcaggctggtctcgaactcccgacctcaggtgatccgcccgcctcggcctcccaaagtgctaggattacaggcgtgagccaccatgcctggccagagtgctagctcttatgggtgagggaacagttttttggatgcagaaattcatgggctgggcagacatccccaaatgtatctctttaggaactatcctagtaataacccaagagtaagaactgagattatctattggctatatttctaaacagtcatctgcactctgcttagcaagttgaagctacagtctcatgagaaaatttctacaaccctgtgagccctagggttccaactggtccattctcagccaagtactgcattcaaagaaatacaaacacaaccagaaagtattataagtctatattcagcatttcaaatctgtcctgtctatcaaggaaacaccgaaggaggaggtaaattcttaatgcatagcagacatttaaaaattctctctcaccattgctgcccagtcactaccctgcatgtgaatgccagcttgtctcttgagt

SEQ ID NO: 29898 - DNA, 2300 bp, Homo sapien
gctcccagaggggcagtagctttggcaataccgtgtctaggtttttctttaccgaaagcagatttttccttaacaagagttgaaatccacatttttatttcccactaagtctgttgagactgctttaacggaatagcacagactgggtggcctctgagtaacagaaatgtattgctgacagttctgaaagctgggaagttcaaactcaaggcaccagcaaatgcagtgtctgctgagggcctgttttttgtttcctggatgatactttctggcagagtcatcatatagtggaaggagcaaacaggctcccttgggcctctgttataagggcactaatctcattcatgaggtatccactctcatgacctagtcacctcccaaaaagctccatctcctaatgccatcactttaggatttaggtgttaaacttaggagttctgaagaaaacattcaccatagcatccactgagttgctgctgtgacttacccattggaatagcatatgctagtaatgggattcactcgatctatctacacacaaagagccctgtcatacaccaggccatgttccaggtcctggagatgctgtagaaactcaatgagtctgtcctcatagagcttcacttttagcgggggagagaaataataaacagatgcatgtatatactgttgtaatgtaaagcggtattaatgctatcaagaaaactccagcaggtaagggtggagagtaatggagaatcactatttagtgtggataggaagacttctcagaggagttggcttttgagcagatgcctaactagagtgaaggagatagtgtcaatgtcatggttgagaataagacttcctgggtacagatctcgtctctggttcctagttatgttaccctgccaagttacttagcctcatctgcctctactttctcatgtgaaaactgcaaataatattagaaagctagctcaaggagctgagtgattaaatgagtttacatatataaagctcttaaagcagtacatgatcatacgttaatattactattgctatttgtcagggggaaatgtgtcccaggcagaaggattcatagacaagccattttaacctagagtctttgtgcttggagcaaatgagttaaggcgcatactggtacaacaaggacttctcgtaataggacgtgaataccatttacataagggtctgattgttgatttattgacagtttatcctgccgcacctggaatcctgagacaaaccaaggtgctatgtgtttcacgtcccagtgcagagctctgagcagctcatcagcctctccaatgtctctcatttttttaggtatcgaccaaggtcaaatgacctatgatggccaacactggcatgccactgagacctgtttctgctgtgctcactgcaagaaatccctcctggggcggccattcctcccgaagcagggccagatattctgctcacgggcctgcagtgctggggaagaccccaatggttctgactcctctgattccgccttccagaacgccagggccaaggagtcccggcgcagtgccaaaattggcaagaacaagggcaagacggaggagcccatgctgaaccagcacagccagctgcaagtgagttctaaccggctgtcagccgacgtagaccccctgtcactgcagatggacatgctcagcctgtccagccagacacccagcctcaaccgggaccccatctggaggagccgggaagagccctaccattatgggaacaagatggagcagaaccagacccagagccctctgcagctcctcagccagtgcaacatcagaacttcctacagtccaggagggcaaggggctggggcccagcccgaaatgtggggcaagcacttcagcaaccccaaaaggagctcgtcactggccatgacaggacatgctggcagcttcatcaaggaatgccgagaagactattacccggggaggctgagatctcaggagagctacagtgatatgtctagtcagagtttcagtgagacccgaggcagcatccaagtccccaaatatgaggaggaagaggaagaggaagggggcttgtccactcagcagtgtcggacccgtcatcccatcagttccctgaaatacacagaggacatgacgcccacagagcagacccctcggggctccatggaatccctggccctgtctaatgcaacaggtaggttctgttcaccttgaaaacagatagaaagggggtagtctctgggtgactggatgctggtccccaggaattttttttttttttgaaatggagtc

SEQ ID NO: 29899 - DNA, 2300 bp, Homo sapien
tgccatagcaataacaactaccaccactgtttactgagtgccaactacgtgttaggcactgtccttgggagcttagagattatgaaatgagccagtctgtggaactcattttcttgtgccatccatctggatgttgatgagtttctaccccaaatctccttttcattgtgcatgattaatactgagcagttctttctgacaaaagcttggcaaaagacttagctactccctgaggcaattgatgaaaccttaggaagcctccaccattggcatgggaggaagcttgccttcctgtttgctaaagagtaacttcattcattcatttattccatcactttatcgaggtatcaacatataataaatcacatgcaagtatacaatttggtaagttccaacatatgtatgtacccatgaaagcatcaacataatcaagatagcaaatgtacctatcacccccagaactcttgtcaatccttttgtcgttcctccctctcatttccccatccccaagtaaccattgatctgctttctgtcactacagattagtttgcattttctagagttttatataaatgaaatcacatagtgtgtactattttgcctggcttctttcatttggaataatgattctcagactctgattcactttgcatagatcaacagttcattcacttttattgtgaagtagtagtatactatatagatataatacaatatgtttatccatgtacctgtggatagacttttgagttatttccaatttttgactatggaaaagaaaactaagagcagccactttaaaaaccccaaatgtttaaaacattgtttcatttaattttcacaactatgctgtagttaagtactgacatccttgtttttcagaagatgagatgaaagtttggggaggtgaattaacttggccaatgttggaaagcagcacagctaaaatttgaacacagagctagttatcatcgaagcttagactctcaaacacttatgagcccagaaggatagttactcaaaagacagaagttatcggaggccagcacaaagcctgatgtctgcatgggtcttccatgagacactttctacatctacctttgtatggctccaggccacctaaagcaacatataaagactggtgttggaaagctccagtttttgattggacctggaaaactgccatattgaaatcacacctatactaacagcttgcacatatgggtacttaataaacaactgttgaacgaataaatggctgaatgcacaaataaatgcataaaggaaggcacaggcagataaatagattgaggaaggaagttagttacttgctgatttggtggtggattaatccaatcatcccatgaaattactcaaaatatctcctgcgtcataaggcagaggagatcatcttgatactacattaactctcacaccaggctacagtgtagactgcccagtcagcagaaagggtgtgcagctgtgaatttatgcaggaagtctaagtaagaggccaagtcccaaactttaggaccccagagtgaatttactgtaaaggttggagatacctgtcttgaaagctagaactccaatggcaggtctctcatcctgcatttgcaaatgagccttggcctttctaggcctcataatctgcacgcaagccttgacaagtccctgctggtggaatctggccgtgttgctgctgacttcatctggcagaggccctgaagcctgggaacccaggttctagtcccaactctgacagctccgttgaaaacaagtttattaacaggcagttttagtgaaagctgcacacacaggcatatttcccattgccatctgatgacatcagtgtatttctggagccaagataaatacagcattgttcatgtgactagcttcccaagaagagtgaggtggactgctctgaagcctcctcctgccctgcccccttcttccctcccttcccaactcatctctcaaactgcattgaaaacaccgaggtgagtgacagtgaaggctaactaggagatgcagcttagggggaatttaatccaattcagttggagagacatgcatctccctgtaccatgaaattccattttgatctcagcatgtgctgatggagtaatgaaataaagacaacactctgcaaatggctggtgagtctaatgatggtttttatgggggttttagaagggctattagattgtgcattcctttcctataagccaaaaccacccagcagaccttgggagatgaaccattttatcattcttctctcccttcccccagcatct

SEQ ID NO: 29900 - DNA, 2300 bp, Homo sapien
tgtcacatctgttccaggtgaagagtaatctcttgctatgtttcagctgtcttctttatttcattgttgatcacctgtgaattgcctcttatatgaccatgctgatcatgagtagatgagagagtagtgtacccatttttaagaaactgaggcatggaaagttgaagtgacttgttcgtggccacactgggttagaatgtcactgcttccacttggctactgggggccccaaactgttagacttgctaattgactttttgaaggatattgaggtctggggagaccatctgcctccctacacgctctgagttctgtgtgatggaaactgaaggctgagtgttattcatttgcttgtattttatttctcttactgagaagttattccaggtctcatgattttcaccatgaaaggtcttctgggaactagagagaagcattctgaaagaagttattaagcattattaatacaattacatacaacaaaagacataatttaacttccccacatccaacaaagaaattcatttgaagcttcaggaactgcagctggaagggcagagctcatcagagtgggttccccaggcgggggagtgtgggcaaggagccgtgctagctgctttgtcctttgggacacttctgtgcatgatggaatattcctccctcccagcctccccaacctttccctcaccctttactttcactcacagtgcttccttatcacaggcacagagtccagaatattgcctggctcttgcctctctcctggcccgggatactgcacaggcagcattgaaggaatatatgattttaaacaattaaagatgaccatggaaatactcagatgctaggaacagtgatcagcctagtagatagtatgcctcggtgaatttttctaacttcattcaaaatatcagaaatagctattgagtatgtgatattgtgttaatcttcaccatagttctattcaatattttactttctttaattgcagtagcccataaggcccttgaaagcagagactgtgtttatacctagcctttagagctgtgcatggcatagagtacgtgcttagtaaatatttattgaatgagtgaatggtacagatgaggttattgaagatcccacaagttaagttacttgcctaagatcacactgctagcaggaaggaaaggcaggatttgaacacagggctctccaaatgtatagattcctttcttccagattgcttggttaggccgcctagtggtgtataaaaatggagctcggagaccccaaaggtattcaacaaaagctctatctgaggtctaggaaatgtggattctgacccatccttgctgaaatcctggtgtgactttagaaaagtcctttctccagttgtctccattttctaatctgtaaaatgaggagatggaagcaatgctctctgagggtctcagggtcttcagatgccctgggaaggtttatgctttgtcttcttctgcatgcagttggaattggggtaaggggttaaagggcagctgactgactcaccacccaagcacgtgaggaaaggagtcacttgtgctttatttcgaggtgcacaaaaactcaaaggtgacatagtctcaggccaaaaaacaagcaacacccgaaaatgaaagttgaagagagaagagaaagaaaaaaaaaaaggagaggcatttttgaaggcttgacacagcatttaattaaaaaaagagtgctctgattccactcctaggttggtgcagcatataatctgaaacaggcgctcaggttgataattgtgcccagatctgaaccttggcacctaagagcacagcttttaagaagaaaaaaaataggcatgtgtctttaaagcctctcttcttatatgtgatttttttcatgctcatttggaggttacgtagctgggcctttgcatccagcaaaggcttccttcccctctccctggcttggggattattgatttggaaggcaaggctaatttacatgtaaataaatctcagcactgggcagcaggatgggacgtccagatgccgtgactgacttgctgacatcacagcttcattagcatgcggaggatgcaagcactgcaacagcgacttctcaggcaccaccagcagcgccaccgagagttattattattttttgaccaagcagcacatttcctggttcagtggcttgagctctgtgagcagctgactagtcaccccgggtctggctcaggatcagctggtgacgctgggctggagtctatgacttcttccttcagattgtcatgaagaaggggagttaagagg

SEQ ID NO: 29901 - DNA, 2300 bp, Homo sapien
ctcacgtcagcctcacaacagtgctatgagaaaagcatgattttgagacctgactcctttttcaaacggggagattgatggctgaaggggattattttacccagtgtcacatcgataggaagtagctgagtccagacctgcacagcacagccctttctcttaaccacagtgttctctcttccctgatcagcatcacattttcattgtaaataactagaaactagggacggggaaaagaaatttaaaaatatacctgtagatttctcataattctactacctaccacctacccactcataattctaaccactggtaaatttttggtttctaaagtctgcgtgggtgtgtatatttatatgtgtatatacatgcatatctgcttatgtaaaatatctaattcatttacctctgtataaacatgttattataactggccactttttaaataaatagcaaatagtaactcctaagataaatatgtatccacattgctgtttcaataacagcctaatactctatgcatgatttactgtgatttatttcaccacatcccttgtactggacactcactctttctttcctccaagatgacaggaataagcatcctgtggtacccttgtttactatttgaaacaactgcaatgggtggctttttacatgtgacttttttgaacttgtcttgttacttctgtaggctaattcctagcatagtatcgaccacttaccacaaaaaagatttcagaataattacgtggccacagacaatcataccttagaagaatacagttgtgattagcatttaacctggctctctgcttccaggattagtaaatgctggttggctggctgcttctaaggagccatcagggtagaaaaagtctgaagcgtggtgttatgtgacatggtgggttcaacaatagaaatatactcaatatgtgggacagagagaagttgcaactacttaagtccatgtaagcatcaggtgctcctatggagttagccaggtgaagaggtgataagcagtttatgcttattatgaggtgtcctaagcacaaagtggccaaagatggggctagagaatgtcagagcaatagctgaacagagaaggcccgcctgatgtatattattgagagtaataagacctacctctggatttgataccacaggtgatgaggggatctggacaggctctgagtgaaggatgatttgtattttagaagatcccttctgaccagaggatggaggatggttggatgggagaaaatgttggggacagagacacgttggaaggagggtgcagttgtccaggtgtgagatgatggaggtctaaacacatgcagtggtcaaatagatagaatggaagggctggatggaaggatgtttaaatttggagtttcaacctagatatggagccaagcttacaggagtacacctctaaaactccatctaaaattatgcatatatacaagatattattccaagtttttacaatggtaagacttggatgctgggcataaacaacctataggattgtacctgtttgttacagccagaataagattttcaaaaggatctgcatacatgagtgatctttctggaatgataacagtcctttaaaactgaattacggtgatggctgcacaactcagtcaacgtactaaaatcaccaatttatgcgcttaaaatgggtgaattttgcatgtccccatagtccgaagattaaaagccactaaattacatgtgttgaataaaggtatgatggttaatgtgtcagctcagctaagctatggtatcccgtggttttagttgtcaaagactggtctaggtgtagctgtgaaggaattttttagatatgattgacatttacagtcagttcactttaagtaatgcctattaccttctataatgtgggtgtgcctcatccaatcagttggaggctttaagaggaaagactgaggttccttgagaaagaaggaattgcctccacactacaacctggaatccctgcctgagtttccaggatgctggcctgccctacagatttcagacttgccagccctgacatgagccaattccttaaaatcagtctttctctctctctctctctctgtgtgtgtatgttaacataatatatataaaatataatatatattttatgaatttttatatattatacatatataatatttatatatcatattggttctgtttccctggagaacagtaactgatacataaagtggattgaaatattttggttgtttcgttaaggtcctcaaaactataggaaacatattcca

SEQ ID NO: 29902 - DNA, 2300 bp, Homo sapien
ataataactgagtatagctttttctaatacagatcacctgaggagatgaatgggatattgggggaggaaaatatttcgcttaattagtgttctctattatcaaaatagattgtaaatgtttatctgttaatgctgacgtgaaatgagatattatgtatttcaatctttctaaatgcctttctacatgcattgatattgccaaacactgatatctgtccataaccatataatgttaattaagcatattcatggcttggcaggcaagtaaagaattctatcagagttttctcttgatagttgccttttagcatgtcactacattgcatattaatcacttgcaattgaaaatgagattgaagctcctcaattgctagttaaatggattttgacataaaaagatttcctttgcatttatatcaaagtctgaaaaacagtgctggaactgcagtttaagctcagaaaatatatccactttaaatttgtgtgtaatagagaagacatttcctgttttaacttttgacagcatgggaagtgtataaaacaatctaacgttacttgtgatccaaacagtattatcagtgaaattactttatcactgtataagttttgcctataagaacagttttgccttgtaattttaggtacaatccattgagaaacatgatcaactctgaagcaaaagctaatattcagagccattaagtgttgaattacagtgattgagagcagttgtagttcaaaaaactttaatcttgaccctgagctcaaaaatcaaaataaaactttaccccactgctaagccatcaaattgctgtgtagtaggacaagtcaaggtattgagctttcagttctgacaaaaaaattcacaaaatggatgatgggtaagtccgtggtagaaaataaagtccactattgatactactagttctatagcacttgataggtcaaatattttccacaaagtacctgcaaatgaataatacagtgaataaccataggctttaaacatctaacagtttcgcaagctttgtaaatttgtccagttaaagctttttatgctccacacatatttttactatcatcagttgtcaacacgtcttagcagattccacttcagttgttctgcagttctttcccaacctttttgaaatattctcacctgtacttgttccataaactattccactattccacaaattgttccactattccactagttccactagactcttcatagagtctaattctttagtcacttcagactgggcattttctcctcaaagaaatgataacacctgaataacatcagtaatatgtgtggacccattaagagccagtgaaaaccactcaaaataatctgctttgtttttttaattgactgtttatgtggttcccaatgctattagcttttcaagcaatagtccttgccaaaagagtagttaagtttattttctctggacacatttcttcagatgttgctgttaaacaggatttaatgaactcaccattggtaaattgttttccttgcttggctaacaaatgagcaacttggaaacttactcattttcatgttttttaattttatattttaaattttctaaatttttgaccattgtttttctgtgagttgggaatattgtgatgagtatttagtttggtgatgatatatattgtattcttttagcacagctatagtgtcatttcataataatcacaatcctttgtcatctaaatttgataacaaaataatccacatgccattgtaccttaaaagtgcaacattcaaagtctacctttctcttcttttcttgatttgtcataatggtatacactggtaataagcacataaattgtaatgatctagcaatacacacatcactcaaaacactctcaaattaaaacaatgtcactgtgatttgttgtgcaccgagaagcagtatgaagctgagactcagttctttttttgcagcatgaaagcagctatagacatcaggtaaattaatgaatgtggctgtattccaataaaactttattaatagacactgaaatttgaatttcatatgattttatgtgtcaagaaatgtaatttttggtttactttttctcaattatttaaaaatataaaaatcatccttagcttgcaagccatacagaaacaggtggtgggctggatttggctcacaggctgaagtttgccagcccctgctttagaccatggtgagtatgttgggcttcacatcagttcagaaggcctgtttactgtgtgtataagaacgttttcccaaaaagccagtgcaggc

SEQ ID NO: 29903 - DNA, 2300 bp, Homo sapien
gaatctcactctgttgcccaggctggagtgcagtggcacaatctgggctcactgcaacctacacttcctgccttcaagctattctcctgcctcagtctcccgagcatctgggattacaggcacacaccaccatgcccagctaatttttgtattcttagaagagatggggtttcaccacgttgggccaggctggtcttgaactctcagcctcaggtgatccacctgcctcagcctcccaaagtactaggattacaggtgtgagccaccacactcagcccaaaaatattttttaaatattacctactgtctgccaggtaatgcgtgacgtgcattgtgccttctgtctaatcacctcctattcacaggttaagtcttactaatccattttacagatgatctccttgcctgaggtcatgctgaaagtaaagaagggagcaagattctagggtaaatctaccctttgtaccaggttttcaatcagcctcagcacttttcgggctggagaattctctattgtgggctgtcctgtgcatcgcagcagcatccttggtctctacccgccagatgccaacagcagcaccattccctgcccccccacagttgtgacaaacaaaaatgtttccagacattgccagatttcccctggggtcaaaatcgtgccctgttgagaaccactgatttagtccaaactaagtcctctggtcacctctatcttgtggaatctagcactccagaagtgtttataaacttttgttagtcaatatttatggaactggcattgagagacctctaagctacacttagtcctggaaatcttaattgaggagctgggatataatatttaagtggctagtcgtatgttacaaaccatagctgattcaataaacaaagcaatagtaaggccctgctctcaataagcttactgttacattgaagagatcacacgaacacttacaaaacaattagaaaatgtaagacagataccatctttttgcatatctactaagcgccagccatagctgatttcttttagtcctctgtacggtgctcagagggaagagagttttagtgctttccattttacagatgaataaactgaggttccaagaggtgagaaaagatctggccaggatccaatcacaggtgaaagaatttttcttacacgcgggtctgatcagctgtgagctcctccttgcctctcttcttgtttataaaagactgttttgacaaagtgctggtttgtcagtttcagagagaaagcaatcaggagtgttcatgtggaatatttttagctctgaaactgctcattgtggagtaggaagcctcaagaagaaagtatttcagatgcctttgcgagtcatttttgaaagagagagtgagagagacaattggagaaagcagcgagagggtctttctgctgcaccgtctctttagaaatcaatattgaggcaccagaggccatgttctgaaaggcaccctcggaggggaggggtttgggagatctcccttaccggagcctgaaagccgcatcctccaggcccaggtggtcttgagcaggccaaccctgccctctgctgaccgtcctggggaaagcgcctcttctttgaagtcccgccctgctgtgcttagtacgcggtgtgctaatcgccccagggagctggaagcccaggaagcttggcaccaagatcttgttagaaaaattacactgtgacattttgttcctgaaggaatctgataattgtgagcaacatcaggactgctgtgttagggaggccgaatggagcaaggactttgaagtcaggaggatgtgagttggactcctaccgtatcctggagaagttaatcacttccgctaagcctcagtttccctatctgtaaagaaaacctccttcgtagagctctttcgaggatgactaacatgatgcatgaagaatggctggccctgaacaaacaaaactaaatactatcaataattagtagctatcacaattaatcaacatccttctcttttccaaagtaccttttattgtatcacctttgcctttgcttttttgaggacatcacatggactgaaaatctcttttgttggtcgtgttttccagggtcgttttagcatcaacctttatggaaccggcttgtctttaactgaatctgccagatggatatcacaagggaattatgctgtctctgacatcaagaagtcgccggtaaggttctacagatgggttgggagatgaatttttatttctttctttcgttcttgtctttattactgtggtagtggtgctgaaggagcaaac

SEQ ID NO: 29904 - DNA, 2300 bp, Homo sapien
cagagtttaacaggaatatttgagtaaggtttaaaaaagatccatctgcacgacacatgcaaagaagtaaattttaggcatattgtgcatgatcagagaagaggaatttcctcagtgcatatgtggcaaggtttttccattcttcgggatgcaaaaggaattgtaaacagagtgtgcattttcgtgattggctctagcattttcaaaagctggctaaagcacaagcagtcagcttagattcatttctgaacactctcttactttccgctcctcggagcagggttgagtttagcgtgacacaaagagggagatggagagagcaggccatggtaggtctgaaaaaaagagaatcaagaggtcacactgagggggagagcgagagagatgagggagtctcctcttccttctatatctgacgttgccaatccccaaaccataatagataacactattacctccagttttctcagaacaactctgaaaagttattttatccccattctacaaatggataatccaaggctcagagaaatcaagaatccttgttctaattcccttggctaatgtgtggcagtgctaggatatgaaccaagtctgtagaattttatagtctctagggttccaaataactggtgtggctcaagagctgttaatctgaaatgtaactgctttaggcattcctccctgccactgtctggtgggaataaaaaagtaaagaaggaaaacaggaaaaagactgagtagatggagagggtgagtttcctaaagaaaagaaattactgcaaccaatggaagtaatccatgaggaggcgagggaagaggaagacagggctgggcggctgaatcccaatggggtaaagaatgcagttctagtatttcttaatggtttaagagaacaagcttagcatgaagtcttgcttcttccacttgctaggtgctaggtatgtgacacttggacaaatgacacagattctgtgaacctcagttttttcacctgcaaaatgggatgatgataataataataatgctcaccttgtctggtggttaaaaagattaagggaagcaatgaacaaaaagtacccagcacagtgccaggggtacagtctaactgttctccaaaccataccctttctttatgttctgaaaaactcttcatggtggggaatttcctgccttatttttcattatctctgcacctcaagcagcatgcattttgttttttatgccaacatcagtggatattgttttgctttctaattctttcccccccttttctacagtttaatcttctgttctggaaacagaggttacctcctataaaacctccctggccaaacttttccccatggacacaatgttttccttaaccaaacattaacttgaagccagggaaaaagcaaggcctgtccacttctgcacggaccatcaacggagcagtttcttcagataccatcctttttttttttttttaaatgttagaaatctttcactaattaatcaaggtttcacatgaatgcctatcttctacctgacagccaaagtcatagaaagaggaaaaatacagagtaggttctacctaaagtctgccctgcggctatttaaacagatacagaatgaccaaatctggagacacgtatttaaaatattccttctatctccccctccttctgtgaaagatatctgaatgcattcggcccacagcctgttaaagtttttttttttttttttgaggcggccagacttggaacactcaggaatacagacagacgtaggaattgcttaaaaacaagaagttctcccacccttgttggagcgaatgcgcgagtctgacagtgaaccttttgggaaagagccagcattgtaaccgtgctcggtgacttctctggctttatagggaacagatgtgaggatagcaaggggcgcacacgtgaaatgcctggcaggtacccctttgtggctctacttacttcttgccattcctctgccctccaagtgtagaggggacaccgtgggccttggcagtcgcgttccgactccggtctggtgtatgggttgcactcggtctctctggctattttgtgtgttccgatctgacagcccacatgcctctgctgtacgcctcggccacaggacacagagcactaagaagacagagaacgtaagtgggagcttcggctcatttattttttgggggggcggggggtgtcgagggtcacagaggaggggaatgcactcctaatccaatgactttcatagctatcacatcgctttctaatttgcaatgaaagggatcctagatc

SEQ ID NO: 29905 - DNA, 2300 bp, Homo sapien
ttacgcatgataaagtatgagcagcactaggctaagacgttggctccccaaaacagctagcttcaaaattgcctgggaaggttttttgtttttgtttttaaattagatttagggcattaccccctactcacagattcagaatttctagggatggatctagaatgtttttgttttttgttttaaaagctctccacatgattcatgagcccctggtttaagaaaagggcagctcaggtgtggtcagactaagagacagagtagctagttgccagagaagcagtgatttaataaatttattctctgcctgtgttcaatacacaactctggtgttctctgagcacaaatcagagagcatatcacaacatgtgaagcctatcagagacatgagtcctgggaaagagccagggagctcagctggtgacgatttgccacctttgattggtaaatggggaaaccaagacacagaaggaggaagtgattgggcccaaattccccttcaatggtacagaagcagctgcacagcattgagtctaacctgactttagtctcgtgcctttttataaaagaaccctgaggttctcttcaggagaacaggatcagtctctggtctatggttaagcacatggatcagaaagacccggttgaaatcccagcgctgccacttacgagctgtgagatcttgagcaagtctccagctctcaaagtctcagatttttttttgtcagtaaaatgtgttgttctgaggattgggttcttggaggatttggatgagataatacatatgtaaactacttacagtagtgccaggcagacattaatagtaagagctcaataaatcatatcaatgtgatgccaaaattaattgtactgttgattcacaaaggtgggcctaagagttatcttttcttggttaaggtgactatttattcaaacatatatgctaagtatatacaacatacaaagctccaatataggagaaaaatgagttgatgctgaccctgttgccaaggagaaaaggatagaacatgtgtaccaagaaccttgatacaagggagaacgtactaagcatcataagagagactctcagaagtgtctatgaagggggagggggagagatgacatcaacatggggaactatgaaaaggtcttctgggaaagaagagatataaattatatacacctccaaagaagggtaggatttgagcatgtgaagatgagtgagaagaccaagtaaattccaaggcacaaaggcaatgaagactaggattgagggtggggtgcagagaaagcagtgtaaaacccatggcctgaaatgcaggatttgtggaggaaagattgggagctgagactggacatgtggatgtgagtgagtgcactgtaaatagtcttaaatgccaaatggagttagcgatcgaggagaaagactggagaagaagcccagtgtaatatttcttagacatcagtcctaaggagagagggggagaaaagtgaagcgggatagatttagggtagagatgttcaggagaggcgggcgacccatctcagatgaaattcagaaaaactgacaactgactaggggtggcaggatggcacagcccactccaaaatctggtagactctggtagactcttcaagatttcctggaagactcctaggcggagaactagcaacatcttgatgccactgctgcagaagtggtaaggggaagtcttgggaggagataacttccagaaggaagacaaaggggcaggggttttggagctagattaatggctgaagatacgaagaaccagaacgcatatctttaagatgtatgagggcccttttccccaaaagaggcagactgcgaattaaacgcaatataaatgaggttatcacagtccaggtagtcgtttctgaagccctagtcctcagttcccaaagaaaccacgtgcgcactaccacctaaaactgccaatgaaaatgaaggtcctgcgcagtaaaatatttatacaactgctggggccactaggcttcagcgggtgtggaggcggggagagaggaggagtaaaggctgtttacaaacttgacgtacacacgcagtcctatccctacggtcctggaattgggggttactatcttggaatctaggggcactccaggctctgggctcagacggctggcttctgcctacccgagccttaacctttcaaggaccagaaggattccagagctcttgccctaggtcctggggcagcgatgactcactgcagcaccccctcccacttcgccaagctgccgtctccgcccacccccaaaca

SEQ ID NO: 29906 - DNA, 2300 bp, Homo sapien
ctaggttcttggtcacctcaggagttcaccaagagatattttgtatctttctggcctatcagctcttgtggatcaattttttaaaactgtagacaaagttcattcttcaagcaaagtcctagaaagaaagcaaaggagagagagtacacaaaggaggcttctgtccctacatatcgtaatttctataccattagttaacttctctttgtcaggaaggatttgaactgaaagagaaaaaaagatttaatgggaaatactggaaagtgctatatttttgagtaattttacaatggaagtactggaatattttccacaggaatcagccaatagattgatttcttgatatttttctgttccttactaaattttcagcaactcccagacactgtgattgtggggaatgttgttataataaaaagaaagattgtgtattagaagaaacgtattttagtgaattaatttggaggttcaaggtttaaatgccattctctaaaaatctctaattgtgcacaatacagatgttatttttccatccttacattttacatatccattatgaaattccagtaataagacgatggtaacattatcaatttgggttaacaattatttagcaaattcgtcttgccaagtcatttttacccttcaccagaagaaatatatgtattagtatctcaagaatagttgacattgctagcatattgcgatttggttcctggtgttggcaatctttggtatttctagtcctgagtgctaacctaccacgcaacagaacctcaacccccgttctaggatacttgggcaaatatatatttattagtcatatatttatatatttttaacgatattgtcatgtctttcctcttgaaattatcttgaaattctatcttcctgagggctggttaaagaaaaggcgccactgaaccacccaagattgaacaattcacacacacacacacacacacacacacacacacacacacgaaggtgtagcttgaagcgcctgctttcagtctttcccagtctttccaagcatctctcaggctgaaagcaagcggaagtgattgagaaatccctccagggactggtgcctcccacagggatctacaactttacactccatccccccttcccctcccatctctaaaccccctggtagtgaggggcgccagagtccccgccccttcttgctgccaaaatttgttcttaaccttttttggggcaggggacctacagaatgctatggaccctccatgaatggtgacagaggttggtggaaagcacagcttaaatattttgcgaaattttcaagagaccacgtattagaaacacactccgacctgcaggattaagaaccccatttctaaaactcttgacttggggtgattaaatcgagagcggagctcaggtgccaaatctcttcccgaatgaaaaagtgtaggaagggaaggcgctccggcgctgggccactttcacttgtaagaaaccaaaagatggggactggtggcaagagatggggacggaagagaaaggaaaggaaaaggagaaatgtgagaaacagacagggacacggtggggcggggagaagacagacatcacaggggaaaatggggagaagggacagagtccgagaggcacagcagcagagagacaagggggaggaggaaaaagagactcggaagggaggagagagaggagaggagaggaaaaagacgagaggggaagtggctgcacgcgcgccaggaaagggagagaactttccctgctttccctccccggggcagggaatctcagaaaaccccacttcagcgaggtggcggggaccaggaacagctgccccggcgctggtgacgcctctggcctccgcctcttgcagccggcagggcctccggctgcgagtcccgcacgggccggccgaggaggggacatggtctggaaggaggcggtccccgttcgtctcgctttctcctcccctctcctcctcttagaggcgtgcaccgggggcatttgagaggctgtggacccgcggcccccccgcctccgcccccccagccccccattcaagaagccgctcagctatcccggccagcacagggcgcccggcgcgcctcggagcgcaagttcctcgccttctcctgcccgctcgctgggcattatgcggccaagcagccgagccccagtcctcctcctcctcctgctcctccggctcctcctgcggcccgagcggctcagctctcggcaggcggcggcgttgctcagccgagcgcagacgggaccctcgcagcgagacctcagcgact

SEQ ID NO: 29907 - DNA, 2300 bp, Homo sapien
gagaaatgggtaacctgatgaagttgtagcaattaagtgagaacaggtgcagagtactcctaacagtgccctaaatgtagtaagtgttcagtaagtattagccatcatcatcatcatcactttcaccacatgcctttccattcacttggctacacatcctgagtttcttcaacaaatgcagaatagcattaactatttaaaaatcagttaacatttaatagtccccccaggacatatagcctaatgcccttttatctagggagaagtcttggattatcataagaagttccctagctctgctgccaagttatgggggtttactgactaggaccacaagttgattgccacatctcctcccaccaaaccaggcccacacctaatgcccatgtacacacaccaaagaataagtgaatttcccagttcagttacttttagagttggacttctaatccagcttgagtctatactacatcaacactataggaatagaagaggaggaggagacagtctaagacccaggacagttgcaaaaggattttttgtttaacaaaaaagaaaataatggccgggtgcggtggctcatgcctgtaatcccagcactttgggaggccgaggcatgcagatcacaaggtcaggagattgagaccatcctggctaacatagtgaaaccccatctctattaaaaaatgcaagagattggccagatgtggtggcgggtgcctgtggtcccagctgctctggaggctgaggcaggagaatggcatgaacccggtaggcagagtttgcagtgaaccaagatcacaccactgcactccagcctgggcaacagagcgagactccttctcaaaataaaaaaaaaaaaagaaaagaaaaaaatacataaataacaagaaaaagaaaacatatagtgctcttatttgcatttttggttcacagtgaaaaatcaatacggtgtctgtcttttctttcaagaactccaatgcttcctacttcaaagcgtatcatctaagttattgcctttcataaagacacaaaaatgagacattaatttgtgcagcatgaattgaatttctgaaggaaatacatggggagtgtgtttgaggagaaactatagaggccaatgtagtaaaacacgcctccctgcattggtgttatgaatcatcacactcagccaatgtgggtagactgtgcctcatttcatcatgtctgtagaccatgccagatgaccttaaagaagcatcacatgtttctttgcatatacagcctcatctaaccataaagaaataattaaaacaagcaacaaataaaaattgtggacatgtattttttaactgaaatgtagcatagcaactacagcaatgaaacagataagagagaaaacagatcaatatttatagcataaattttggtaacacaaaaccaaactaccattcaaggaacccaactcttcttgccacatcaccccaggaaggcagccaactcaaggcaaaagaggacattaatttctcagttctcacccctatatgattcccactccctctttataccatgaggacctgctctaagcaaatagggctcatgggaagttgacagcaacaccttctcaccccatcagcgtggcctttcttcctcattgcagccactgacagctttctgtcctccaggcactcagaacattgattcacccggactcctttggttacaagtgtcagaaactaaacttactgagttaagccaaactggaatgatgggttcaaatagcagggaagtccaggagtaagctggccccaggaagcccagtgacttagacaatgtgattacattttaccatctccctccatctccaagctcaggttctacatgttgtcttcttccttttctatagattggcttcttcctcgtggccaggttgaatgaggaaatggtaaaagaggtgtggatgcagacaactctgggctttcatttcctgcttagtaacaccagagcttctctattccattatctctctctatgaaactgcagggaaggactctgattggcctaaattgggtcatgtgctcatccctgtggccatggaaaccagttactatgattggccaggcctactttttatgtccattcctacggctgcagggccatgtcctgtgattggcagctcctcagaaccacatggagtggaagagctgttcctagaaatagggtgcttgttattctgagaggtaagtagaaaagacaaaaaaatgacagttatttaccatatcatcccattctgtctttattaccagaatacacacatcctc

SEQ ID NO: 29908 - DNA, 2300 bp, Homo sapien
gtctatgggtttccattatttaacgtccttgtcggcgcttggtattgatgatcttttaattttagccacctgaaagtatgcctactttgaattttttaaatttctgtgtttcactgtaaagaaatgagagtgaggtttagagccagaaactctgaatgagtttagctttaaccctggttgaagggctactaggtgatcatttgaatccttaactgaaggtggggccattttgttagacttcaccctacagaatctcacacaccaaggtccaaatgccggtggcaggctatgtaaacctacatagttatttacctctttgagactcagtctccttatctgcaaagggatgtcattttaaattcctcaccgagttggtatgaagagcatcagtcattccaccaaaaagcacttagttcctggcccatagttattatcaaacagtgagtcacaggaagatgcggctagctacattgctgtagaatactcttatatttattttagtttatctatttttaggggaaacaaagttatttcacccagagcattagacgtcaaaagtcgatatatcctttctggaactgccttgtttgtttgatgtcctggtgttttgaaggctggcatgtttatggccgggcagaaccataaacactccttcggcccagggctgccctggatttgtgtatatttcatacatgggcagtggagaaggaaatcatcttcagcttgtgttttgacacagagaagttttgcttttcgtttatctactctctgcatcctccaccgaaaacaaacagaacactctggcatgggtaaatattgtgactggcggcctcagtggtgttgtttttccctttgctacaattgctgagagactgatggtggcattgtagaagatccatggttgtcattctgatacttcagccagaaccatagcagttctggaaatgaaaaagtgaagtaaagaaaaataagaattacaagacaattttttttttccaagggaaattgtaaggcatttcaaggatggaaaggcaaaaatgttatatggttttgcatttcttctcctagcagcgatattcatcatgccaccactcctgagccttagaatagatagactcttcaaagacagctgagcttcatttcaggtgggttccctccgagccttctcctgcttcatttgccctgcttagtgaaactcagctagaatcaaggtgcaactggtctaggaggctaggagaggtgtaaccacttactatgtagccactgagagtttggcctggtggaatttcatttgcaattaattacgtttatttatttatttagttttaagaggcagtgttgtccaggctggccctgaactgctgggctcaagtgatcctcctgctttggcctcccaaagttttgggattacaggcgtcagccaccacacctggccaaggttattttttattagcttaaaaagttatttacctctaacgtgttttcttcgcttcccccctcctccctgtctctgtgtttctccccatctctcattctctctttctgtctctgtctctctctttcgggaagttaagtaagggaagaaagaccagatgagagaggttaaaactgctgggctctgatttcacaaacaggtagtcttttgctaactgcatgattttgagcaaattccttcatttttctaagtctcaattctttcatctctcagtggaggtaacagttgtacctcttttgttatgagggttatgttcagaatgacaaatgtcagaatttgcacaaatagcaacagctgcccttacctggcacttcctcagtgccaggcactgttctgagtacctgcttggtatatatcccagcagccctgggggttggggcctgtggtttataggtgaagaaactgaggcagagagtgtttaagaaacttgacttaagattcctccagcaacaagtggcagaactgagattggagtgcgaggctgtgtagtccagagtcgaggtcctctgtcgcagcactgccatttccccgccgtgccgcctgacaacacaccccgcccctcctccttctctctgtagataactatttcagtttggcataacttcctttgtaatttgtagcaacaaacctggggtcagacactccactgcctgtgcatcttgcctgtttccggatccgccgtgtcacagacattttctatgtcagtgcctatggctctacccaggtaaaaaattaaccaccttggcaagcgctgcccatgtcgctcctgcttgccggggctggctttctttcagagcaaccccgt

SEQ ID NO: 29909 - DNA, 2300 bp, Homo sapien
aaaaaagctggagacaaagttcctctcaccaagcaaagccatggaaaattggtcacctccttttttcagaaacacaacaatgcaatgggattttcagttctggatatcccaagagagaagcatcaacatccctccttacttttattagcttagaatagcaccctacaatgctttaaaaggatgtttaaacgtatgcctaaaccaggtatggtggctcacatctataaccccagcactttgggaagctgagtcaggaggttggcttgagcccaggagtttgagaccagcctgggcaatcaacatagggagacccccccatgtctacaaaaaatcaaaaaaataaaactagctgggcatggtggcatgtgcctataattccagatactcaggaggctgaggtggtaggattgcttgagtccagaagttcgaggttacaatcagctagtcgagctactgcactccagcttggggacaaagcaagaccacgtttctaaaaacaccaccaccaccatcaaaaaacaaacacacaaagtatgcccatattttctaagttctagaaaggagaggataaattatcatacttactaacttgaatccccaaatgatttcccaattttcttcccaaatagtaatactactattaagaatataatgagtttttattatttgccactttataagtgttttcccacgtaatacttccaagaaccctgtgaggtcttgttctacttatttgatcagcgagaaacggaggcgcggaggtcaccaagcttgctcaaggtcacacaagggtggacccctgagcctacctctcaacctcgactgctgtgtccatcctttcttcatcgtttcaacgtacccccctcatttcttggaatctctcctgtgaccaaagatgaacaaaattatacatcactaaagaggaaaacaaactgctggggagactactcagcagcctgatttgaggagtatttgggaagggcagccttcctgtggtatgggagtctttctgtccgccacctcgccgggacagaagtcactccatccgcacccccgggcgacctccggaggccgcagctacccccgggctgcgaattccgagttctctcacgcccccgcgggcgccaggacgcagggcatgtccgcgcccggcggggatccttatctcctggccccggagtaggtccgcaggcttctcggccctgccaggaacttgaggccggggcagatgattgactgggtccagcagtctctgctggcagggcagttgaaaagctagagggatctcttttttggttgaatacctgaacccacactagcaccatggcttctctctcttgcctgtagtttcccgtgtcctaaaaagttggtcccaaagtttaaggatgcgggtgtgtgtaagagcgcgtgtgacccgcacagggatcccagttggggaaccggaggatcccaccgtccccctcccccgggtcgcagagaccctggcagaccccgcgccaggacccgaacccgcaagcgcagggcaggcagggaggcggcgagcgccccggggcgggtctcgggggtttcagtgggacctgcggcaaggggggcggcgaaccagccgggctgggtgaccgacagcctggccagccactggccgagggcggttaggaggcttagggccggcgcgagtgcgtgcgcgtgtgcgtgagtgtgagcgccagggtgagtgtggcagcctccccaacccccacctgtttgaaatggttttcaaatgccaaagccagattgcccgggtttcaaaagttgcaaacagttggagtaaaacacgtgtgcggccctccagccccaaaggaatccgcggagtccagggcactgaaagaaaaggagagaggataggggttcaggaagggttgggggggagttgccttctcccggcaggtcggttttaggacccatcgggaagcacgttggaatctctcccttcggggaggaggggaggggtgggccggccggctggcggccgcggggcgcatgcgcgcgcgtctcctgtcgccggccgctgcgctccgcggcgcggaatagaatgaactgtaacaaaacaagccgagcctttgtatctgcttaaaggggccgcgagcacttacctcccgccctgctccccgccgccccgccaccgcgtcttcagggctcccggcaactggctggaagggcttccctcaccctcagtaacagcctgccagcgaggagaggcgagccgggcgggaggcaaagaggaggcaccgcatttgtaaaaggcaagagagaaaggaaggaag

SEQ ID NO: 29910 - DNA, 683 bp, Homo sapien
gaattcatgcagtaaaaaatagccatgattattttgagtaaccagtaataaaacattatagaatagacattttctttaaagtatgtttgcaattttaacctgtttattcatcaatgtagttgattgttttatggccatccataatgatattttggatcacagaaattcatatccttttctaaagttgactttaaaaatgtataagtaatttgtcagtacaacacggtaagtgctagattagcacttgtgctccttcagggtaggtgttatattttctgcatttttgtaagtctaagatcaggcatataccatggcgtcagtaaactctgaaagagtgggggtaggaagaaaagatatgtgcttatcaccttttctcttatctcataatttaataattattgtcatactttttgagaaacatgtttcttaacagtgtgaatatatgtttaaactttgtgaaagactggcttgttttaaatttcagctgctgcattttttatcacctatgaatatgtgaagtggtttttgcatgctgattcatcttcatatttgacacctatgaaacatatgttggctgcctctgctggagaagtggtaagtaacaagttttgtgtataaaatacttcagaaatgcacatcatgcatatattttcagtacatatttatttcattttttaaaaatt

SEQ ID NO: 29911 - DNA, 2300 bp, Homo sapien
gtccacgtccacgcgcaggacggggaagtgatggagtacaccaccatcctgcacctccgtcaggtcactttcgggcacgagggccgctaccaatgtgtcatcaccaaccactttggctccacctattcacataaggccaggctcaccgtgaatggtatggaaacaccatctttgttatagtaccagaatcctacaaagcacactcctgattgccctttcagctttccatgtagagatgactgagacaggacacacacatgcttctgtggggcactgttaaatcctattgttgcctgggtttgccccagagcaagttttgcagatttcaagggttattcacaatgagttacttgtttttggtgagttttaaaaatctagttattggccgggtgctgtggctcatgcctgtaatcccagcagttgggagactgaggtgggcagatcacttgaagccaggagttcgagactagtgtggccaacatagtgaaaccccgtctctactaaaaatacaaaaattagccaggtgtggtggcacatgcctgtaatcccagctacttgggaggctgaggcacaagaattgcttgaacccaggaggtggacgttgcagtgagccgagatcactccactgcattccagcctgggtgtcaaagtgagactgtctcaaaaacaaaacaaaaactagttattaagtcaaattgtggagagctaagccttgttttgtccagttcttatcctctataagccaagagatctggcttccaaattccaaataccccttagcctggggaagctgctgttctttgagtagatggcacagcattggagtcagaggctagctactgctccagagactgtggagtgcaaggctggtgtgagccctggcctgaaagacacagtgtcctggcagttgacaggtttttactcattaaccagccttggagcttgtcaaggggaccatgtgttattgtgtgtttggaggaggggggtggggagtagatagcttgaagagtttactgtcccaccccagtaacctaatggggttatcctgattactaactctctagttaaaaagaattggcttgagaatcatcagaatggtggatctgctttgctctttaagcccccacagatcacagcgaaacaccttctttaccacactgtagtggggttgtcttggcttattccaagtcctcacagcttccgaaagactcagctgtttgttagactctccccaaaattgacgttgacaggaactctggtggtgcctgacacgtggctggatgcgtcccactctgtcaggacatcgatctttaggctgagcaagctagcaagctgaatgcttcctgcctgggtatacggcagtgggcaggaacagcctgggtgaacaaccatccaaatggatgagccatcccattcatcccatgaacacccatccaaacggatgagccatcccattgctctcccaaggtggaggcatgcccaccttccctctgtaattccatctccacagcctctctcttggtgggtaaagcaggcaagcatcaggcctacctagtgtggatgggcaccccctgcaactcccgtataggcactgccatgtagagtaaaagcctttgctttgaagggactatagccagcctagggtgtacaatgcaaggctgatgggatggaagtgttccaactgtggtgggagaagctgggggttcctgattcacaggtggcaggagtggtcctgggcagacattgggagaaaagaagtgaactggcactgggcacagtgacaggtaggtgtttgccagaggacttcctggttttgcatctagctgtcccgtaacccgaccctgtatacgtatgttttccagtgttgccatcattcaccaaaacgccccacgacataaccatccggaccaccaccatggcccgcctcgaatgtgctgccacaggtcacccaaaccctcagattgcctggcagaaggatggaggcacggatttccccgctgcccgtgagcgacgcatgcatgtcatgccggatgacgacgtgtttttcatcactgatgtgaaaatagatgacgcaggggtttacagctgtactgctcagaactcagccggttctatttcagctaatgccaccctgactgtcctaggtttgcctattgctctactgtgtgtgtgtgtgtgtgtgtgtgagcgagagagagagactctcaaatgctctgtgtggccaggggtggtatgcgttgtgggcctttcgaccctgtttgaaatttggggctgctttttgagttgagttaatttttctt

SEQ ID NO: 29912 - DNA, 2300 bp, Homo sapien
aactgacagacaccctgacttatttgtccaggagggaaagaatgctgctcctagctgcctttaaaagctcattaatcttctctgagtttattttccatcttcctatccctgccccagccccaatttttcaacgatagatgaccaatatgtcacgtaagcaacccagaggtgcaggagtgctgggaggaagctttgattctgaggttcgggcaaagcatgtgcttttaccgcctgcagtaggggatcatgctctgaggtccacgtggatgggggcagggaggcctgagcaggagcctcctgccctgggggagttgccccactaaggcatgaggcacaggtgtggttgtcccacgcaggggctagtggtgccctctgctggcagatgcagggagtgtgactggggctccctggcttgctgcggggtcatctccagaatcccaggcttctgctatgagagaggtcttttgtagcctgaatcaggagctgccttggacagcatgaaggcgctggagcttgagagttgttgtgtgtcatgacctcgtgtgtagtcttcacagtttaacagccaccctggcccctgtgacctatgcacccattctacgagtcagactagtgtgttgggcactgatgagtttctagctgcatggccacttttacccccaggattctgtgggtgtgggtgtgtgtgtgcacgcacgcgcgtgcgtgtgcatctgtgtcatttcccactgaaacccagctgactgtggcccaatttccggtggggtggggttggggggcaaccacactagatggtgacattgctgccctccctttcctcagggtcctgtccttcaacaacctgacacggctggacgaggagagcctggccgagctgagcagcctgagtgtcctgcgtctcagccacaattccatcagccacattgcggagggtgccttcaagggactcaggagcctgcgagtcttgtacgtctcccactactgacaggataaaggggtccccagtggggagagcagaatagagcaaaccatctgctttgttgaactccatttgcgttggcttcgagtcagaattggatccaaagctggcttgctctatgtgcagagtctcaaacttttatgtaatcaactgaaaaagaactggttaagcagaaaaatctctcatttccccaggatggtgcctagagagggatggcagctcctaaaaagtagttgttctcaagcagtgatgcccacgttgtgctggacaggatgctggctcctagtgttggaaaaagcttccccacgctgagcgcctggtgcagcctccagttcggcagccgtgggtcagtctttcccatcttgagtcttcagctgcaacttccaagtcctgaatattttttctctaaaccatgggaatactgcagtgcatctctcgtctgagcatttgaacttcttcagcataacctgtaccaagatgcctcctttccaaaagcagcacttagggaatcctgtgtctctccttgtacctcgtcgggggtcagttaacaaagtggaggtgctaatgccatttcccttgaagtccctaattagatggggttggcaaaagtggctgcaggatgcttttctgaggcttgtataaaacttttccatggttggcttcatagaacttccaagcagctgtcagcataaaacccccagagaggggcatgcaggtttcagaggacagtggtggcgggttctagggtctccttctcaggcgtaatccactgcacagagagggatctgttccagtgtgacagggagggaggcctttgcacttgcacctggcagagccggctttaatgtggagccattgccagggagtgtgaaagaggccggagccaagctattcaggccaggtcagcctgtgagcccatacaaggcccaaataacaaggctgggaacattcagactgagcgggccagaaaggagagaaaaactttggcagccagggctaggagcagagagacaggcacacaaagccacagccccgggtccctggttcctggttttttcagtatgcagatgataggaaggaacccattgagaggagaagtcccttccagcagcagaatctccactatttgaccttcctgctgtgacaagaaaggtcaccgccagcatttcactcttcagtcagagctgccctctctgctggcagcattgattcctgctgcagcttctcacaggagacaagagttccttttctctccctggcctgtgtctgcaagggctcggggggaaaatttaagaaccaagaaccttgtggaaagttggag

SEQ ID NO: 29913 - DNA, 2300 bp, Homo sapien
gagcaaatgtttttcaacagacttgacctgcttaatcttcctgacaatgtgcgcagttatgttagtaatttgcatactcttgggaagggatatgagacactagcaaaccaaaacgcccagagggcagctatatgttacagtggtaatctttttctttttttctcaatgtgtgtatgtctgcttaatgttaccacgtactatcgtaacacactactactatggtctgatctttaagagcaaaagttagaagctttgttaactattatttctcctttaactctgtctcttacgaatacacaatggcttcttgaaaattatcttaaaaagactctgattaaaacaaaaacccaatgacaacaacaaagcaacccctttatcaaaggctgcagcatttctagaagtacccttcaactcactagctgggaaggagagtgcacttttttttttttttgagacggagtttcgctctgtcacccaggctggaattcagtgacaattcagtgacaagtctctgctcattgcagcctccgcctccggggttcaagcagctctcctgtcccagcctcccgtagctggtattacaggtgtgcaccaccacacctggctaatttttttatttttcatttttagtacagacggggttttaccatgttggccaggctggtctcgaattcctgacctcaggtgatccgcccgccttggcctgccaaactgctgggattacaggcgtgagccaccactcctggccgagggtgcacctttgagactaggtttctgcagcacacattcattttagtaatcaaggacatattgctggatttaggacgtgaagaacaagtcaggagcagatgctccaggctgctcgaggaggaaggggaccacgcctaatgaaataaccaaggatgtcccagtcaggaagaaatgtgttaagttttaaacctgtgtcttcgcttttggaaggaacctggaaaacggacgcgggtttgcttctaatctgcagtcctgcttgcagcctgaggaggacgtaaaaagccttggggccagacagccccaaaacgggggcgttttaccctcttaactttctctccccttcttgacgcagagggcgtatcttcacgcctcctttccccagcccgcgttcccgttctccaacaacaacctgcgtgtctcctttaagaggcgggggccgtccctccctttctcctcccagtctcccgcccttcacaccttgggtgggaaaagagtgtgggggcggggtagccggtgaagcgggaggggcgggatcacagcgagcgctccaatggccctcgaggctggccacggtggactccggcagccaatgagcagcaggcggggaggcgtggcggggcgctgttgcaaagcatccaacgtgggccagcaggcggccgcggagcgcggagcctagggggtgtgtgcgggcgagcggccgggggcggggcttgggggaccggccggggctgggccgcggggaggcgaacagcaagcggctgattgttcggctgcgaggtcggcgggactcttgctgcgcggaggagccgtgcggaacccgaggctgcgcgcgcgcgcgcgctctctggccgcggcgtggggacagcgaggcgcactggggcctcccagcgcggggccggccgcgccgtccagcccgaggtctacggctttgcgctccgagcccagaggaagatgcctgccggcaccgagctcgggctgcggggctgaacgcctgtcttccaggcgcagcggcagcactgccctcggccggtgtcggtagcggcactcggcgtgccccgggcggacgaagagcgcaggctgggtacaccttgcccgaatcggcggagttcgcagctagcgcgggcgggccggccggcccggatgggcgcggggtttgcggcccccgccgggtgctccggagcggcccgggcaccgggggcacgctgagtgccggagccgcggccgcagagagaacttggggcgggggccatgccccggtgcggagtctagagccgagcggagcgccccgcgggcccgcccgcgtctgcggccgttcgggtcctcacagtccccgcgcccggagttcgcagcgcgctccagacaagatggcgcggccggtccggggagggctcggggccccgcgccgctcgccttgccttctccttctctggctgcttttgcttcggctggagccggtgaccgccgcggccggcccgcgggcgccctgcgcggccgcctgcacttgcgctggggactcgctggactgcggtgggcgcgggctggctgcgttg

SEQ ID NO: 29914 - DNA, 2300 bp, Homo sapien
taaacactgactgagaggacttcataaatttagggtctttttaattccattcccactgcttattattattatatttaccaaaagggatagaacaaaaggacatatttcttctcgtccagatggaaggtgtatgtttatttggattacatatgaaacataaaagctggttaaagctctgggtgggatgggtcaggtgcagcatttttctgataatatttcttgggaattagatttgaattgatttacccacatatttgagcactgctttgggcatcactgctgagatcatgcaaaattaaacaagaaaaaaatgaggcgcaatgaattcagaaggggaagaaggaaaaaggggaggaagggataggaagatcacattttggctaaagaaaagaggtgatcttatggctgagggaaagtttaacacatttagtgcatctcaattaaagcaaacctcttagattgtgtcgaaaatggaataaaccctttaattttttttttttttttgccttttttccctaaggttcaacttctcctctttacctcccaccccaccccacttccataaaacacaactcagatttaatgttctggagcaaatgtttttcaacagacttgacctgcttaatcttcctgacaatgtgcgcagttatgttagtaatttgcatactcttgggaagggatatgagacactagcaaaccaaaacgcccagagggcagctatatgttacagtggtaatctttttctttttttctcaatgtgtgtatgtctgcttaatgttaccacgtactatcgtaacacactactactatggtctgatctttaagagcaaaagttagaagctttgttaactattatttctcctttaactctgtctcttacgaatacacaatggcttcttgaaaattatcttaaaaagactctgattaaaacaaaaacccaatgacaacaacaaagcaacccctttatcaaaggctgcagcatttctagaagtacccttcaactcactagctgggaaggagagtgcacttttttttttttttgagacggagtttcgctctgtcacccaggctggaattcagtgacaattcagtgacaagtctctgctcattgcagcctccgcctccggggttcaagcagctctcctgtcccagcctcccgtagctggtattacaggtgtgcaccaccacacctggctaatttttttatttttcatttttagtacagacggggttttaccatgttggccaggctggtctcgaattcctgacctcaggtgatccgcccgccttggcctgccaaactgctgggattacaggcgtgagccaccactcctggccgagggtgcacctttgagactaggtttctgcagcacacattcattttagtaatcaaggacatattgctggatttaggacgtgaagaacaagtcaggagcagatgctccaggctgctcgaggaggaaggggaccacgcctaatgaaataaccaaggatgtcccagtcaggaagaaatgtgttaagttttaaacctgtgtcttcgcttttggaaggaacctggaaaacggacgcgggtttgcttctaatctgcagtcctgcttgcagcctgaggaggacgtaaaaagccttggggccagacagccccaaaacgggggcgttttaccctcttaactttctctccccttcttgacgcagagggcgtatcttcacgcctcctttccccagcccgcgttcccgttctccaacaacaacctgcgtgtctcctttaagaggcgggggccgtccctccctttctcctcccagtctcccgcccttcacaccttgggtgggaaaagagtgtgggggcggggtagccggtgaagcgggaggggcgggatcacagcgagcgctccaatggccctcgaggctggccacggtggactccggcagccaatgagcagcaggcggggaggcgtggcggggcgctgttgcaaagcatccaacgtgggccagcaggcggccgcggagcgcggagcctagggggtgtgtgcgggcgagcggccgggggcggggcttgggggaccggccggggctgggccgcggggaggcgaacagcaagcggctgattgttcggctgcgaggtcggcgggactcttgctgcgcggaggagccgtgcggaacccgaggctgcgcgcgcgcgcgcgctctctggccgcggcgtggggacagcgaggcgcactggggcctcccagcgcggggccggccgcgccgtccagcccgaggtctacggctttgcgctccgagcccagaggaagatgcctgcc

SEQ ID NO: 29915 - DNA, 2300 bp, Homo sapien
tgccatctgcccagtagaatggagtccatttacagtgtcatataaatggcaactttttacctataattttttttctatttatttttagattggcttttgttctttgtattctgctgcatctccaatttataaatctttgtgggtcaaagaatcagaacactgtcttctcactaatcaaacaatattgtcaagtctgtttgttactaagttgagaattgaatttttaaaaaattggccaagtttcttaaggcttaaatagatagatggctacaaaacaacaacaaagcacaaacaaaactcctctattttaacagatttgaaaaggttgccagataaaatacagaacacccaattaaatttaaatttcagataaacaacaaatgatatttcagtttaaatatttctcaaataatgcatgccctgtatttttatttgcaatatcgtcagatgttgtcaaaccctaaggattaacgccatttttttcctcaatactaaccatattgtcataaagtgctaccattttaataaattagaaagcaacatcataaaaacgaaaaaataaagttatgagtaaccaaaattaagtcaatttcatctatccagaaacgtgcatacaggacattcacaaagaagaaattataagtgcatatgtatatgcagaaaccccagtcatgaggaaacaccacttcctgttaacttgcatgggattatagtattttaagttctaaatttctcagcagacctagaagacagaactgaattgtttttcataattatttctctttctcaatcacaatttaaattccaagatcctttctttatcaagaagttcaacggtttgatcttttcagtgctagaaaagttatgcacacgggctaactatatgtctactagaaattcttcccattcgctgatacttccttacattttaacatctagaaatagcattcccaatgttagctcatttgcaccttacatttatttttaaaatatgaaacatctataatgtgccaggcaccccgttagatgttagaaacacaagatgagtaaataaaaattcgtcaacagtaaaattttgattttctttccaaaaggttgcagcctatgaaatccatggagtacggattactattacttcacgttacagatgaaggatctaagcgctcaggggttgaaaggtcttatgtcagttctcacatatagtgactaaagagccagggcttcagtaatcatccctggctccgggctcagggcattccggtattttttcaaaggaaattccggaatacttagtattgtatcccctccatttcccaagagcaaaaagtaaagcatcttggatccccttgtaatgttcacgtgaggaacaggtgttctctgggtgtgctagaaaagcaaggcaccagtgggagttgaagatcctaagcagccgctgtaaccagaccaagttaatctgtggaaaccagagcacccggccaaggcgatgctatttcaattgggtgtcataggtgactcatcagagacgccttgcttttgggccttgtgatatttttcttcagggtgggacgtcagatttcctttgcatttttggacaacagccctcctgtccatttccacatttttctggttttacagctctcacgcagagcttgatttcataccggaagctagtcactggcaggaagtttacggaagaagaaaaaggtaaaaaaatgtgccgggggccaggagagaggcctaaaatggggaaattcgcacttgaagagctttccctaccccagcccctcagaatgacagttctcctccgccagaagactacctctcccggcaggcactgcgcgctcgacggccacaggctggccagctccctgctctccacctccatccgaatcagccaataggaattcccggcttgggcctccgcccgacccggaccacgcgggagccggggcaatcaaactacatttcccgacacgcatgtgctcgcgtcgtggccaatcagcgccaggaattcggaggctaggggtggagccagatgcacaggacaccccattggccaggggaagcttagaagagccggaacccgggagctagagaagcgaaatgacatttcctttttaaatagctggagtcggggccccatcgagaaatggccgcgtcggcaggtgggtcgtgtggtggccagggcggcgtggagggaggtgagggggaaggtgggccggggccggccacaggcagtgggatgaggacgtagcggtgcggagctagagggaaggatgaagcggtggaggggaatgaga

SEQ ID NO: 29916 - DNA, 2300 bp, Homo sapien
tgaggaaacaccacttcctgttaacttgcatgggattatagtattttaagttctaaatttctcagcagacctagaagacagaactgaattgtttttcataattatttctctttctcaatcacaatttaaattccaagatcctttctttatcaagaagttcaacggtttgatcttttcagtgctagaaaagttatgcacacgggctaactatatgtctactagaaattcttcccattcgctgatacttccttacattttaacatctagaaatagcattcccaatgttagctcatttgcaccttacatttatttttaaaatatgaaacatctataatgtgccaggcaccccgttagatgttagaaacacaagatgagtaaataaaaattcgtcaacagtaaaattttgattttctttccaaaaggttgcagcctatgaaatccatggagtacggattactattacttcacgttacagatgaaggatctaagcgctcaggggttgaaaggtcttatgtcagttctcacatatagtgactaaagagccagggcttcagtaatcatccctggctccgggctcagggcattccggtattttttcaaaggaaattccggaatacttagtattgtatcccctccatttcccaagagcaaaaagtaaagcatcttggatccccttgtaatgttcacgtgaggaacaggtgttctctgggtgtgctagaaaagcaaggcaccagtgggagttgaagatcctaagcagccgctgtaaccagaccaagttaatctgtggaaaccagagcacccggccaaggcgatgctatttcaattgggtgtcataggtgactcatcagagacgccttgcttttgggccttgtgatatttttcttcagggtgggacgtcagatttcctttgcatttttggacaacagccctcctgtccatttccacatttttctggttttacagctctcacgcagagcttgatttcataccggaagctagtcactggcaggaagtttacggaagaagaaaaaggtaaaaaaatgtgccgggggccaggagagaggcctaaaatggggaaattcgcacttgaagagctttccctaccccagcccctcagaatgacagttctcctccgccagaagactacctctcccggcaggcactgcgcgctcgacggccacaggctggccagctccctgctctccacctccatccgaatcagccaataggaattcccggcttgggcctccgcccgacccggaccacgcgggagccggggcaatcaaactacatttcccgacacgcatgtgctcgcgtcgtggccaatcagcgccaggaattcggaggctaggggtggagccagatgcacaggacaccccattggccaggggaagcttagaagagccggaacccgggagctagagaagcgaaatgacatttcctttttaaatagctggagtcggggccccatcgagaaatggccgcgtcggcaggtgggtcgtgtggtggccagggcggcgtggagggaggtgagggggaaggtgggccggggccggccacaggcagtgggatgaggacgtagcggtgcggagctagagggaaggatgaagcggtggaggggaatgagaagagggaggatgaatggtgcggagggcggtgggcggtccggcgggaccgggatggggaggctgggtacccgccggcgctgcgccccaggaggcagcgggaggcggcttgagggggcaccggcggccgccgttgttcgagcttccctcgtgaggctctgccctcggctctcggcggagtccgcgcagacgcctctcctgggctgcgagcgcgtttcctccgcgagcacgggtgccgggctcgccgggctccgcaggagcaggctggcctttgaacttgttccgccgatcgcgctccgccctctgtctcccagatccttaactcgcggtcccacgaggtcgtgcgtatatccacagacatttgtatatatcttgtagggggaaaaagcctagcaagcagacacacaaacagaaaaatcccgcgatgccgtaactggctcggcacttcttgtagttgtacgatttttctcctcctagatttaagtaagtcttccccaacaccgaatgggattccatcttcagacccagccagcgatgccatggaccccttccatgcttgcagtattcttaagcaactcaaaacaatgtacgatgaaggacagttgacagacattgtagtggaagtggatcacgggaaaacattttcctgtcatagaaacgttcttgctgcaatca

SEQ ID NO: 29917 - DNA, 2300 bp, Homo sapien
atgttaagatattagaacagcttggatgtcctgcagtagaaaaacctatttaactctgtttcactcagtgttttcccaactacttaattacaaatttctttctatgaccaagcatatcttactatctcttgaaactgtaggacatgttaccgcatgggatgcatgctcggtgttctccagtttttctaccaaagagcttcttaaggtaatgcccaagttcttactacttcttacaagaaggttgagaggatgatatctgttttgtgtttaatgagtgagtttcgctaaaagggatgaactgaggataactctactaagtgccctgtcatctaagaaaacattgagtcagtcttttctgcttcaaagaccaggaaacttagaggtttcactgttgtcctagctatttgaagctcccaaatggacttgtctcaatacaagtatcagagcattccacattaattacaagtatccattagaaggcccaggagtggcttttcaggcaggtaaatgggaccagaacagatctataaaagcacagggcctgatataaatcagaccaaaactaccaaggggtcttcactgggatcaggagcatgattcagccataaaacgattcatagcttcttcttccatataaacattttgtgtctcatggaaggattctttaccatctattccaggcaacagacccaaagatacagcacagaaagggagcataatttggctataaaaatgttgtaataagtgattttatataactgaaatgccagttcctttactacatcctcccactcattttacaaccagttaatatttttctgaacttttgtgttgtattccactcagccgcctctgcaatcatttttgcctatttttctgccagagccacaagaataaagctgtcagatgatctgtgaagccatttttcttgtctggcaaattgtctagaagcaaccagaacctcctacctgctccactatgtaagagaagaagcctgtcttaacaaaacagaattaaaatagtcttttgacccacgttatctataggcatatagaatgaaataactgaaaatatatttcactgacttttttttttttaccttgctccaataggattgaggtggatattcttgttaagcggccctggtgttgacatgtttagagagatgttatatagccctccaacaggaatatcaagatatttgaactgcaataataaatgtggctgctcctaggggaagaaggatacagcaagaaagtgccccagaagaagaagattaagaaccgaagtgagctaatggtatacagtggttaggatttgaatgtgattaggatttatagtttcaattagtgccggagaacaattttagaaagttattagcaagcaactggcattcgcaaagatggctcatttgtgtgttgctcaagattagctgggtcttttagttgtttacaaacacacatagtggcttgtcttgaatgtgtagaagtgactgcaacattacatactcagagctctttagcagaaatgaagcctagagctttggtttcttactattcctgtgtgggcaaagcaaaactcaattttgcaacattttctttatttcaaaaaagaaggtaagtttccctacctgttctaaactccaacatgctatttcaaatgaatagctttcccattcaacaaactccttcatatttaaaagtcttaagtgcctcaaatactccatgttgtgttgcctagaatacaaactaattttttaaatctccctactggattgttttccactgaaacccataagtctttacattggactgtatatatttttctcttttaaagcctttggggcattattcatacagggcaaaaattctcaaatagattagaatcctggttgaggcatctgcaaacacaacaaaaagcactcagtctcagggagttgaaagctgtgcctggttttgttcatgtcaaaagccatggaaggtattacatcaccttgagccagcagaccttgaccttagcctcccgctgagcaatgagacagtttccccaggcccggaatgtgagaaatacaaaggaacccttcccacacacggtgacattaggattcctcatgggatgacaaggccttgctccagggatgatgtttcccactgtaggagaacagctactgtctttgatgaactgagtctacagggctattgaaggtatggtctttgatctcaaaattcaagtgcttacaaaatatccatttctttattttctctattttgtaacctaactaaagatatttccttatctga

SEQ ID NO: 29918 - DNA, 2300 bp, Homo sapien
agcattcatgtgtgttcatttaatttttaaaacaacccttgtcatcatttcacagttgaataaaccgagtttcagagacattaagtaacttgcctaatgtcacacagctgggtgagggatgaaggccagattgaaacctgggtttgcagattctaaatctggtatactgaaccagaatactctcatggccttataggggatcagctgggttctgtgattttaaataaagatgactcacaaacagaggatatcagctgtggtctgcagttgtgtgctatttggtttattaaacatatttgatttggaggcagttttttgtttgttgttgttttgttttgttttggtggttggggaggggagctaccctgtttgctaaaggccccatttgtcactgggctacttcatgcacccaacttccctgcaagggaagatatttgtgttaataactctcgtctaaaaagtcaagattagagagttctttcattcgtggagtgtgatgagaaacaaagattccacaaccactttcccccaggatattttgttaccttgccaatgattttaaaatattgcttgcttttagttttaatccatttcctcctccctttcccaaccctatcagtatatagaacaactgctcagaaaactgttggtttccaataatgcagttattaactatgacctttgtgtcttgtctttaaaccttcccccgcataatccagtcttccctttgacatctctgatggttagctcctcttactggccaactggtgcctctgccacatgggagtgccattacacagtaaaattaatacctccttccaggatttatttagcttcttctgacacactcaaaagagcaagggaacacatgtcttgctttcccttgggaaggtcaagtattagatgattaaactggtaggaagcatttgaatatcctcagtaaacaagctttgtatttaggctcatagatgtttttttgaagttcttcattgcatttattttcaaagttagtttgagagagcttttaccagttacttggaagttatgtgccattattgctttccttattgcttaaaaaacaaaaaaagaatttaaaatcagctaccaactctggatttttctttttcagatgcaaaagaaattgttttaaaagcccagatcttagctggaggaagaggaaaaggtgtcttcaatagtggtttgaaaggaggtgttcatttaacaaaagagtaagtctggaggttgttattccttgtcttttggccaagcagttatggaagatcttgctcaagattgaaaggcacactgaggttggttgtggtggggtaggagcgggccaaagcaactagaagaaactgaaatcataggtagagggctctggcagtgccctagttttccttctgcccccacaaaatgatttttcttactaattggtgaaaacttgacagtccttctgtcctaaacaatcaatgattcatcataaatgttggaaatgataccacttccaactgaaatgctacttccataatgtcactcctctattcaaggacctgaagggactccccattaccagtggcatctggggtacctcccctctgatagtccaagccttcctttatttgagcctgtcttttcaacttcatctcctgcatctcctagcactgaacactttcctctcctccctgttcctgtcacacacctttttactatttactttgatctttaccctcttcctttccctctcattgttcaatatctccccagttttccactgtcggatcttcagtcaacccttatctgaatctggtgtgcatttcagcattctctctttactatgactgtaacttttttgggtgaagaggtcacaaagcatcttttgtttcatttattcattcatgaactcacttttattttgctctcagtgagcctctagtacagtgctaaacacgcagcacataagcagaaagactcatggattttgtgagggtgaaggtgaaccctttgcagtgtagacatgaggctctgtgtaaggactctcatttaaatgattttcaacaaacattcattttctgcttgttttctctttctcttagccctaatgttgtgggacagctggctaaacagatgattgggtacaatctagcgacaaaacaaactccaaaagaaggtgtgaaagttaacaaggtaatatggatactttgggtcattttctatatatgtgttaaaaaatagaaaagaaaaccatccttcagtttttgacagaatctaatgaagtactgctctttggcagtgtgccattt

SEQ ID NO: 29919 - DNA, 2300 bp, Homo sapien
tgatcacaattaaaaatttgagtagacagcaaaaagtattttttccacttgatgtcttccaaagaaaaacaggaaatgtcttcctgtgtgccattttttcttaattgctgaaaattattataatgttgatagctatcatattttgactttaaaaaaatgtgccaggcactttactgtatttcatttattcttcacatcatccttacactgtagacttctttaatatgactactttacagaagggcatgctacttttacctttctgaatctcagttgtttcttctctacaaagaaagtgataggtagagttggagattttaaccaggtctgtttaactccaatatccttgctcttactactgttcttgcagtaagctaaatatgcaatgtattcattttacttggttgctttccttgtgagtttctgacaattaatttgtcttctactcagcttgatggaaaccagtttattataagacagggcttgaccaatgttgtgatggttcgtatccagggcagaaattattgccagagggtacacaggacagccttctaagaaaaaactgtgtttgcttctgagaagaaggtgggcttcagctttctgagtgtaagcaaatataggagacaagaagactaaccaatgaaggcagtgaaggagcctcaatggtgtgacatcagctggctgaatgccttctgtaaaatacttctgtagctccccattgccttgatgataaaaccttccacagctctttccgtttgaacctttacctgcttgcctgtgggtaacaatgatgatgacagtgacagtaatagctgaaataaccaaacttaatggagcgcttgttagttttttggtttagccatctctgtaatgattcctttcattctttacaatatacaaaggtaataaatgaactaactggtcgaggcaatagtttttaattaatcacaagttttcaggctctgggataaagcattcatgtgtgttcatttaatttttaaaacaacccttgtcatcatttcacagttgaataaaccgagtttcagagacattaagtaacttgcctaatgtcacacagctgggtgagggatgaaggccagattgaaacctgggtttgcagattctaaatctggtatactgaaccagaatactctcatggccttataggggatcagctgggttctgtgattttaaataaagatgactcacaaacagaggatatcagctgtggtctgcagttgtgtgctatttggtttattaaacatatttgatttggaggcagttttttgtttgttgttgttttgttttgttttggtggttggggaggggagctaccctgtttgctaaaggccccatttgtcactgggctacttcatgcacccaacttccctgcaagggaagatatttgtgttaataactctcgtctaaaaagtcaagattagagagttctttcattcgtggagtgtgatgagaaacaaagattccacaaccactttcccccaggatattttgttaccttgccaatgattttaaaatattgcttgcttttagttttaatccatttcctcctccctttcccaaccctatcagtatatagaacaactgctcagaaaactgttggtttccaataatgcagttattaactatgacctttgtgtcttgtctttaaaccttcccccgcataatccagtcttccctttgacatctctgatggttagctcctcttactggccaactggtgcctctgccacatgggagtgccattacacagtaaaattaatacctccttccaggatttatttagcttcttctgacacactcaaaagagcaagggaacacatgtcttgctttcccttgggaaggtcaagtattagatgattaaactggtaggaagcatttgaatatcctcagtaaacaagctttgtatttaggctcatagatgtttttttgaagttcttcattgcatttattttcaaagttagtttgagagagcttttaccagttacttggaagttatgtgccattattgctttccttattgcttaaaaaacaaaaaaagaatttaaaatcagctaccaactctggatttttctttttcagatgcaaaagaaattgttttaaaagcccagatcttagctggaggaagaggaaaaggtgtcttcaatagtggtttgaaaggaggtgttcatttaacaaaagagtaagtctggaggttgttattccttgtcttttggccaagcagttatggaagatcttgctcaagattgaaaggcacactgaggttggttgtggtggggtag

SEQ ID NO: 29920 - DNA, 2300 bp, Homo sapien
aatgtgtcagtggtgctaatgacttggatgttatatagttactactggcatgcagattaatttgcatgttgatataatatattttcatgaggaagtatatactcaccaggaaacagcatggtgtaacggaaacgtaaaggtaagcctttactctggaatgccacaaactctcactgtatcgttgaatatgtcattgaacttctttaggcctcaatttctctacccatgaaatgagctggctggactaaatgattgctaatgtccatttccagttcttggacactgtgtacctttctatctttaaaaaaacctacttttaccttctaagaatttacagaaaaacacatcatccacaaatatgtaaatcacagtaaccagatggggcgtgctaacagatctttttacccagttttcttgacaaaccaagagtatctctccccaaccagattttctcctgtgttgcgttcagcctcttatttcttggttagggaagtaggcttcacatatttcagctaaacactctgcattttcagtttctctgtacaattcatgagttttcactgccctgggccccatgtttctcatcaattcaagtctacactcatggtaagcaccctagttcttgttttttctaacacttaaataatgaataggacttcatctcctagagctattctccttactctattacaacagttattagtgagttttaattagacaaaactgccattccttttgctacctcactatactgtcaagcacctattaagaatattacagtagtaagtattagcaccttttaaatttacattaacaataacagagaaatggggaggcaggaaatgaaaggagaggggtaaaaatagctcacagatgtcataaccaaagtttagaggaactcaaaaaatcattaatcactattttttaaattttctaaaaaactatactatgcacatcctggttaaaattgtatgagtgataatttgcctctcatcaattaaaaatggggaaataggcaaggtcattaactctgctgtggctgaatcccagactgtgctttctttaaaagggaagagagatagtctacggagactaaccagttcagtggttgagtgatttctacaagagtcatcaccaactcaaaactttcctgaagtccttctgactattttaacgcttgccatctgcagaaggtaaaaatctgctagaggccaagttccaatcgctatccagcccaccactgaccctctttgatttcattctccatcaacaaggaggacatggacagggtcaatggtctaatgcgttttagtgacagccctgatttttcattggaaagaggagaaagatcgtttcccatttttctccttgacccacggatttgaccaactcaggcacattaaaagtctgcaaaagcaggtagcctgcaggaagttcaccctagggggtgagttcctagttgggctgaaacgggtttccaggcatgtttatcacgtggtctaaacgtgctcagggttagtgccagaagtttgaaaagcagaattagtagagctgacaataaaacctcagggctccaaaacccggtccaagaaacttttcttaaacttgcgtccagcgcctgcttcagcgccttcgccatgagtctgcgcgggcagacagcggagactctagtgcgttgggtcgctcataccccgaggcacccggggctgccgccgcgccgcccctgccccacactggagcggggttccctgctgcgcctggacccggcgccgcgtcacctcccgaagtggggcgcccgaggggccgcgcagggggtcaggcggagaccaagagtagcagggggcgagggaagcccgggcaggccggcgccgctgctggcgcccgcagctcctgcccccacgctcacctgggacccggccgccaggaagcggggccgcagcgctagggctcgcagaagcttcccggcctgcgctgctacgggggacgccatcttaaacaggaaactcggcacggggcagtagggcgggcgcgggcaggggaaggaggcggaggaggagcagcgggaggaggggtcagaggagaagcgggcgcggggaggaaaaggaggaggaggcagaggcggtctgggccgggccgggcctgacccctgcgtcccgggggcacaggcgttcttaaggctgcagagccctgggtcccccacccggccccggttcactttgagcggtcccaaggcctgagggcctactgtccagtccccaggttatcgtcctgagcaaagacagaccccgagccctgcggtc

SEQ ID NO: 29921 - DNA, 2300 bp, Homo sapien
ttcagtaactttgctgttgtttttattatatgcacattgcttagactcgcgtaaactctgtgaaagggaaataatcttgggactcccaaatcactaaggtaaagggaaaagttaaggtgggaactgcttagggcaaacctgcctcccattctattcaaagtcatccctctgctcacagagatagacgcacagctgattgcttcctttggaaaggccaatcagaaacccaaaagaatgcaaccctttgtgtcttatctacccataacctagaagcccctccttgcttccagttgtctcgcttttctggaccaaaccaatgtacattttacatatattgatgtctcatatctccctaaaatgtataaaaccaagctgtgtcctccaccacaccttgggcacatgtcaggacctcctgaggctgtgtcacaggcacgtgtccttaactgtggccaaataaacttcttaaattgattgagacctgtgtcaggtatttggggttcacagctccaaatgaatgttgcttttatcactctgattactgggcttaaaatcctccaatagctttgtgtccggaattggttccttcccgtgggttcttaatcgtctcgctgacttccagaatgaaactgcagaccctcgcggtaaagatggcgtgaccagaatttgttcctgcagatgttcaaatgtatctggggtttcttccttccggtgggttcgtggtctcgctgacttcaggagtgaagccgcagacttcacagtgagtgttacagctcttaaaggtggcccgtccggagttgtttgttcctgcctgtgggttcgtggtctcgctgacttcacgaatgaagctgcagacctttgcagtgagtgttacagccctcgaaggtggggcatacggagttgttcattcctcccagtgggttcgcagtctccctgacctcaggagtgaaactgcaaacctttgtggtgagtgttatagctcataaggatagtgcggacccaaacagtgaacagcagcaagagctactgcaaaaagcaaaagcacaaagcaaccacaacctggaaggagaccccaactaggggccactactggcgccggtgtccagcttttattcccttatttggccccaccctcatcctgctgattggtccattttacagagtgccaattggtccattttacagagtgctgattggtccctttttaaagagtgctgattggtgcatttacaaacgtttagctagacacagagcgctgattggtgcgtttttacagagtgccgattggtgtgtttacaaacctttagccagacacagagcactgattggtgcatttacaatcctttagctaacagaaaagttctccaagtccccacctgattagctagacacagagggctggctggtgtatttacaaacctttagctagacacagagcgctgattggtgcatttacaatcatttagctagacagagaagttctccaagtccccaaccgacccacccggcttcatctctcagctttacattgattttaggttaaggatagaacaaaacaaaacacccacaactccttaagggatggagagcctccaatggcctctccttgactcacctgaagccctgggctgcaggaacctcacctgtctctattcgttaaagtctcagctcaaacaccactgtcccagataggcctcgtgaccgcaggactagaccacggttctctgcggagggcgtcagctccgtgagccacccttccagcacccactgccatggcgaatatttgcttgtttggccatccagggactgtttgagccccaagaccgcagggctcggggtctgtctttgctcaggacgataacctggggactggacagtaggccctcaggccttgggaccgctcaaagtgaaccggggccgggtgggggacccagggctctgcagccttaagaacgcctgtgcccccgggacgcaggggtcaggcccggcccggcccagaccgcctctgcctcctcctccttttcctccccgcgcccgcttctcctctgacccctcctcccgctgctcctcctccgcctccttcccctgcccgcgcccgccctactgccccgtgccgagtttcctgtttaagatggcgtcccccgtagcagcgcaggccgggaagcttctgcgagccctagcgctgcggccccgcttcctggcggccgggtcccaggtgagcgtgggggcaggagctgcgggcgccagcagcggcgccggcctgcccgggcttccctcgccccctgctactcttggtctccgcc

SEQ ID NO: 29922 - DNA, 2300 bp, Homo sapien
tcgtgctagaggagattttagagatctgccggcccaacccacacattttacacatgaagaaatccgcactcataaaatttagatggctaacttaagggtgtacagctattaagtggcagaacagagactcggatctcagatctcaggcagaacaaatctcagatccccaatccattgagcttcacaacccagctctattatatttttgtctccagaaagaaagtctttattattaggttggtgcaaaagtaattgtggtttttatcattaaaactgcaaaaactgcaattacttgtgcactgacctataattgaagcaagcccaaatatatatcatgctttgtcaactgcatgattgcttattaccttttagttctcacctcaaaggttagtaccccaaagggctccttgaccactacctacagtcagttccactccttgttccccaggttttccatgataccattcttttcttacattcaggtcacatgccccaatctttaatcaccttgtgcatttgtgtcctcattttactcttccagtaaaatatgaggctccatgaaggtaaagattgtttctcttcttcacgtctgcatccctagctcctgtaatcatgcccagcatattgtaggagcacctaaatagtcatgcctgtgtacatttaatacatataaatattaaaataataagtggttggagagaacacataaaatcttcttggccacatatacttcctaattactgacagcatacaaagtttaatatctttatgctattacatttctctaaagatccccatatatttttgtgtgctgtgtcataatttcaagctaaaacaacacctggaattcgtagcaaagggaaccagcaacatctgattcagatgtgattttacctgtgcgggtgtattccacataactgtgagtgtgctcataacagagagtaacttggcttagagatgctgcatcccaaatatcctctttgtttgtgactctgactttgtcctgtcactttgtttgtgacttgtgactttgtcctgtgactctgacggtaagaattgttcattcttatttctggctcttggcagcctacagatgcttcctgttagtgctcctggcaggttactgatggggcctgttgtttattgccctatctatcaagtcctatttatttttaaaataaactttaagtatactgtaaactcccttcacaaacaaatttttcctcctcttttacacttgacacgcctctaaaaggaatagtaactctgtctcataaatatttgaacctgaaccttttaggaaagaattatacttaagctactcaagagcaggaaaggtctctgtctgaaacctcccttctaactactcacttctctcttcctcttcaatctctctctcacttttttttttgcattatcttatcccaacttttatactgctctcttatcccactgcagacccaattctctggtcaaaactgctgtccatatctttattaagtattgcttatataatgtaaatgtctttattaaaaatattaaagggcttactatttccaagctcatcaaacccaaatgttttacatctcttgcttggtcctacatcatgtaaatttactattttattcaatcatctaacacaaagctgatgagaaaagacgttgacatggtaaaacaaaacaaaaatgtcttggggtttagattcatactgacttgggttcaattttaacactactacttattaactgacagccttgaggaagtctcctaacttctcttactatgctttctcattggaaaagtgaacactaataatacccatttgagtacagattcatggttgtgataattaatttgaggtgtcaacttgattggattaaggaatacttaggaagctggaaagtattacttctggttgtgtctgtgaggtttccagaggagactggtgcatgaatcagtggactgagtggggaagatccaccctcaatgtgggtgggcactatccaattggctgggggcccagatagaacaaaaaaggagagaaaaagatttcctttctgtctctcctagagctaggacattcttctcctcctggccctggacatcagaaccccaggctctccagcctttggacttcaggactgacacaagcaacctgctgggttcttaggcctttggccttgtactgagacttacaccatcagcttccctggtcctgagacttttggacttggattgagccacgctactggcatcccaggatctccagcttgcagacagcctgtcgtgggacttcacag

SEQ ID NO: 29923 - DNA, 2300 bp, Homo sapien
caatggactgcaaggtatttggaagaaaaaaatagaactatgctaatattcttgcttcattacatgcatttagaatgatagttaaggcgagtctttattccagtatttttttcttaattgtcagcaatgcctatctgaatgccttgaatgtaatccattaggtggtcgattaaattgaattatggaagtaactatcttgacccttattttaatctctagaaatgaaaaacataatggttacaggttttcaaaatagtagcctttattagcaaaggtgaacttccttttaattttaattcattagcatagcaaaaccacaaccaacaacaatcacggggcaaaagccatcttgtatacttctatatttcaaatgcctggtgtaatatgtacctctagaaagaatgaataatcattttttgagactatcttaatgttaaagaaataagaaaatataatagttatttttttggattttttttccattaaatattttatcccagtgtttaagaatgtactcttgagccaaatcatttgggcttgaaatctgctctgtcttttactaccacacaaccttgtgcacgttctttaatcttcctgtctcctctcacattccccatctgtgaaacagagataataataatacttatcttgtggggttggtaaaaagaattaaattagactttacaagacatactatagaatgtgctagcatctggtgaaggtttgataaacattacctgctgccactgctgttattatttttttatcttgatgctgtacagtcagtgtaaactttctgtacatactcatgaacaataataatgaggcacagatgtgaaacatgcaacaccaactagaactttgacatttttaactgtgagattaatatttactattacttagaaatctgtttagaggtaagatttagagaacagttgttatgttacaaagagctattatgtgtgttttgtgcaatgtgaaagaccaattggcaagactgacgagtctgaaggatccctaactctctcactgtgtgtaacatgagaaaacagaatcacttgcaaagatgtgcagcagcattggaccttctttattgtgcctctgaaaggcaagagagtattctggggaatttcaaaatgtttccaaggaagcaatattatgagaactaccttgattttgaaaacaccataaaagattagacagtatcatctataacagtggggatctcatcaatcacgttttctgctttgttcccaggcacctaacacatagtaggtgctttataagtgatttgtgaaataactgagggtatttcagagaattattaccagcacaatctataaatgaaaactaggtcatcttgtattcatcattgaaatttaggcaaaattatactatatttctgaagaagaaagggttcaaaccgtagtaagaggaagatgttgaacttctgagtgttttccctccccaccccagcatgttatttgaaggagaggaaaaattttttaaaaaagagctgtgagcatatttcttcatttgatgctgaaaataacatatttttatttattaaacatgttcaaaaagttcagaaggtttttattggacttatgcatatacgcatctatgtcctattccaggtaaattctagtctatttaactgctgaaacaaccagcagacttaaattagtataaacctgacaatatttgtggttaatttactggtaaaaagaacattaagaggtaagaaatggcttatatttcactttcccatttactgttagaagtctaactcccactaatactatcagtattttgcagaatgcttttttcttgtttctccttccctctttactcttttgttaaatcagtggtatcagtaggacttctaatgtaataaatcaggcaatataatgttaaagcgctgcttgagttgttgaagagttagtaggcagatattacaattcactgtagctgtaatagagggtaatgtcactttaagacatgtgatactttagagcggagggatgtattgaaacagactactgctacttacagcaccgtatagcagccctgctcctacattttgctgccttactctgccccgaatgcactggagtggggatggtccatcggcaactataaactgattctcatcaggaaactgcacattatctccccatcacttcaaaggtctcgtcaggcagaggtgacgccaggagatgatttaaaggtgaaaatgacaaggtttccacccctcaaaccttggctccttttctgacaatacagtctgaatgaacccg

SEQ ID NO: 29924 - DNA, 2300 bp, Homo sapien
aagaccatgtctgaccttggctgaaaacatggtaattacagagcccaagatgtcactgaaaatgcaagacagcttgagggcacaaagatagttttccttcgaaggctgattcaagtagaggattagaagaaggctatttgggattataaaaattcctcccaaagccgtttggtggctttttttttttttttttttttttttttttttttttgagagagagagagaaaactattttagtggccaccatgtagaaagaaacatttgaagtaattcttgtgtatagagggttggctgccagcgtgattgactaaaatggtcttcagggactttcatgagtaaaggagatatattttttaacacttactgggaaatggagctttgaaagcctgtctccagcaaaagggatttttgacatgtataggctggggcctagaagtaaattttctctctcctacttttgcaacagtcttttccctttatcctggtagaaactaaagtagtcaacttcttgtcattaaaatggaactggagaaatcatcaaagagatacgatttttccttactcttttaaagcagcctaggtattaaaatatcttctgagatctgtgcagaattttcatttatactaaacaactcattttgtttgtcagggacaaactaatatgaataacaaatatctagggtagaatttttcatagaaactctttatatgttaaaagaaaaaaaaaagctacttactgcttattgatgcattcaaatcattcttaagcctgccattgccaaaatggcagactgaaccaaaccttgaattcttagtagagagggtatttttgctttttgtttttgtttattgtttggagctagcttgcttctttgttttctttctttctgtgttcctttcttttttttttttttttttgagaagacatgctacaaactaaaatttctgaattcacgttttaaatgtagatcataaatatcttcaatttaaccatgaaaaggtaagctaaaatacactttattttatgtatttatttatcttatgggcgagggccaggctgtgagccagtgtgtggtgagtgaaccccaccaaaaacacattttaaagttctagtagaactaaggtattatttgataaaaccccattagttttatagtagcagaaataaacgtatgaataatggaggtgatttttctaatatctcacaggtagttattagaagcaaagggcagttttgaaaatgtatgtctgtcaagattctcttggttatcagtgacagaaaacccaattcaaactgaatttttttttcttttcctttttttttttttttttaagaagcaggaaggaattgtagtcttatattcaagtaaagtccagggataaagcttattagtgagggaagcagactgcaagtacacgataataaaccacaggttttcttaaggcatagcctcaaatgatgccatctgtgctcagtttccatcccattccatcccatcttttggttgtgccttctactatgttggcttccttcctaggctctttgacatggctctaaacaactccaagctcacattttttctgggtttgagtgccaatggaggaaatctgtctctttaggtgagtcatgggatcagcttggtttgggttaatgggcttggcttaagtcatgttgtgttctaaaccagtgcttttcaaactctccatcatgaaggacctttttattcttcttaaaaaatacccaatctgtcatgggccgatacttttgtaaaatacaataaaaatgaattagcatgaaaataaaatgaaaggacataaaatataagcccaaattctttgtttttagacttctcagacataaaattccctgcccaattgttataaaacttcttaatgtctgtacttgttacagaccagcaataacaaacagataatcaccctttgaggagcagtactctaaactaggagtcagcaagcaacaatccactgactaagtctggtccaccactagtttttaataaagttttattgtaacttagtcacacccatttgtttatatatcatctatgctgcttttgtgatgtcatgacagaattgagtagctgtgacaatgagtatgtgacgtacaaggctgaaatatttattatctggtcttttatggaaaaaaaaaagtttgcctattcctaccctaagcaatcactgtgaccagaagatcacgatttatgattaatcaagatgaaggcacacccccacttcagaagttcatgaacagagagtagaaactagatgattctccaaag

SEQ ID NO: 29925 - DNA, 2300 bp, Homo sapien
gttcccacaatacctcatgtggtccccaacacaaagcaaatgtttagtagtgtttatagaagagccatctcatgaaggaatacaattcaatattattgttgatcccaaggaacagatcgtcaacagaggctgtaagcatcctcaatccaactagaaaaattctctaccatcctgcccgcctgccttgttaaacaggctaatgtgcctttgcagctttgttgagttcccacttgtttaaagctgtgttggtgaagttattttaatgcaggtatcattagtttgaaaaagctcttagccccttcacagaagtcttgaaaaatatcagcagcctaactgatgatgccatccatggagactggatagcttaagacagttaaattaaacataaatcaaggaggaaaagggaataaaagtgaccttctggccaccagtaatcatccttctggccactagtttttatcctctggaggataactttgctactgcagttttaaatctagaaatataaatggattgttggtaggaagagtggtaatatcctgaaggaatttgtatcgtttttgtaccaggagatcctacctgctttcccaatcacccctctacaaaaagagcttgagggctcaagtggccaaggcaagatgggtcaaagtcagagtggtggtcatggtcctggaggtggcaagaaggatgacaaggacaagaaaaagaaatatgaacctcctgtaccaactagagtggggaaaaagaagaagaaaacaaagggaccagatgctgccagcaaactgccactggtgacacctcacactcagtgccggttaaaattactgaagttagagagaattaaagactatcttctcatggaggaagaattcattagaaatcaggaacaaatgaaaccattagaagaaaagcaagaggaggaaagatcaaaagtggatgatctgagggggaccccgatgtcagtaggaaccttggaagagatcattgatgacaatcatgccatcgtgtctacatctgtgggctcagaacactacgtcagcattctttcatttgtagacaaggatctgctggaacctggctgctcggtcctgctcaaccacaaggtgcatgccgtgataggggtgctgatggatgacacggatcccctggtcacagtgatgaaggtagaaaaggccccccaggagacctatgcagatattggggggttggacaaccaaattcaggaaattaaggaatctgtggagcttcctctcacccatcctgaatattatgaagagatgggtataaagcctcctaagggggtcattctctatggtccacctggcacaggtaaaaccttgttagccaaagcagtagcaaaccaaacctcagccactttcttgagagtggttggctctgaacttattcagaagtacctaggtgatgggcccaaactcgtacgggaattgttccgagttgctgaagaacatgcaccgtccatcgtgtttattgatgaaattgacgccattgggacaaaaagataagactccaattctggtggtgagagagaaattcagcgaacaatgttggaactgctgaaccagttggatggatttgattctaggggagatgtgaaagttatcatggccacaaaccgaatagaaactttggatccagcacttatcagaccaggccgcattgacaggaagattgagttccccctgcctgatgaaaagacgaagaagcgcatctttcagattcacacaagcaggatgacgctggctgatgatgtaaccctggacgacctgatcatggctaaagatgacctctctggtgctgacatcaaggcaatctgtacagaagctggtctgatggccttaagagaacgtagaatgaaagtaacaaatgaagacttcaaaaaatctaaagaaaatgttctttataagaaacaggaaggcacccctgaggggctgtatctctaatgaaccatggctgtcatcaggaaaatggttgggagatttctcagtccctgaaagggatgaggctgggggagttgcccagaggaatccctgttcccactgatttttattagcaaaacatcctgtgtcttttggagtacgatgtgtaagtgcccattgggtggcctgttggtcactgtgcagcagtctgcttcccaataaagcgtgctctttcacaaacaaacaaaaaaaaaaaaaaaaaaaaaaagagcttgaggaagtagtgcatacaatggattgaagctgaatgaatcaaaataccaatggactgttaggtagatttgtgcctgctacactactaga

SEQ ID NO: 29926 - DNA, 2300 bp, Homo sapien
ctccaacccaagagagctgctgagtggatcgggtccagcaaagccacaggggcagggctgcccgtggcattggcaacctaattcctgctgtagcatgtccaggatgcaggacatacagagccaaaggacattattctccagctttaagacttgatgttgttttacctgttgggttttggacatactgagaaccagttacttcttttctttttctatttctcccttttggaatgggaatgtctgttttatgcctgttccatcactgtgttttggaagtagataacttgttttgattttataggctcacagctggaggacatttgaggtgggatgaatcttgagtctcatatctgatttagatggaactctggacactgggcttttgaattgatgcttttgggctattgagatggaatgaatatattttgtatgtaagaagaacatgagttttgggaggccagaggtggaatgttatggcttgaatgtctcctccaaaactcatgttgaaatttaattgcctttgtgctattggacttcctagcccctagaactgtgagaaataaatttcttggtaaattactcaatttctgttctgttacagcagcagaaaacagactaagacatgacaagaaagagttaattctttcaagtaagtgcctcaggtacactctgggaaaatatgactgaatgagttactgctcagcctaaaattaaactcctggcttcttgtcttgcatatgaactattaggtcgcattactttccactgatggatctatttttttaatgaattgaaaaaagaatacccagtggttccttttgtgtgaagaaaataagaaaaatattagccaggaaaggtcattttggtttccaatatgtggggagttcattatgatgagttctgatgaattatattgtgtagttctttctgatagcagaaggtcacatcatgccgttgggtggacgtaaggacaaacacacttaataaagttggaggatctgggagatgaacattttcaagttgttttttctgagcaacttgtgtttatacagctatttaaagccatttctctcttgttgaactaattactcaaggcccatactctcttacatgcagccccaaagtggtgagtcttcaaatttatcaccgaaagtgttctctaatcaaacttgtggaattatctttgggttatctaagagaaaaatctcagttgtgcttggtggtggattcttaattggttctacaggattctaaagtaattagacttcatttcaaaaatcatttttatgttatatttgcaacttgaatatttattaacacatatcataatttttctctgatctttaccactgggagggatgtatttaacttagcatctttacaaatggtatagtttcatgttctgtttttttcttaagatgtgtttgctttagggtcatctgagtccttttacaaatgtgttcactaagtagaaaaatccttttaggtttatgcgttgagggaatgtcaactacagtattcacaagtgttctttatattttggtatggtggattatattggaaacactttttctcttggtgtcctattaatattttttcaaaaagcaacctcatagattgtctagcatcatcttcaggcttatgtcacacaaatccaggaattcagatcttcgtgctggcttttccactgctccatgggcttgggcaaattgcatgtcttgggaatgcattatctctaacttccatttttcctgatggtcaatgaaatgggagagtgaaatttgtgcatttcaaatgatttgggaccctctgttaaattttgaatacccttcctgctgcagaaagttctttacaactatgtggtgttaactaatatgtggctaattaatgactgtagaattctatatcttttcctccctaatagtaggacaccttacaactatggatatgtttggctgtctgccacttgcctgaaactgcaggtgtcatggttaaaaaccattattttgctactggaaattagtttcattttaacattaaaatgctaattgattccttttttttttttggcctttttaacataggtcttctgagctacgataattttttggaacggcagaaatgattggttctagcaacagatgggaatttggagtcactctgaaatatatcctggaataagtgtgtttgactagaaccacatcttatgaggtccccaaggtaagattattttaacgttcacctggacatgatatctttacaaagtattgagaatttagcaaaagtgagtatcctggagt

SEQ ID NO: 29927 - DNA, 2300 bp, Homo sapien
ttacgttttggttttcctcaccaggacaagaaacccccagtgcaggaaaattggagacatggaaaacagggcttaagtaaacacgcagatctttgccagaaccatgtttgtcacacagtgtggaagcaacgaatatctggtgaacaaatgaatgtggacttgttcttctaaatgacttgctccctcacttcttccaagtcttggttcagatattaccttctcagtgggaactagcctaactactgttcttaaaaccaccatctccccagtactcaccttcttttctgttactttctttctctctataacactgaccactttctatcaaactctgtaattcacttatttgtcatgttaattgcccatctctccctactagaagataagttccatgaactcaggaacttttcactgttgtgtttccttctctatgtaccagcacttgttacagcgcctgacacagagtaggccctcagttttgctgagtgagtgaatgaatgaatgaatgctgttgagaaagagctctggaatctcctggcatgctatttcaggttttgcttggatctcccctttggccgtcacagaacttcaatgctagtctttaaaggaaatctcaaagatcaagcgcctatctccaaagcttgaattctctcttaaactggtgacatcttgataacaaattgcctttgaatgtagaacccccattttaataataagagagtaagagattgaaactgtttaacaagtaaaatgtgctatggtatgtgtggtacggggaacagaagcagaaggcctgccatacgttagttcaaggggtagagtcagagaagggtgaacatactttggagtgcagcaggggcaggatggcacataattgtatgtcaatgcagagtaaaaggaccagaagatgataagccaagccaatgacagtgagcagcatagtggtacagagcaacgttttctaactttatgcatgcaccagccacttgggcatcttgttaaaatgaagattctacttctggggtggggcctgaaagtctgcagttctaaagtgttctcaagggaccgctctacgacgccatgctttgcatactaaagagcatggatttactagttacctgtgtaatcttcagtaaacgatttaacttctctgtgcttcagttatctcatctataaaatagagatcagatgaactaatcccagtaaaatgaataccattaagtgacactgattatcagttacttcacttgcggaagagtggagggcatgactaggaatggggtgggaggagggagtcaaagaagtcttagctgaattttttttttttttttttttttttttgagacgaagtctcgctctgtcgaccaggctggagtgcagtggtgcgatctcggctcactgcaagctccgcctccccggttcacgccattctcctgcctcagcctcccgagtagctgggactacaagcacccgccaccacgcctggctaatttttgtatttttagtagagacggggtttcaccgtgttagtcaggatggtctcgatctcccgacctcatgatccacccgcctcagcctcccaaagtgctgggattacaggcgtgagcaaccgagcccggccccagctgtattttatacattaaaaaagaaaagtatttaggtattcatacgtgggccgagttttctcctctctcatacaagcacattacacgcgaagccagattagttcatgaatgtgctactgcacggggtggctaagaaatcctgcttgcaaaccgctttgggtcctgcgtggagaatggtttcgagtgagagccgaaccctaaatccgtcttccttatgtggagctcaacgcgactctcaggtattcaggaagaataccttttgctcagcacctgcggagtggtggccacagcgaggcgctcgggagaggcgcctggaggccggcagtgggggcgcgccgcctgagcaggggtgcggggcggggagaaggccggcccacgtggaccgcggggccaggcagggacaggagcagccgggcggcccggccaatcagcgcgttccgcggcgggcccggcccctcctggtcagcgcgctagctgggctcggctccgcactgctagctgcgcgccgccctggacggggcgcaccgactgcgcgcgcggctgcgggcaaacatcgggagtcctgcctcagctgccgcttctccagcagcagcttcaggcttctcccgcaggagcttcgggcttctcctggtagagacgtgggaacttttcttctcctggcgaggctgcagaggt

SEQ ID NO: 29928 - DNA, 2300 bp, Homo sapien
caggagaattgcttgaacttgggaggtggaggttgcagtgagcccagatcacgacatggcactctagcctgggcaacagggtgagactcagtctcaaaaaaaaaaaaaaaaaaaaaagcatgtggtaattatactggaaagaactaattcctgctgaaaggcagctgtcagatggaagtggcagcacaggctgggttgaataccagctctataactcagctgcttcgcaatgtaggcaaatgacttaaaattgtgtctcagtttcctcatctgcaaaatagagaaaatgatattatcaactcattaggcttgtgggtggcttaatgtacattaataatatcaagtgcccaaaaaaactgcctggaacataggaagtatgtaagatgctattattattatataaagttgttattgacaccattaatattaatgggaaattaccactttttattcactagtcaatgggtggggggatatttcatagaattacatatgttatatatttttattttattttattttattagagacaaggtcttgctctgttgcccaggctggagtatatggcatgatcatagctcactgcagccttaaacttcaaggctcaagtgatcctcccactttgcctcccaaagcgctggaattacaagcatgagccactgtgaccagcctatatttttaatgttaaacctttcttttttttttttttttttttttgagatggagtttcgctcttgttgcccaggctggagtgcaatggcatgatctcggctcactgcaacccccgcctcccaggttcaagtgattctcctgtctcagcctcccgagtagctgggattataagcacatgccaccatgcctggctaatttttgtatttttagtagagatggggtttcatcatattggtcaggctggtctcaaactcctgacctcaggtgatctgcccgcctcggcctcccaaagtgctgggattacagctgtgagccaccgcacccagccagtgttaaaactttgaacccattttcttgctctgaaatttttttccaaagatttttcattcaccctgatggtttttgcacactgagcataagagtgtgtgtaaacggtggcatagtgtgtgttgtgtgtatctataatttggataagatgttcacaggaaaaagccctgaactacaaagatgtgagaataaaagaagttaaggtagaaaaatgaaacactattaatggctaagagtataattgtgataattatttctgatgatatttcatcaaattaggcatttgctctggcccaagatgaagatccattttgcttgtatggattttatgaacttgcgtaggattgttagtttttaacacaggcaaattcaggtattttgttgcatctttgaaaagtcatgttatatccttttattgccctaaaaccttgttttgtttctactttcagagttcttacggatatggtgacctattctccgacacatggaatgcatttactgattatgacgttatacatttgaaaacttatgattccaaaagggtactggaaattttcctgaaatgtctgtgaatatttcttgagtgcagatgactcactcataaaataaacatttattatgagttcctattagccattaccactgatttctgaatttctgaatttcttttataattagaatcctcagtgttgttaatcatgcagcctttgaaaagttttttctataatctttccaaaaatatgaattctgttctctttgaatgaaatagtgtgctattcaagcaatgcaaaatggagattaattaaaatctatttctcaaaattatacgtgctatttttggtgtgaagggtgcaaattacatcttcttttaatgtatctttgttcttaggtatgttttaaagaagctgttttttcattactcccccgcatgaggtatgggctgttctataatactcctctggtaagcacattgtctaccattagcattcatatttacagacataacatttatacataagttgacagtatcttaaattataatacagaagtattcattgtaatatgaaccagtgtttttattttagatatctggctgtcaaaatactggactattcagggcatttgcccagcatgtactacacagactaaacatcacacaagaaggacctaaggtaatggatacactgcggattctgaggtgggcttgagttttcttccctaataaaaatcgataccaccttttcagaaacagaaataatcaggagaccatgtttttgtgttaacattttctggggaggcca

SEQ ID NO: 29929 - DNA, 2300 bp, Homo sapien
tacccccatccccctctccaaaggtagatgctactctgactgttaacatcattggccagctttttgaatttaaaaagtttgtattttaaaataattttagactcatagaagtttaaaaatagtatgtattatacccaagactgactaacttacaaaggaaagaggtttaatggactcatggttcctcatggctggggaggcctcacaatcatggtagaaggcaaaggaggaacaaaggcacgtcttacatgacagcagacaagagagcgtgtgcagagggaactgccctttataaaactatcagatcttgagaacagcgcaggaaaaacccacccccatgattcagttacctcccaccgggtgcctcccatgatgggagctacaattcaagatgagatctgggtggagacacagccaaaccatatcatactacaaggagaacttgtacgttgtctaattccctgagcttcctctaatgataatatctcatataaccatggcacaatgatcacaaccatgaaattgacattggtacagtagtattaacttgtgcaggttttaccagcaattacctgtactcattaaaattttatcacttgtgtaggtgcgggtatgtaggtagggagagagagggggaggaggacggggagggcgaccaccacaatcaggatgcagaattgttccatcatcccaaagaaactctcctgctactcctgtatagtcacataggttacttacataatgttaatttgtaaggtcaaatgtccataccaaggccaggaatggcggctcatgcctataatcacagcactttgggaggccaaggcagaagtattacttgaagccaggagttcaagaccagcctgagcaacatgatgagacctcatctctaaaaaagaaaaataaaaaataaaaataaattagctgggcgagatggcatgcccctgtaatcctagctacttgggaggctgaggcgggaggactgcttgagctcaggaggtcgaggctgcagtgagctatgattgcaccactgcactccagcctgggcgatggatcaagaccctgtctcaaaaaaaaaaagaaattcatgctgagcaaaccttttttttttttgtccttaaagaggcctcactgcctggctgcagatcattcagaataatgatctaccacacatttatctgggattttgcagtctgcaatgcaatgtctcaagtcacttagcagacttttacaagaggtagtttctatattcaagtgggctttttgattcctggtactttctgatatttgattccacatggtagttgctcagggcataattgtattagttgcttattgctgtgtgacaggctattccaaagtgtaccctagggtatatttatatttattacctattgttgtataacaaatgactctaaaatttagcagcttaaaatacaaacatttattatctcacagtacttctgagggtcagggtttgggagcagcttggctgagttggccagggctgtagccatctctagactcaacctgggcctggagaatctgctgctaaactcactcaggttgttgtaagcctcggctccttttggcaccatctcggctcactgcaacctctgcctcccaggttcaagcgattctcctgcttcgggctcctgaaaatggctgggactaaaggcgctcgccactacgcccagctaatttttgtatttttagtagagatggggtttcaccgtgttgaccaggatggtcttgatctcctgacctcgtgatctgactgcctctgcctcccaaagtgctgggattacaggtttgagccactgcacccggtctgttccttgtcttaacattaaaattgatatcaacctatataaaagtcagtaagttttagaagttacaggtgtccataggagtgtctgtaccatttagaggtaaaatctgcctaatgaacagatcctaagttacagtgttctaataggaagtttgggagaatcagtttgaagtcatgtcccaattcataatttcaggtttgctgagctacaaagctatactcagctcaacttcagacctatagaagatgctaaatgtgacattgtcattgaaaaaccaacatatttcatgaaattagatgcaggtgagaaataactttttctgttatttgtgtatttgttaatgagatattattcctttttttggatgtagtaattctctctgaattttttggaagcagtatgacaaacagtagatttgttttttttgctttcttctctgaagaagtagttgaactaatttgaacttcc

SEQ ID NO: 29930 - DNA, 2300 bp, Homo sapien
ggaaacaaacttgtttccttatgatcatattatttaacttctggtgactatattcatttgagcatgtttattttgaagtcatcaccttcatataatcagttcaactttagtcactatttaatgatcaactctactgtgctgtagatggaatactaggcctgggggagcttagaggaaaagacagtgggggatgggagttcaaataattataagcagtaataaagtaaattaacaaaaccataaaaattaaactccacagagtagcatttgaacttgatgagtttacggataggtaaaactatactgcttttaaaatgtgtgtggactccaaagtatcctcaccatcacaaagtgtattcggtgaacgatgttcagtccccaaatttggaagttagggcggcaacttctgcttgaaataagacaaaagtaaaaatccacctcagtgcaacgcagaagacacgaagagtcaggttttctacccaccccgtcctaacatcctctgagcgctttaacgctctcgctcaaggaggcgcgggctgctgcgatggagatgggcgtccggcgccggcacgtgccgtcggtctttccggccctggtgagggagctggcggactcgcgcgaacgttcgcgggagaacgccaggaagggcagatggttcctcgactctgagcccctccctgctgcgctcgccgggtcgaggccgctcgccgggctgaagccgctccgagcgtcgggccccgcgccctggccctcctgggtgtagtcccggtcctgcctctgcggggcccgagcccgcccacggcgccggctggccaaggtgtcccagctgctccttggcgccccctggcccagctcccgcgcccgaggtttccggtgagcggcagtagccggttatgacgactccctcctctggaacagccgccgtctcctccgcctcctcctcggtagttcacggctgccccggctccaggtgggactcccccgcaatctgcggagccttcccccgctctccttcccgccgccgcagcgctctgcgctgttcttgcccgggtggtagccgctcccggcgcggcttcccggagggctatagcctacgcacgcactccgcccgcgccttcccattccctgcgggccgggaggcgggcgtcggaagccgatcctggccctccccggccccgggcgcccggccccttcccagcgcccggagcgcaggcgggccccgggccctagccgcgttgaccaggtttccagccggggcggagccgctccccggggcccctcccaggcgcgctggggacccggggcgccgcggtgcacggtggcgggcggccccgggagatcaccgaccccgaagcaatccctggcggcgcccggggtccggaaccccagcgcggcgtctcagccgcggcggggtgctcgccactgacccctcagcccttggccgggactgacgttcaagcggacagctgggctctgccgggactgacgttcaaggggcagccgagcacttcctgagccctgcctggcacccgccgagagactttttggcacaagtaggggccagccgttgaggtgtcattcggggtctcacgtgttgaactttccatttgcccactgccgtctttaaacttttccaagctctctctctctgcgacattgccccatttcgcccgctgtgtcaaccccaggttttgcctcctatccatcatctttcagatgtttcccttttttccttcctcattaggcctgtggaaatcgaatcaagggtttctggagtggagtgattccagctgctttgagctgaaggaaaagtagcctggccagtaaagcgtccgtgtgctggaggagtgcagccacccatcccggcgggccttgcaggacgaccgacaccaggaaggctttgtgccaggcccagcagccacccccagccgccttatgcaagtgggtacatgccctcgccagacgccagctttctgatctgcgtctttagattttttccatcgcctaagcgttacttctccactgatcggtgagtttagtgatggccagagctcactggaggacaatggacttggataaccaaaggtcagggcttggtcataacaatgactttattaccgggaaggacgagtcaaaaaataggaaggcctgggaaccctcaggctcgccactctaggtgggtagccctgtgattcagccagtgggattactgctgtgagaatgggaaagttgtttgcttctgggaatgtttgatccactaagtatcctgttggccagttccagtggatgcctgtagaaag

SEQ ID NO: 29931 - DNA, 2300 bp, Homo sapien
gtggtggctcacaactgtaaacccagcactttaggaggccgaggctggaagatcacttgaggcccggagttggaaacaagtgctgggaacatagcaagaacctgtttctacaaaaaaaataaaataaaatagtaccatgcacatgtcatactgattttaacctttttgtatgtgacaaaaataggatggtagcaagtaggctgaggaagctttttttttttttttttatgagacagggtctcactgtggcccaggctagagtgcagtgtctcaatcatggctcactgcagcctcaacctcactgggctcaagcgatcatcctgagtagctgggactactggcatgagccacagtgcctggcttgaggaagcattttaaaaaattactgtcattagtgtgggatggtgaagtatgcaaagtataaaataatagagcagtaattctgttataggaaaggggtcccaatccagaccccaagagagggttcttggatctcgagcaagaaagaattcagggcaaagtgtaagcaagtttgttaagaaagtaaaggaaaaaaaaaaagaaagtaaaggaagaaaagaatggctactccatagacaaagcagccctgagtgctgctggttgcccatttttatggttatttcttgatgatatgctaaacaggtggattattcatgcctccccttttaagaccatatagggtaacttcctgacattgccatggcattcgtaaactgtcatggcgctgataggagtatagtagtaaggactaccagaggtctctttcatggccatcttggttttggtgggatttagccggcttatttactgcaacctgttttatcaacaaggtctttatgacctgtatcttgtgccgacttcctatctcattctgcgacttagaatgctttaacggcctgggaatgcagcccagtaggtttcagcctcattttactcagctcctatttaagatggagttgctccggttcacatgcctcttgacagttcccttagaggcaaaatcttttcaataaaaagaataaattaatactgtaaagtgctttaaaacaatgtttggcacatgttaaacaccacatgttcttgctgttattatttgaaaaaaattccaggtaagattcctaatttagcaggtcactaatggaacttgtaacaattcttaaacaacattacttttaaaaattacgtaaaaagcatgtaagcctttggaaacaaacttgtttccttatgatcatattatttaacttctggtgactatattcatttgagcatgtttattttgaagtcatcaccttcatataatcagttcaactttagtcactatttaatgatcaactctactgtgctgtagatggaatactaggcctgggggagcttagaggaaaagacagtgggggatgggagttcaaataattataagcagtaataaagtaaattaacaaaaccataaaaattaaactccacagagtagcatttgaacttgatgagtttacggataggtaaaactatactgcttttaaaatgtgtgtggactccaaagtatcctcaccatcacaaagtgtattcggtgaacgatgttcagtccccaaatttggaagttagggcggcaacttctgcttgaaataagacaaaagtaaaaatccacctcagtgcaacgcagaagacacgaagagtcaggttttctacccaccccgtcctaacatcctctgagcgctttaacgctctcgctcaaggaggcgcgggctgctgcgatggagatgggcgtccggcgccggcacgtgccgtcggtctttccggccctggtgagggagctggcggactcgcgcgaacgttcgcgggagaacgccaggaagggcagatggttcctcgactctgagcccctccctgctgcgctcgccgggtcgaggccgctcgccgggctgaagccgctccgagcgtcgggccccgcgccctggccctcctgggtgtagtcccggtcctgcctctgcggggcccgagcccgcccacggcgccggctggccaaggtgtcccagctgctccttggcgccccctggcccagctcccgcgcccgaggtttccggtgagcggcagtagccggttatgacgactccctcctctggaacagccgccgtctcctccgcctcctcctcggtagttcacggctgccccggctccaggtgggactcccccgcaatctgcggagccttcccccgctctccttcccgccgccgcagcgctctgcgctgttcttgcccgggtggtagccgctcccggcgcggctt

SEQ ID NO: 29932 - DNA, 2300 bp, Homo sapien
aggcgcctgccaccatgcacggctaattttttgtatttttagtagggacggggtttcaccacgttggccaggctggtctcaaactcctgacctcaggtgatccacccccccccgcccccctcggcttcccaaagtgctgggattacaggcatgagccaccatgcctgaccatgtttttgtttcttttaagtgaataaaacttcaaacaaaattaagtacaaatactaaaaaagtaggtgctagtattttaatatgagaacatgtatgtgttctcattctttgtttttgacttagatatggcagttttctgttcaaatgttttttggttacttatgtgtcactgagttaagttttcagtaatctttctagctacatattgacaaataagttttattataaaaccatacggaataaatttataagctctacctgaaaagttacaggtgtagcttacaattttgaaagtgaaggaactaaaatttagcaccatataggtgctataataattctcaaagtagcattgtaagaaggtgactctatctgagagctgaataaatagttttagatggtttaggtaggtcatttcaccaaagctgtacaattagaagtcttggaactgtaactgtacagctaatttcaacccgaatctgccccaaatctcctctgcagactacttagctgtttgaaagtacttgagttacttggtactacttgtgtacatgactaaattgttagttttaacatgcaagtttttactgtagttagataaaattattggaagatgattataacttcttaaggggttcaatctgattttttaaaagaaaaataattcttttttgcagagttccttgcagtggggtaaaatattcaaatatgggaggcaggcatataaggtaaataatcacagcagggagggtgtaataggatgagtgataggggtctgtggcaaactggagtgagtgaaaattatttggtgaccactctggctgactattcccatgcttggtattcatatttttcaaaagcagctggaaatctagatttttgaatgaaatctggcttttagttaggattttgtctttaacttgggcccaaaccaaatatagctgcagactggattaggaaggccaccaatttaaggtattttcccatgtccaaatgttcgaagagaatgcacacagaaaaggttatgttttaagtaatatgcacagtgcacattgttaggataacagctttagtgcttcctaggtgtcttagtccatttggactgctgtaacaaattgccataaactgggtggcttataagcagtagcaatttgtttcttaacagttctagaggctgagaagtccaagataaggagccggcagatttggtgtctggtgagggctgctattctggcttagagttggtgccttcttgccgtgagctcccttgggcctctcttataagggcactaaccccatttatgagggctccatcatcatctaatcatctcctaaaggctccccttaatactgtcccattggagattaggtttcaacataggaatttgtgcaggggacaccgacagaccacagtattaggggtattttgactgcagcaatgagtttactactattttgagagagaggttgtgctttatgcaccatgtgttccacgagttggacacagtgttcatacgtgatcctgtcttttaggcaagcccaaacaagtgtttctccttacaataccaagttaatacagagcttattaaatatttgagacaaagggctaagagaagtgtgaggcccaatttccctttgcaattattgctggcaaggtgcaagcttttagcacgtgaactattttcctggaaagcacacacacgaaaacttgaatattccttccggggaaatcgacctctatcggtagccatagcttccccttcgctaagaactgctgtaagcacgaaatcgacatcaatagaaacccttccgcgttcctcggtaactaacggcaaccctgcgctcccggatgtgacgtcaacgttcttctgttcttccgtctgtcgaccgaactctgggctcgtagatttggttgctgtgtacgtggaagaagcaagcgcatgcgcacatgggcccccttcgtctcagctgtgcgggaacggccgagggtaacatcccgggctcgcgggaggctgtcggggtaatggccacacgctgacagaaccagccgagtggaaaaggggagcgaagccgttcctctgcacccttccccaggcctgaggccttcccgcttggtgctgccgccgccactg

SEQ ID NO: 29933 - DNA, 2300 bp, Homo sapien
ttattattatttttagagacagggtctcactatgttgcccaggctggttttaaactcctgggctcaaacagtcctcccacctcagcctcccaagtagccgggactacaggtgtgggaagccgagccctgcttgatggggcttttataatgggactggtgtgtctagataggaccattcagactatctgtctgtttaaaaaccatagcagatagtctaattgtttatgatatgttccatttgaagtaaaataaatctgttgaaggttttgcttgcatgtctctgttgctttcattcctggcaagggcagatggctatttctaatccgtcaatcaatctaagccagtgagagtgcctggtgtcgtttatcaaaataccaccatggtgagtcaggctgttagtctcaaagcaagcagatgcagggccagatacctttgcagacttcttcatcggctagctgtactctatccctaggcctcagtttcctcccctgtgaaatgggtgagactggactaggtggcctttaaggtgactgctgcttttcactatctgagagggttgcaatgctcactaccactaatcaaagggtatccagtattgttgggggttcaggctacaggagcccattttgataagcactgaggttaaatcctcagtgaaaccatctgtggagttgtctgggcaagaaaaagtagtttcatagttgacgctgagacatgtgatgcagaaggaggctggtatctcttgatagggactgtgaactctattcccacgctcactgcctggcattgactttcagctcagtgaatgctattgaactgaacctaattgggggaccataaaggacaagctttccttaaggttcactgaaaactaggacaagaggaggttaaatatcacagtgtagtaacagcagctacatttactgagtacccatcaggctttatgtactccatttcagtggccctcaaactttaccagtggagaatcaccccaggctttgcagaaggctgaagggtggggtggcgggggggcggtggggagcgtggtgggggcggtgaggggtgaaaatttgtgttaaaaaaaacttcccaagtgatgttgatcaggaactgtattttgagagccactctggattttacttaattatcagtcttacaaggtgaatagtgttatgcccactttataaatgaagaaatagaagtgtctaagggtttcgtagctcacaactgagaagaatttaaaatcagttacttttgattccaaatatcattcttgtcccactccatagaaggagatgtgtgtgtacgtgtatatacatacatttttgaacatgatcatttccctctatccagccatccagattcacagtgtatatttgtatttctgactctagaagaaaataattgaaacttttatcacaatttatctttaggtgataggattatgggtgttctcagttattctttgatttttgtgattgttttcctttatacttttttctttgtatctaaatatacacatttatctcaggaaaagttttaatcattttgtttccgctgaacttatctaacagaatgtgacatgaaaatattaatgctgatttgttcaaagaaaataataatctcccaccccaccaatgtaaacggatttagataaatttattattcaagtgagtacttataaaggcaaagactttggaaccatcctgaaaagcagaaagtgaaaatttccttgatctttgcccccagaggaaagctctggcatactgggagggttcttcacgaatttttcatagaatataccaatattttgtataattacgtattaacatatagtttgtgtaaacgcataatgtattgtctacattttcacgctgcagagcaacattatgcacggtataagattcacctaattaagcgtaggtaattaagattataattacagggcaagactttaaagcccatgggagcccagccgcagtcaacctcgcacctccctgccggttgtgtttctggcctcgcccctccccgcttcgccagccccgcccctccccgctttgccagtcccgctcctccccgccctgccgcgcgtgggcacctgggaagaggcggagaacaatatggcggatggcgaggagccgtaagtaccggggctctgcagacgcgccgggctgggctgggttgtgagagagcgcggcggtgggcggttgccgccgccacccggggtccccacaccccccgccccgtcccctcgcccccctcccctcgcggcgcccagtgtgtagcgcgatgctgaccct

SEQ ID NO: 29934 - DNA, 2300 bp, Homo sapien
aatacactcttgacagcttttggtcatgcagttctgagcagttggaagataaagttcttagttacagcttctaatactcataaatctcaccaacagtgtggggccccactggagttcccactctcatcttgaccaagatgatttactcagcttgcccacagtgctgcctcttgacattctgaagccctggggaattcctccacaccctctgacttcctgtaactgagcactgaggctcagtgcatctctatttagcactcctcttactgtctcatatttaactagtgtttccactggattgcagaagttttgaaggcagagcaggattacatttttctcctctttaaaaaaaaaaagaaaagaaaagaaaaaaaacccacagtgctttcacagagcctcaaaagaactcgaaatacttgctggcattgtactgaatattctcaaccttttccccctacccagatacatccacaacaataaagttggagcaaggtagagaaaagttagtagatgtttataatgaaagcatagaaaacaaatcagattaaagcactattaatagcaaacaagaatcgtgggctatcctattgctaataacaataatagtaacatataactgtgaacctttattatacactaagcatttcctatacattccttcacttagcctcgtctatatggcagatgttccattatccccactttacacatgaagacaccgaggctgggagagattaagtagtttctccaaagtcacctgccagagaggaaggagctgcgactctaattttgctttctctgacttcacaccatcccatttttccagaatcaagaaaacatgagcactcaggaatattttcacattttaaactttattcaaaaagcagcacataagatatatcttagcactaattccatgcaatcaccaaattttcctaaacaacagtagtagtagtaatttcttagagtcgctgtaagctccttaactgtcttctgaattaataaggaaaattaaattatgttttctagactttgcattagtatatttcattactttccaagttttcaaaaattggtgatctgagtagagtgaattcaccttgtctaagccacttaggggcttagagactctgttatcttagaaatcttcaccttagaattctacctattacattatacaattaaacaaactactttttttctcatgcattgtaccaatcagccccttaactgaaaaaagatgacccttggaagcttagaagagaattgacaacgaatacttcttttgccaggtctttgggctgggatacaaaacatcacgttatctatgaatatattgtggtccctcagtgaaagctgtcaccaaatattgcaataaaactaagaaaacttttgaagtggaatgcatatttctgcccagaaaatgctggatgcagaacaactagttcactgcagacaactgtttgctttaaaatgtaagcaacatgcccagctcaggactgaagtggccagagtgcctactttatcagaatggcatagcagtccaacaatttagcctagagagaacagaggtggagaacaaagaagagaagtgaaaaaaacagaccagcccttctgttctacatgaccttctttcccgttttgccaatctgatttcacacatagtgactcatggtgaaacagagaaaacatgggaattgcattcagatgtgtagaggttagtaagacttagttttcaaaagcagctcattctccattaacactgtagtcgccttccatttcatttcacttagattggcatctgcacagctgccaaaatttttctctaagtcagagaacacactcctaggtaaaccttcaaaaaaggtatttcgaaggaggcagcttctctgctgctagagaaggcattgccacctcccttcagacaggggatttccgctagttgctttctgtcatttcgtctctattctgcactcagtcccttgttctgtctggaggttcctgttttcctgtacccaaccaagagccaatgaagaagtaaagaggagcaaacacgcccgcccactcccaatttcctttgctctgctgtctgccaaccgcaaagccgaccgagacggagccgctgtcaactctccaactcagctcagctgatcggttgccgccgccgccgccgccagattctggaggcgaagaacgcaaagctgagaacatggacgttaatatcgccccactccgcgcctgggacgatttcttcccgggttccgatcgctttgcccggccggacttcagggacatttcca

SEQ ID NO: 29935 - DNA, 2300 bp, Homo sapien
gaaattctaggccggtgcggtggctcatgcctgtaatcccagcactgtaggcggccgaggtgggtgaatcacatgaggtcaggagttcaagaccagcctgaccaacatggtgaaaccccatttctactaaaaaaaaaaaaaaaaaaaaaaaaaaatacaaaattagccaggcatggtagctcatgcctgtaatcccagctacttgggaggcaggagaatcacctgaacatgggaggtggaggttgcagtgagctgagattgcaccattgcactccagcctgggcaacaagagcgaaacctcatctcaaaaaaaaaaaaaaaattctagaaagcccctatgcatttgtttgtatagccacagtattattaaagtcaggaatttcaaaatgcacagtaagagggtttttatcttagatatacaagaagaaaagatgatccaatttcatagcttatggcctcaatacacaggttttgccaaaagaggtgaagcagttcacattatgctttttctaccacccaaccctaaagatcttagttgcagattttagcttgtttttaaatgtaatcataatttacaacatttatatgttacatttttctgttattacccttccagaattgactactggccattagtaattacaggtatctttttttttattagtttctccaaatttattggattttatcggcagaattcaccttgtagaaaatggaatgggctaacatgtatataaaactgggctaacatgtatataaaactcgtgccaggtttaaaaataggatcccactggaattgttttattctggctgcaagttaataaagtattcaagctttactaaacagtatttgaaacagctgaagtgtttgcttcactgtttatagggtcgtcgccaagtttctcaggtatttaagacagatgtgcattaaataaagtctcaccaaaaaaacctttaatcaattttattcttcatatgtgggtaagggtacagattctagaccatgtctgtgaagtcatggtgatatcactgtgctaaagatcatggctgtaggttggctgagaatttaaaatgcaagaaaaatcagaagcagcacatcattgcttcttattctaggacatacagagagtttcttcagtaagtaccactccagttgtcttcacaatttaatgctacagaaacctaaatgtttctacttcagctacgaaatcattcaattggcaggcaaaacattttttattacctatttataaaaacatgagaaagggaggaaaaataatagaatgtataaactcatgctatcataattctaatgtctagctataaaggcatatggttgtaacaattgctatctaaaattttttattagctgcagtagctgcattccattttcattaccattttttaaagtctttttgcttggtcatctaaagacgtttttcaaatttcaaaagatcagctattattgtcctccttgtgcccctaaggaattaataaaatgcacattcatttccttctttctaaatgttccagttaaaaacgaaacaatgcaaaaatggcaaacattttcttggaccatttttttcactgtaacaacaaaaaatgtgcaaggtaaatagaactcaagttttgttttattttttgtctgtttgtattttaataagtccgtccagaataatacaggttacatagctgtaaccatcttaaggaaaatgacattaagtttgcaacaaatacttgctggtgaaaacacattactagcatttcaaaaatttacaaaaatgtaacaaaatatcctaaacagctatctttatatttgtaaaggaagtatgaacaactggcttaaccagtttccactgcacatcaaacaggtggcaaagtgatagagatcatctttgatttttaagagaataataaaaactaatttatatcccacacattacaattctaggggattaggaacaggctaacacatgatgtcatctactttaacagccttttcatttactcgtattgtcttgatactttacaatgattttttttttcctataagataatcgtattgttgctgtaaaagccgtaattcttttattttttttaattcccttaaagaaatcgtgtgatccatttcccattagatttcataaacacacgtgaaacttcagacacaataggagggtggtggttttctttcggtttctgaggtcttctctctgaaacatcagagctgataatagttcggcctatacatgcatgctgccatagataattgggtggtacgtgcacctcctgtttcaaaa

SEQ ID NO: 29936 - DNA, 2300 bp, Homo sapien
tgaaatgttggaatggtaacatgtatatctgtttgtttgtttttatttatttattttaagatggagtcttgctctgccacccaggctggaatgcagttgtgtgatctcagctcactgcagcctctgcctcccaggttcaggtgattctctgcctcagcttcccgggtagctggggctacaggtgcctgctaccacgcctggctaatttttgtatttttagtagagatagagttttgctatattggccaggctggtcttgaactcctgacctcaggtgatctgcccgcctcggcctcccaaagtgctgggattacaggcatgagcacggcgcccggccaacatgtatagtatttgtaaatatttaatataagtagattggagatgggtcctagtaggttggtgcaaaagtaattgtgatttttgctgttactttaatctacatataaaaagtatttaatttcttcgtattctgtgacctagcaatttcactttttagaatttgttcaatttactctaaagaaataaacttgtgtgtttataaactatttaggtatagggatatttattaaagaactatttgtgcttgtgagaattgaaaacattctaaatatccaacaattgaggattggttatacaaattatggtacatccatataaagaatcctaacagagggcaataaaaaattatttagtagtagagtacacagttgcctagaaaaaaagaatcctgactttctcagtcaaaaaaacagatgagaaaaaatgatagagtttgtatgcctaaaagaaaggactggaatgaaaaaactgaaatgttaatagtggtagcttcacagtgaggtaaggggaagattttgttctgtgcctttctatgttatcctaactcttgtacaatgaatgtatatttcggaataagaatatatttacgagccaggcacggtggctcacgcctgtaatcccagaactttgggacaccgaggcaggtggattgcttgaactcagaaattcgagaccagcctgagcaatatggcaaaaccctgtctctacaaaaaatacaattagctgggtgtagtggtgcatgcctgtggtcccagcttgatcctgggaggcagaggttgcagtgagctgagatcgcagcactgccctccagcctgggtgacagagccagaccctgtcttaaatatatatataataaaacttgtatattatatattattgtaccctttgtcacacaaataatggcatgtaaaacacactgttttgtactttgctatattgtgtaaccttgtacacacgttgtttcacccatgtaggggtatatctgtaggatacacttctcaaagtggaattgctgggtcaaaggaaatgggcatttgtaatttggacaaatgttgcatattgccccttcagggtttgaaaacaaaatcttctcatagtttcttttagtatattagtggtctggatttcttttttaacacttcactttagagccattttcattgatattggcttaatggatacttaataagaaaagcaaataatttaaaatattaaactcacttatagtggaaatccaagtgctggttgtccccatctgttagatcacaggatctagatgcaaacaggacatcttgcaaaggttcggcttacacagaggatgagtgacatagcaagacctctgttccactgtgcaccactttatttgcttccacactcaccttgtagggaagaggcagaccctaagagcttgatttctaccttcaagtgaattctttacttcagaaacaactcaggttgctggttggatttcccttctgaaatattgtaagttgctttaatatttaaataaaaacaagtggaatcccctggagtattggggtatgtatgtatgagctgcatgaatttgtgtatggcaatatgatggcatataggaagataattaattttattcctgcagagattctgtagtctctgctagtctctggcaaacatagcagctgtactgaaatgtcagatggatttgcgcagctgactcaagttgccaaaaagagagcagcatagttgttccataaattgaccccatccagccaagccctgcttaatatagatccggcaagagcttagctgtgatcactcctagctgctcagcaaaccactgaggttcctgggaaaaaaaaaaaaatatctcaagggtgtgttaacttgggacactcgttaactgggggaccttcttgaggcttttttccttctttttaaaaatcatctttgattattcttcttttctagtaaaataatattta

SEQ ID NO: 29937 - DNA, 2300 bp, Homo sapien
aagactcagtctcaaaaaaaaaaaaaaaaaaaaaaaaaattaacttctaattgtgttgtcaccatgctgggaagtagacatagtgacttaaagctgttgttcttagtccagggaccagcaaacaacagtccagtggccaaatccatcctgctgcctgtttttgcgcagaccgtgagctaagaatggtttttatatttttaggtagctggtggtggggggatcaaaagcaataatattttacaacctgtaaaaatgatatgaaatttagcatccataggtcattttcttggaacacagccacacccattctcttacatattatccatggctgcttttgcactgaaagggcagagctgagtagtcgctctagagaccatctggcccacaaagccaaaagctatttagtattctagactgtttacaaaaaaggagtttgctgaattatacatccatccctgttcaccacaaagatttgatcatctaaggactgttttgaatgttcaggtgcctacataaacagctctagttgctttgagtctttttattcagtgtactctttattaaaagtcctttttttccctacatatttgtgactcagaaagtcagaccatatgtgctcccgctgttttagcgggttttctttgtggtttagtgaaccacaaagacactcttcctatctttctccctattttccctttccttgggcttctagtaagttttgtatctgcttatgacaagtttgccagagatgttgagagactcatcatttcctgaattcttctttttatcatcacagagaaatgctgtccacacacagcagcccttacaaaactctggagaggcggccccagggaggacgaagcatgcccaccacgccagttcttacccgaaacgcctacagcagcagccacttggagtaagagagcttctttctcattgctttagctgtcttgatttttgctttgaggttctgtcttgctttattgtgttttttaatcatttcaagtgactttctgtagcaggaccttgttttatggttttacattttctgctaacttatggtttcaaatatgttggcaaagaaaatgtatttgatttgttcaaatatacattagatttttagtaccttaatttccccagtcacatattaccattcattattcaatggtgaggatgaagttagtaacaatagcaacattttgaaatgtttgtgagtgctgtgctaaatgttttatattcactggattatttagtccctacagcaagccttttgtgaggtagatattatatattgttttcatcctcatcttacaaaggaggaagcaagattcagagaggttaaatatctggcctgagctcatacagctgggaaatagcagtgccatgactcagcccagccacctctgacctccactcgaatgtaccatatcttcatatcctctaggaagacaggaccctccaaagacacgttgggttttttgtttttgtttttgtttttttttccaggctgtgatgcaaactgtgcatcctcagtctgtgtctttccctaccctcaaggaaggatttggcttgcgcaactaacagaagccagctcttttctcattttgaccatggtcaaaatgaacctacatgtgagccaacagatttggagaacaatggattctattgtgcagtcagctttggcaactcaaagtcctattgtaattcacgagctattcagtcattcagcatgctattcttttttcttatttgggtcctccttttcttcttggtgttgagaagtttgcctttctcctctttcagacccgaatcttcatctcagcactgccgccagcggagtggaagcctggagtcccagtcccacctgctctccgagatggacagcgataagccatttttctccctctccaaatcccaaagaagcagcagcacagaaatcctcgatgacgggtcttcttatacaagccaatcaagcacagagtattactgtgtgacaccagttaccggcccctattacaccacccagaccctggacactcgcaccaggggtcggaggaggtcaaagaaacagaatgtttctacttcaaattcaggaagcatgcccaacctagcacaaaaggatagtttgaggaatggtgtttactcaaagagtcaggagccaccgtcttccagttactacattgccgggtacacaccctatgcagagtgtgacttttattacagtggtggttatgtctatgagaatgacaccgagggacagtatagtgtcaacccttcctaccggtcctcagcccactatg

SEQ ID NO: 29938 - DNA, 2300 bp, Homo sapien
actaaaatgattcgtcccatctaaatctcactgtcaacttgtgactctgaagcatgaccttccttcacactgatttttcttttccttgcttgcttgcttactttttaaaagaacacttgaaacaactcttcaaggaccatcttaccttctcttctgctcagaaaaatgaaatttttctttgggtgtgtctgggacgttaagcattttatcattacccccaaaatgactgagccaggatgcaaaaaggcacattttattaccaggttctgtttgatgcccagaagaatgagaaaatgttttccagtttccttttattatgttgagaaacaaggagaaaagaaataaactaccatttaatagcagctttagcttaaaaatcctttgtcccttagaaaggaaggaaacatcccttgtataaaccttccctgcccttccctcatcccctaggttctcaagactcagaagttagtgaagagcaaaagagagaaaaaatccttgaactaaagaagaaggagaaactattacaagaaaaacttctgaaaaaagttgaggagcttaagaagatctgtctgcgggaggctgtgagtctgctttttggggctcatcaagttgtgtttgacaactttggccagtgtcaattatctgctcttgattctgtcctgttttacaggagctcacaggcaaaatgccaaaggagtatcccctgaacataggcgagaagcctcctcaggtcagaagacgtgtgggtactgcgttcaaattagatgacaacttgctgccgagtgaagaagtatgaacaacgcctctgagcctttcaattaatcataagacaggaaagctgtctgagtgtagtggacattttcctttggtttttgagtctctgctgtatgttatctcaccagtacagatggatcgtgtagaccaaattgaactctttctttcatgcccactccagtcaaaattgagttacttctcactaatttactccccaaatcataggcattcagtgaactccaaatgtttctcatttgagagtcagcattataagaattaagaactccagcattaggtttgtttacttaaaactaaataatagcctttgtcaaatagtttagcctctctaaagtctcatttctcaggcctcagttttcctcatctgtaaaatgggggtaatgattggacttccctccacgggatccaatgagtattaaatgagataatacatgcacagcactgagctacaatcaagttaaaatatttgttagccaatatagaatgtataatactttctcatttgcatgtcatcagccaatataaccatatctatgtttcttgtagaaatttgaccatcttagctttagaaaattgtatctgttttcatctttggaaatctttactatttactgagtgctcactgtgtacccatctctgagctaagcaatgcacatatactatctcatttaatcctcatcctacttcataaggtaggtgttatcttcattttacaaatgaaaaaaactgaagcattgaaagatgaagctgtgtatccagggtcatgcaaccaggaattaccaggaagaagatcaaacccaaatttatctgtctctaaagctatgcatataaatataatcttctgcatccatgagctttgagttgagaatatatctgtgaaaactgtgatcttctcccaaccaactgaatgaatgaaaggccattcccttccttgaaaagggaagaggtttggactaatgagaagttgaagttaagacgagtaaaggaaagtgtttgacaaggatgtctatgcagtaaaagttgggaagatagtgttctcaaagaacgtctgattcaagaaagtgcacaggaagttttattacacaatgcatgtaagagttgattgtatgtgtccataaaaataaaactatcattgtataaatgcaggatcctgctttgcaagaactggagagtaattttctaatacaacaaaagctggtggaagctgcaaagaaacttgccaatgagccagacctttgtaaaactgtgaagaaaaagcgaaagcaagattacacagatgcgatgaaaaagcttcaggagattgaaaatgcaataaacgaataccgaattaggtgtggaaagaaacccagccagaaagcaacagtgttaccaggttagtaataagtaaggtttttttttttgagtcccctactcagtacttcatggtatatagcatttccaaaccagttaccagttgatgagagatcaaaggaagaaccaggtgatcaaaactaagttttcttttttat

SEQ ID NO: 29939 - DNA, 2300 bp, Homo sapien
accccacacttggttgctgtttctttaaaatcttatcccatttattccttaccacttgtgatggctacacatccttagagtttctaactaaatgtttttgtataatctctaatttgactgattctttatcagcttttgagttcatgtgtatgtgtttttaaacatgctgtttatccagaaagagattacttaggtctgaattgttttgttgtaaaaggagaaaatcagaaacttggtccccatttgcgtaagagtttttgcaacagaagacaggtaagaggaacatgctttgttacaatgctgctcgcagggtacattttgcatcatgctgggccagaggggaattatttgagtgctttctttaatctttcaggatttcagtttcaagaagaacctttgggcaaagtggcttgtttgtgcaaacatggtatgctaactcttctctcatcaagtccatttgggtaatggcaattagtcagcatcagttttacttggaccggaagcaaagcaaagtaagtaactggcatcatttctatagggacagattccccttttgcattctgttcagaagataagccttctcacaaaagatgcaagcacatatatttttgctctctgagatttttttgcgtttaacttccaactatttcaggttttttatatgtttacatgatgggcaatatataagctgctttaaaagttgtaagactggccaactttttggcatgcacgtttgtatatactggtgacactgctggcggtgatgttgccggtgacacttcaaagttagtaactgaaccacaccatgagaaaatcacgtatagttattaaaacattttaactacttgtggggtttttgttttgttttgttttttggtctgaagaatgccacttgaatatgtgaaaattctaaattatcctctgtgttgctatttttattgtatgttaacttaattgtttcattaatttgaagtatgtttgagttaattctgtttcattgttgtatgcctcttaggcaaaaattccttcagccaggagtttagatgagattgcaatggatttgacagagacaggaacacaaagggcctccaagctggtgacactggagacgaaaagtcagttcatcatggcaagtaatggcagtttaatctcctcaggtaacatcttgggattagagaacgtgcaagccatctttatttcgtttgttttttcggtcataaaccacttcgaaattcatcttttaatccattattttgggaataaataagtatgtcaataagtatgtatgcgacagctttgaataaaattttaaggctaattttttaaagaatatgtagaaagtcaaattataaataggttgtgcatgtcatatgagatgcaaggatggtgagtaccaaggtgtggcttgaaagaacattttccacagcagctgctttttccagcattcagtttttgatacagataattgtctaattctccatgcaatataaaatgctatacaaacatgattacaagcatacccctcaaatgtggtagcttcccctaagcccttcctctgtaaaaattctggaatcccttatcattaagtatatgtaactttactaaaatgattcgtcccatctaaatctcactgtcaacttgtgactctgaagcatgaccttccttcacactgatttttcttttccttgcttgcttgcttactttttaaaagaacacttgaaacaactcttcaaggaccatcttaccttctcttctgctcagaaaaatgaaatttttctttgggtgtgtctgggacgttaagcattttatcattacccccaaaatgactgagccaggatgcaaaaaggcacattttattaccaggttctgtttgatgcccagaagaatgagaaaatgttttccagtttccttttattatgttgagaaacaaggagaaaagaaataaactaccatttaatagcagctttagcttaaaaatcctttgtcccttagaaaggaaggaaacatcccttgtataaaccttccctgcccttccctcatcccctaggttctcaagactcagaagttagtgaagagcaaaagagagaaaaaatccttgaactaaagaagaaggagaaactattacaagaaaaacttctgaaaaaagttgaggagcttaagaagatctgtctgcgggaggctgtgagtctgctttttggggctcatcaagttgtgtttgacaactttggccagtgtcaattatctgctcttgattctgtcctgttttacaggagctcacaggcaaaatgccaaaggagtat

SEQ ID NO: 29940 - DNA, 2300 bp, Homo sapien
tctaaaaacaacatagtgttcaaactcgtagcttctagtaggtgccacatagacaattataaatactcattaatgattattattatgcttatataatgatcactttagaacacattctagttccatactcttaattgtattgcaagacaaataaagctcctctttttttttttttttttaagtctctaatagtgaaaattttggcttgggcaaaatacatttttctgttttaatatgaaaattacaagtgtatgtgtacatacacatgcatatattttatatatacacacacacacatatatgtcatagtcctaccctatgtggacaccaatattgtccaaataatagaaaatgggaagcatacttagctttcttgtatcttcctttaaactttgatttctttcctcaaatacagaccattggtctgaaatcccttcatgacttttcttttttttgagacggattttcgctcttgtcgccaaggttggagtgcagtggtgcgatctcggctcactgcaacctccgcctacctggttcaagtgatgctcctgcctcagtctcccaaatagctgggagcatagactctcgcaccatacccggctaagttttgtatttttagtagacacggggtttcaccatgttgttcaggctggtcccgaactcctgacctcaggtgatccacccgcctcggcctctcaaagtgctgggattgcaggcatgagccactgcgcccggccaacccaccacgcccagcccctctcttgattttgaccagagggtgccttttatttatcttctaagataaacactggagaaagggaggagaatgaacaccgttcaactgcctgccctgtgccaggtgctgtctgaggcaaggtgcatgagctatctttcagcaaatgaattcacctcagctccattgccgtttgtagagctgcatcctggccctcggatatgaagagtccagaaataaaaaacacagtaggagaatgatttcagcaatttcaaaagaaaaaccagcttatatccagctgccagctagataaagtaccactacaattagaaatattttcctagcaacttcaaacattgaaaataattaaaatgtaataatacttaatgtttaaaacagggaactcccaactgattagatggtgaaaatctcactcttgtacaaaacagaccaacctatattcattttatatatataaacttttattactttaattttgagaaattccaagagtcctaaagatatgacaatacctgtaaaaccacttaaatagctgttactaatattttgtcatttttcatcctatttttattaataaaagaaaacattactaatgatattcaagtttctatacaacgtaccccccataccatctgcccccagaagtaatcactgaattttgtatcattccaatccacatttatattattatatgcacatatatgaaatcatactttgcacaaacttttaagatttcaggcaggggaatgaactgctctctgcctttcatgctttaaacccagtcttgttcccataaccttgtgcaaacccagttacaatccagttatttcaaattctctaagctgaagtccttcgccttttaagtagagtttttgcttgcagggagcgtatttgctctcaatgcagggacaggctgaatggagtccaaagcgctagggtttcacatttgtaagtgataagagggggaggtggtgactttcagagatcatgtttcaagtccagccctggtttttatgtgtgtgggaatggacgcaaaggaaaacacagctgagctgcattgtaactcttcctgtagaacctgttcatgtccagggtgagtaaactagggtagaaatgtcttcctaaaacagcctccggtgaaattcgtccttggattcaaagcaacttacttcctaggaagtatcaggcaaatcccaactgccctccattttagaaaggtctcttttctgggaaaatctgccactgagaactttgccctcctctccctgatgggaggaaggagtagaattagggaggtgtcactcaggagagttgctgatgtcagtagtgtgtcagccgtgggaggctcagtttgtgaaattgagttacacctaagtgtcttatgaaactcagttcagaactcaccggagctgccgtctgggaggggggagggcggaagaaccctgaggtttttcctcacatttctgtcccatttttggaacctctggatttaaagaaatgaaaacctcaagtttgtggagattttaagaaatgggtatgtaacttt

SEQ ID NO: 29941 - DNA, 2300 bp, Homo sapien
cttctccacttccagtgaacctgcaagagatgtacaggagtcctactttggtacgactgatggaacctgagattctacccaactttatcactgtatgaccaggcaccacttaacctctgtgcacttcagtttggtcatctatgaaatctaaacagaaatctcatgcccataaccccatcacttcaagaggccaacgtgggaaaaaattgcttgagtccaggagttcgagaccagcctgggcgatacagcaagaccccatctctacaaaaaaatagaaaaagttagccaggtgtggtggcacatgcctgtggtcccagctattcaggaggctgaggtgggaggactgcttgagcccagcaggtcgaggctgcagtgagtcatgttcatgccactgtactccagcctgggcaacagagcaagaccctgtctcaaaaaaaaaaaaaaaaaaaagagagagagaaaaatctaaacaatgactctccctggtagggttgttagcaacatgaaagaagtcactacacatgtgaagcactccatactcgtgtgacatgtagtaagtgtttgctagaagctaggagaatcatttattgacacttaaaaaagaagtctccagtgattgcacattgggagggtaggcactgtcttgaaagaacttgagggaaaatcacagctgactccatttggagacatctgtgtcagtctaggccattctctgaacgggagtgtcaatagctcatattcagtcaacacccagagatgatataaaggggccctgttcagctagggttgacatcattagggtgaaatataaaactccatccactcaatagatcccaaagtaagaacgtcctagatacatccttctcccgctctccagttcctccagaatatctcatctgatgaggagtttaataacacaccttgttctctgggtggaaagagtgttttttatgtgtgagtttttctgggccagggcttgggagttgcctggaaaatcctcgctttggattgtgctctgtctgtttaaatcatttgtgagccagacgcaatggctcacagctgtaatcccagcactttgggaagccaaggcaggaggactacttgagcctgggggttgaagacaagcctgggcaacatagtgagatctccatctgtacaaaaaattagccaggtgtggtggcacttgcctatagtcccagctattcgggaggctgacgtggaagaatcactcaagttggggaagtcaagactgcagtgagtcatggttgtgccactgtactccagcctgggtgacagagtgagaccctgtgtagaaaaaaaaaaaatcatttgtgaatgtatttcagtgttagctgtgtctgggttctgaacagttaagacatttcttaactcagcagatatttatataccacggtctcaccgtgtgccaggcactgttctaggccctgcggagacagtggtgaacaaagcaataaagctcttagacagttttggaccactgtagggctcaattggaattatggaacctgcctagatagctgggttttcacccttccagatggcagatttcactctagaaggtgaccgcacagaaaatcctgaggaggcatttttatgaagcaggccctttctcactaggctttcgaaaaggtcaaaaggaataagggagagagagagaagaaaaatttttaaaaaggcttgctgcttccttaccaatttcatatgtttctgttccaaagaacaactaaagcaaagccgaagtaggctacgattttggtctttttttgtagctatttcctgttgccttgtaagacgaccccgttgttatgagtggttccatactgccctgtcttgaattgccttttggtttcttaccaacccactctcctctctcatctcctaaaccaggcagtgggattgggggccagggtgggggagtgtgttctcataaagacttgaaccccactatgggctgccgcatcagggccctctttgaaaccagaggtctggcttatagccaattcttacttcccttctgatcttcctcatttaaccactgaccagatggacaaagtctttccaccagtaatcagcacttgcactctgaggactgactcttaccagctggggagcaaacaggccagctggagaccgaggtgggagttttaatccaacacatgtaatttttgccttcgaattcctggggttccatgaggggagaaggtagcgggaaggggatcaagtcagagtagatgtgaagagaagctttccaaagagatcgttttttaaatatgtttttt

SEQ ID NO: 29942 - DNA, 2300 bp, Homo sapien
tttaattagaccccatttgtcaattttggcttttgttgccattgcttttggtgttttagacatgaagtccttgcccatgcctatgtcctgaatggtattgtctaggttttcttctagagtttttatggttttaggtctaacatttaagtctttaatccatcttgaattaatttttgtataagttgtaaggaagggatccagtttcagctttctacatatggctagccagttttcccagcaccatttattaaatagggaatcctttccccattgcttgtttttgtcaggtttgtcaaagatcagatagttgtagatatgtggcattatttctgagagctctgttctgttccatttgtctatatctctgttttgataccagtaccatgctgttttggttactgtagccttgtagtatagtttgaagtcaggtagcgtggtgccacattttctttatctgttctaccattaatggacatttaggttgatttcatgtctttgccactgtgtttgtttgtttttgttttttgagacagagtctcactctgatgcccaggctggagtgtagtggcatgatcttggctcactgcaacctctgcctcccaggttcaagcaattctcctgcctcagcctccaaagtagctgggattacaggcatgcgccaccatgcccagctaattttttatatttttagtagagatagggtttctctccccaggctggtctcgaactcctgacctcatgtgatccacccgcttcagcctcccaaagtgctgggattacaggcgtgagccaccacacccagccaagccattgtgggtattcactcatttgatcctcacaacaaccttatgaatttggtcatctttgcatgcccattttacagataagtaccagtgcaaaagccttttggattatttctcattcttccacttttgcctcacccactccagtttggtctcctcacagtaagcagacttatcctttatatatagccccagattatcttctccatgcctaaaagcctccattggctttttgctgcatctgaaacaaactccatacttcttactatggcctacaatgcagtgaatgattctagcccagtagtttcagactttagcaggcatgagagtgacctggaaggttgtgaacacacagattgccgggtgccactctctattcctaacaggctccagttgatgctgctgtgagtcctaagaccacacttcaagaaccactgatgagcccctcattaactctaagcttgtctcttgttctctccctcttggtgaccaacctccaaccacatttgttgccttttttttcttaaactgtgcattctccatagggtgacttcaccccccaagggaagttataattggttcttgaggggtaaagaaaatcttaggtattacaatagttttcagcccttcaaaactcagttcttagccaggtgtggtggttcacacctgtaatcctagcactttgggatgctgaggtgggcagatcacttgaggtcaggagttcaaaaccagcctggccaacatggtgaaagcgtgtctctactaaaaatacaaaaattagccgaacatggtggcacgcacctgtaatcccagctactcaggaggctgaggcaggagaatcacctgaacttaggaggtagagactgaagtgagctgagatcgcagtgtgggtgacagagtgagactctgtctcaaaagaaaaaaaaaaaaaaaactcagtcctgcccagcagataagatataaagtatatctgtgttattaacatttcatgggggaggagggtattgggggaaaaattgtctagagaggctccttaagagtgcaattatggggccggctgcagcggctcatgcccataatcccaacactttgggaagccgaggtgggcagatcacaaggatgcaaaaattagccaggcatggtggtgcgtgcctgtaatcccagctactcgggaggctgaagcaggagaattgcttgaaccgggaggtggaggttgcagtgagccaagatcgtgccactgcactccagcctgggcaacagatcaagactctgtctcggaaaaaaaaaaaaaaaatgcaataatgaaaaaaaaaagttatgcaacaatgtcttaacccaagcatgttctgcctcagggcctttgcacttgttggcctctgtctggaatatgcttttctcagatctgccaaggctgaatcctcatcattgctatttctggctaaatgttgcctcctcaaatagccgtttcctagctgctttatttatagcattttagag

SEQ ID NO: 29943 - DNA, 2300 bp, Homo sapien
tagcaaattcccaggtgatgctaaagctgctggcccagtgaccacactttgagagcccctattatactacatcctatcttctaaaaaattgccctgactttggaaaccttgaatgaaaatgatggaatttgaaagtgactgctgacattagacctacgcacagatagctaacagccagagtgtttctagagcctctcttctgagaggatggtgtcatgagacagaggtaattgacctgttgtaggttttattctggtattcccttggctgcctgacatttccgagaacacagtcgaactgcatcgtttaaaaaaaaaaagtaccaccaccatttgctcgtactaatagggcatttttgaagttcagtagttttccattcagcatgatgacagttctttttcaagctaagttcattttcttttgattcagtaaaatctattatattcagattcatcgttaccatcatcttgaaaaaaaaaccatcaatactaatactgatggcacatagagaagacttattgtgaagaaaggtttgcaaatcttggaccaagtcttgtgtcctattaactaattcaacaaaaactcttgggcaattttattaacgaaagaaatctcatttaaaagttttctgattacagtcactgaaaacaacaggcactttgaggacagattttgtgttcttcgtcttttgactgattgagtttcacctgaattaagattataaaagcacatttgatacctgaaatcaagctgatttacttgtcgataatctgttctggagtcttctgggctagttcaggagaaaagctttggtgccttacctttccttttggtgccacttaatagcatagataacaacccagatgtgaaacagccaagaaaatacagacaattgacttacagatggattcaggaaaaaactccatcctgaaatttgctacagcacttttgctatgagaaatcttcatacattctaagggaaaatggaggctgggcacaatgggtcatgtctgtaacgctagcactttgggaggctgaggctggaagattgcttgagcccaggcatttgaaaccagcctgggcgacatagtgagaccccatctctacaaaaaaaataatgataataaacttagcacctgtagtccccgtggctgaggtgggaagatggatcacttcatcccaggagttcaaggcagctgtgagctatgattgagtcactgctctccagcctgggcaacagaccttgtctcaaaaataaataaaggaagacagagactggtggtaggcgagactccttgagctcccttttccaaatgtttccaacaatcagcatcaattcccgagggaaaactttaataaataaataaataagattaattatctagtgacttcatgagtggtggaacagtttcctttggttttgaggggagaataaactacccatgcaggttggtgcttgcaggtgaggttagacatgtccagaggctgaattttccagaactaaaccaccgattctcttatgggcttctgtttcccagcactagtaacggcaagctatttacaagggaccaagaactctgtttttctccctgactgctgcattggtattagcagcatcttggtgtgaggaaacctgccttcctgctggcaaccacaggaggctgtcattttctctgagaccctcaagttaggagcaaaggcaggttctagggccgcctgttgctttgagactgttgccttcatctcctgcttccagcagaaccaaggaaacattcgtggctattcccccaggagtagggtccaaagggatgccttggagatttttttttttctctctctctcttctgcatctgtggctgcccagaggtgttttatcagtgtgaacagagcaagatgagtaaggtgttccccgaggcagattaggagaccactcgtccggtgtggggggtgtgtgtctgtgtgtgtgtgtgttcgcgcgcgcgcaagacgtggaagccaagtgtgctgaaatgcagctcccctctctgcctgcaaagagttgctccgcttccgtccctgccccgcgccctggggaagcgccagggggagtcctcgccggccagggcttcccgtgccccgggagcatcgagggccagcttggtggagcttagcacagcttgctcggcgctgcgagcgggcgggggtggacactgggcttctgtgtgccagtcgcagccgttggctggcgggcacccaatcccagggcatgccgccggagcctggccaggacgcacggtgaaagacgagtttggtggcaggct

SEQ ID NO: 29944 - DNA, 2300 bp, Homo sapien
acctggagcccccatttttaagccaaagcccctttgctccaagaaaatccagtaaatatcccacatcttcaaggaaattcttctggactactctcaccaataaagataaacctttctgacatctcttacattgcattttcatgtaatagtctgtatccagttttttccccaaacataataaatgccacacacttcttagatgcccagccttaagctgggcattttacctgcattgttccattttgccctacactctgtagtgttttctaatgactatgctacatgtatttattttctctctggagaaattgtggcatttgtgagcactgggcaaaccattattcattgcatcactcccctacctggggtccttatgctccaatacctgttgaatagattgtattgtgcaacgggtagcgagttaccagacctgcatttatagataggcactgccactttctagtttcatactatcaggcaggtcaactaacctctcagagcctcaggttcctccttagtaaaacagggctcccttaactcaactgacactgaatagccattgctatgtgcctgatgctgaacaaggcgaacatagaccctggccacagggggctttcagtccactcccattctcccaggagaacgcaataagatgatgccaagagaagtgcttatttagctcaagtcttggggacagggtggggaggccgggcgtgtaattaccactcaataaatgttagctattcattcaatatattctatttaattaaaagcaaacaatccattcaacatcagaagcaaatgtaattaaacctcattctgcacacatacaatattccgcaacatgctatcttgaacctttactacttcagatcttgcttgctacttgctccctcatgtcagtagcagctacaccagggcctgtgaaatcaagatgccccgtgcccccattctttttctaggctggtgacctgtcaaaaaggaagggaggaagggggagaaagacgggtaggggaagttggaggagaaggaggaagaaaggccaaaaccacggtcacagaaactgtggagtctttaaaatattgatattggataaatcaatttaattttcaacaaaaatccaaagctatgtgattgtgtagttgtgagacaattatttttaaaaatggatttgctttttaaaataaattaattcatagtgtgtagagaaaaattaattcacggtgtatggagaagtgaagtctggtcacgggacatacatttaaggctgtttgggaaatattttctcccagccctgtcggatcacctttggttctctccttgtcagctcatttgaagagaatataaaaactctcaataggaagtcgttcatgaagaatcctcctttcctctccttcctctcccatttgctgtgttacactcagcaccagatcaagttggaatctctgccctgtcactcatcagctattttgagctaacctctctgagcctcccgagtttcatgtaaagaacgcataataaaacaaaaattgttcttagggataaatgcctgatatgggatagactcgcctttttttttttttctttctgtcttcaagtgcaatggtttcagatttgcagggatctcaggagtcatttcgccagcccctcttgggtggctgggtgcattctgcgcctccctctgccaccggtgcctcataccctttattctaacagcactcaggtcctgggatgcctgaagccggtgaggcagaatcaagttccgcccagagcttggaggagtcggagggagcgatggagaggcgcgggctggtgaccccctctttcccctcctcctggcaggcaccgctccgcgcctcctggcaccggcgccctttctctgccggggaaggctagcccagcccgcagccccgtgcggcgggggccgagggcgccccctcccttcctccctctccccctccccttccttccctcccgatacaatgactgggccggaacagcgcatcagccgagcctcattggcagcggccgccccagcccccggagaggcggcgggcgggggctgctggggagagagggagccgaaagccccggctgacagcgagaggaggcaggcaggacggaaggacgcgagaaaggcggcccggggcacagctgtaagtgtggagcaaagcgaggacgcacggcgagcggcggtggcgggggcgacctgcagacccgggccgggggatgcggcaggcgctggctgcccagagagcccgggagtcgggctgcgtagctcacgtgctgagctggagctt

SEQ ID NO: 29945 - DNA, 2300 bp, Homo sapien
gttataaactgcagttgtaacataaagtctgtgatagccttcagtgggtcagctgaccaaaattatgcacagttttgtttctatctgtattttctgagaagaggatccgtagcttccctcagattaaaaaacttctggtgagcccaaagattaggcagcttcccatgtttctcaatggggatacataccactgaaatttggacaagaaaatttgttattgtgcaatatgtgtagtgtctctggcccataccccttaaacgtctgtaacatccataagttattatgacaacccctcctcccatattccaagcactgataattgagagcccagatgagattagaagtctagactgcatgtttccttcatgtttgatctttcttctttctctcccagagaacatgaaggaaacacgttttctttgtttgcttttgacagctaatttccagcagtccatctattaaggaatctaggatcccacttttatgagcacaaaactcccactttccttaggggtgttctcaggtattctgacatagtttaatagtttcaggggagggcctaaaagtcgtatgttggggactaatttttattctgaaaatttggtaattgctactgcaacatagtgtgccttctgcactttttccaaatcaccttgagaactccagccctaacatcgatccatcctactggatgtcttttctgatgtgaaattaaaatgtttcagtgggaggcaagatatgcaaaggggtaactcctgggaggtgcccagttgtcactgtagcctctttagaattttctcctaggacagtcatttagtttattaattctgaaaggccaaacaccaaaatgagatgttaatctgaaaggaataacttcaagacctaataaagaatgaccactgagcagagtttttatagattgcaaatcactttctcttacatttgaccttgcaacatcttctaaaactggtttgccaatctcttcttttatggatgaagaaatggaggcttctaggaaccaagtgacatgctcaggattgcacagctcttcttagaaggactggggatttcaactctgagtcttatacctttaaatgccactgtaactctatactgcctccctgatgcctcaaaacacttttgaaaagaaggaacacgtcctactggagctaatcagagggaagaactagaagtacaaatgagccacaacggagagttttaaaattctcttccctaagtgagttccgggaagctcgggaaggggtggacacttgtacagttcacttgtacatcttcactcctgaaatgctaggacaaatctcatttgaactcccagtcaactgagaaattaaaagcagagagcaacgacgctattttgtaactttgtgccttttaaaattaaccgaatctttcaattgctgctgtagattagaagtggctacttggataaaggggaaagagccattcaactgatgaatactattgtaaaagtccagacttagttctagaaaaggaacgcacaagaacaatttctccaataacgttttcattacagagcgaaggaaagttcttcctcgttgttccaatccgaggacaagctgatatgtcgcagcagcccagggaagcatgcgagctgataggaagtccttttattttaagacaggctcgaatgctaaaactttcttgtgccaaaacccttgactattttatttttaaaataagcacttggcgtgccctcgcagatgtctgagctgagaggtcggggcgatggtagaagagcagtcagtgtccattcttattcatattaagtagccaagtctgtacccttgaagcaagtggggagagaggagggagaggagctgctgacattgacaatgaatccaaacaggagttgcactagcggtgtccaccacgttgcctctcccccgcctggccttctgggagctgtagttttcgtgggagcggctccccaggcgagctgggaatgccccgcccgggccgaactacagatcccaggcggcgctcggccgccagcccctcccgcccgggtgcgagtgtaaactccccgcgctggggcgggcggccgcgagccggcgagcgggcagagctcggcactgcgccggggcgcacggctcgggggacccaggcccagctaccttccctccgcccccgggctctgttctcactttccagcagtggaaggacgggaagcgggagccatgcagtccgaatcggggatcgtgccggatttcgaagtcggggaggagtttcatgaagagcccaaaacctattacgaactc

SEQ ID NO: 29946 - DNA, 2300 bp, Homo sapien
tgaaggaggaaaggaggtaggctgtgaatcctccaagaaaggtaggaaaagatgggatggtggatacttaatcattcacaagggtgtggtatataagtaagtggtagattttcctaatttcttattaataatcttcaaatgttgctacttgatgacatcaagttgtcttgtctacatacccatccttgtgttctactactgaacatgaacatgtagctcataacatctggatgtttttcactcatctctttttccctctctcttttttctgctaacctgacttgttgattgctatttttgtgtgtcttcataaatttatagccagtctgttccattctggactgtttatctttggcatgccagaggtctttaaacatcataatgttgtgtaatgagcataacttctgccttgacttgtgggtgttaagagcattagtcagtgcaaagtattgagttaaatattttcaataaaaggatataatgatctagcagagaagaagttataaaaaatcctagttaatggctttaatggtgagccatatatttagtgggttctatcagtgatgagttagagattcacagaatgaatgtaaaagcattcttacttttaattaatgagagaggagaaagaaaaacaataataagaaaaaaaggacttgattctcatccataccaagaaaagtgtaaacatccaagttcccagtgattctaaccctgattcattaccttgcatgtgtctttaactaccacaagaaatgtttaagatttccattgagatattatcgacagggactcctgggctgcatcataagcctgattgaaagcctttagccttgtaatgatctctttttggaggacaatcagggaattctttgcacctttatcagagagtcagggctttcctgagcaaacaaactaggtctttacctatggagctgattttatgaagagttttggtcagcattagtcattgtgaaaccatgggcctcctgccctggtttatctcgacagtcatctccctacagcagaagattgaatcctcatctctccatgagtctgagcatctaaagatgttagaggtacattggtttgattcttgctggggaatgtgtagtgggtactggtcttctgggaatagtgtctagatgaatgtttaataatcagtttaataggttgatgggctgtcttatttcctggggttggaggtttaaaccaggacaccctgtgctaactctgctctttaccttgccagcaatcctcagtcgtcctggtaaacaacctctgagttaaataccttttcttttctggagaggttaccaacaaaggaaaaggctttgatgtcagaacagggggcataaacagtgtttatggctgctgttaaaaatttctcatctgggtattttcaaaagaattccaagtcaaaatatatcacttatgggaagtatcttcttttccaatatgatatcttatgaagttgataattattttcatggtttaagtagtaattgatgacattttgggggttggaagatttgtgggaaggaggacatagattttcatcagatgtccttgcgtcctttccttgcgaggattattgatctctagtcttcatatgtaaggtgttgaatttatttaatgttattaactgaatctatagataaagaggtagttttggagccaagtaacctgttgatgtaaagtctattttaccttttatgattaccatctagcacctccctccttcctggctgaattccctgtcattttaagtaggcagcaattactggtttgctaaagaagccagctcctgctgccaaggatcctgttaattatcactctatctctaatttagccttcctagtgttgagagaaggtgcacgtaagcgtgtggcagaacgtctgcaatcgcatctttgtaataatctcctttctgagacggttcagtggactcaatgttccgccaaagggccaaggcagccctggtgagtgttttcagctctcttctgtagcttgtttggtcagtcgagtttggtgtgattgtcctctccttttgcttctgacctaagtaaaagctaatggttggcattaatcttgggaattcagacctattccgctccatctctgaagtcaaatgggacaccttgaaaatacttcagtggttttcccacgagctattttctctctctgtgaaaaggaaaccaggaaattgactctgtgcctgttttcaagaaggtaatacagatgataaccaaagtacctcagtttacaggttcttatatagcatgttttttaagggatgt

SEQ ID NO: 29947 - DNA, 2300 bp, Homo sapien
tttagaaaatttgtacaaagtcatagaattagtaagtggtgagatttgaacctggataaataaacgtcagaatctatgttcttgattttcatgccaaactgtgctagaggcaggaaaagagaggtgggataggttagtaagataaatagtgtaacatcttagtcatctgtttaccccaatacctggtacagtacctggcatgtagaaagtgctcaatgactgctgttgatgaactttctcctctaatcgtatttattggtccttagttttacgagcaatctgcccacttttctccactttgcacatctgcccttcccatgagctaccatcacctcctaccaggactattgcagtagctaactctgacagttttctagttggctgtcaacatagcaaccagagagacctttctaaaaactcaaatctgagctcatcgttcccctgcttgccatctctctgtggtttcttgttcatcttgaaacagaatcagtgacctttccctggcctaccagatccttcatggtctggtcctggtcactgtgtaggtctcacgggcaccatgtttttccttcatactatgtccttcagtgatagtgagtctgcctgccaacttcccacctcatagttcttacatatgttgttactgctgcctggaaagcattttttctatactcctcctctccccaactcagatctcagaccagaagtccctgcctaaggaaagcctttcctgacccttaaattttaactttttcacctctctgcagcagttatgacatttttcattacatatttatgtgattatttaatatgtgtttcccattagactgtaaactccacgaatttacacaatgcctgggacacagttggtgttccataaatatttattgaacaaaagaaagaaagaatgaataaaatgagcagagaataaacagaaccagaaatagtttggccgagactcctggctagatatttcctagcattagagggaagttaaaaaaaaagataatttcattatatcacgtaatttgagtttgattatggctgaagaggttgcattattttccaaccatttactttggagataaatgtaggcacagagaggtgaagtaacttgcccagtgtatgcagctagtcagtgtcagatgtctttgttatgacctttgaattgtgtgtagggagaaacatacatacaatattttcacaactctgtagggcatctttggtgtgctgagtcctgtaggagctgcatgaatatttgataatattgatgttgtcatgtctgcattttaaagtgttttttgagaacatgtattgctgttttttcttcttgtataccaatgtgttcagaattagattggatgacagtcttaagaatacacagtttatggcctaacgatttgtgtgtcctgaaagatggtggccataattaggagcagtttgtgttttacttccaccagaaccgggcaaggacaaccctcctaatattcttggggtctgagggtaaggaatgctgttttggatctctagcctgtcagcaaggagggcatattcaattatcaagctccaaaaatgcctgtgcacagatgcaaaacacctagagttgtgtgatgagttgatgcccgagagctcccaaactgagaggggacacaagcagttccacagtcctccctcctagattctgtgactccagtaagtgttgacaattcactggtatgtgaaattacctctccttttaagttctctaataatgtgcagtctctgcaagcctcagccagtaccggagctgggtaaggctaaataagcttcccgaggtgcttgcctggctgctgggctgcctccctggccgtgcctgggtccttgagtagccctcattgtggtgtgaggcagcgtttttgtcctgcaggtacagtaggtactggattaaacaggtctgctgttgcagacagaaaccaggcaccgttctagcacagagctgtgtttggattggagtttccagggccttatcaggagccacccctagtgacacagccagtgccagaactaactttgactttcactcttcgccaagggcttgcagaacaccttaaaggaaaaaagatggaggcgcttagagttcagatgttcatgccatgctcctttgaaagcttgtatctgtaagtgaagttttattctggaaataatcccgggaccacttaagaggagcagttttttttctctttaagggggaggataaaggaagagaagggtttattgggagttaaaaatactgaagctgttacttctcactggctttaatc

SEQ ID NO: 29948 - DNA, 2300 bp, Homo sapien
gaataaattatcttctctctccatccctgaaaaagttttttgagttctctcatttaaatggacattggctaaactttacaagacatatcttctgtggtccaaacttgcacataggcatataaaaagtagattccttgtatccaaaagaagaagcatgctcatggtttaatattattatttttaccactaatttttgaactgtattccagtttattggaccatgtttcagtcattgtgctaagtttttctatctattaaaaattttaatcctcaccacagtgctgagaggcagatgtattgcgaagcacagagatagactaactgggccacagtcacaagttaccgcacagcccagctgaactctgcctgaggagtggactaaaggaaacgcaaggaaaagtagaacattgctttagcgtctctaggtttctactgatgaccagagtactgtcttagaggactgtgatattgagaccaaagaccagtccctatgagatagtaaaagaacactggcatcatgtcaaaggtgaggggtgggcagacagatgtttggatgctggagcattgaatttaatggaatttctgatattgttaggtggctgacaaagatagaataaagtattgggatttagcaaaacgtcagatagttcagagcccatgtccaaaatacctataccatcacagagaagagggaggctttgaaggttaagaatgtaaattctgccatagaggtaggaactcaggtcacatttggtggccatctggtgtctgtatacctccagccactgtgctgaacactttaatttagtgaacattaactgacccaatccctgcagcacattaaaatgctgggttttggaaaagcccagagaggtcaagtggctcattaaagctcatgcagctcggcagtgactgagctagcccttgagtccaatcggtggccctcctcctcgagccattgctgacaaattcccagttctcaggggagttgtgtgcctggcttcagtgatgccgatacatgccagtaaaggcatttgtctctctgcccatcggctttcaaagggagctttctgatggtgagatgcccaccttcccatgtgggacttgatcagagttccgtagtctaggtaactgacttaattttaaggcgtctcagaagaattatgtgactgtggctttaaactctatgagattagaaaccaggtattcccagcacctggcaataactatttgttgaataaatgacctttacataatctgattaaaaggaatcagactcatggaattaggattatctagcgaagattcagcttcatggcctgggatgagttcagttagcttttaaaattaaatacatttggacatctctccttgtgtatcattagtagcttcagcatcacgtcctcgttttaaaaaataagcattgttgccacttgtaatgttctcacataaacctcaatttggagcttaagacattatgctcatttgtcctgctaacattgtgacatgcagatatccttgtttttgtctagaaggtgataattgcagattcagttacttctaagagaaagggatgtttagaagattgagagcaaagctgagaatctgggagtcatctttcacaatgtggaaatatcccgcagggagtgtgtgccatgaggcgactctaatgcttcctttgcacttttgggtttttttgcaggaagatttattaaaacactgtcaattaactgagctgtgctatatttatataactataaaaatatatttgctctattttttagtggggtttcttttcacttatactggtctacttcatacatacgtatttttttttcagacaggatatttcagaaaatgctttgaatgatattgttgtcgactttcacgtatgaagacttagtgcagttgataactagaaattttaatttaagatgtcttaagaatgctttactgttaattgaaaggatttcttcccccagtatcacagccaatgactcgtcttgagcagctaattagtgcgattattccacagctgcatttgctacagcacaaaggtttgcttctgtttttatcaaaaggatcagtctctctgggaatgttttaacctgacaggctttgaatagtaaggccgcttatttatttatttattttaaaataactgttccccccgcgcttccccccgccacccgccatgcccctcatcacagctctccttcttttcttggcttaggaaggtacatttgagctttgaacacatactctaaaatgggaaaatacatttttaaatgctcttttag

SEQ ID NO: 29949 - DNA, 2300 bp, Homo sapien
attccctactaatcattttgcatacttggatacatgcatataccacacttatttcaaattagaatgtaaatatacttttgaatcctacttttaaattccctcttgttacatacatttcccactttgttctgtagttgcacaatttaaaaaaataggtagtattttattgaattcatatatgataatgtatttaaccattctcatagtatgggacaaattttttattattcatatattttgcaatttgtaaagagctttgtaatatcagtttttgcacatttaagttatttacttaggaaaattgtccatcacaacatttctgaatcaaattgtatgaacaatttttagctttttggtagtgttgttaagctgttttaatatataccagcaatggtgtagagtaacattattcttatgctttttgttgtcatagacagtttgtttattaaaaaaaaaaaaaaaccttggatcttaccttaaatactattttgtatctggcttttctaagttctttgtattgtgtagttttattcacatcagtaactatatttttacactagttttaatggttgcatcatgttacattttgattctctgacaatatactgagccaatttcctgttgtgaaaataagcgaactgttaaattgttattgtgtagtttttctgggatagcgtgagggtaaaaccaatacttcttcatcccctagcatgttttgttaccttcagagcctgaaggttcctgtctttaaggagctcatgaggatggtcaatgatatttaaggcttcattttgccttttattagaaggtaaaagataataccagagtttatattcaaggaaggaagttcaaagtacaaatacttacctcgaagcatgactttctcaagagtgaatattttctcaaatgttccttttcttctgttccaggtgctaaggttttgaaccgttgacctaaacacagacgttaaaaaatatatatagagagagaaataaacaatgaaacattttctacctataataatagtgacagcaaacatttgttgagccagtactacatggtactcattgtactagggcatttatgtgccttgttttatttaatcccccaaaatccctaggaagtagggctttaaaatatacatgatgctatagaaattttaaaagaacagctcccacctttataaatggtaagtgggtaaaaaactattgttatccttcttttccggatactaagacagagagagatttaataacttgatgtcatagagctggcaagataagttatcagaaaccatatttaggaaaattaggaagttttttctttttaatttgtgagtagggtttcagaattttaaactattttgggtagagtgagtaccaaaaccattagaagtagtcctcatggggaatgcacagagaacacattgtaacatagtagagggcatgccaaggtgaatcagaagaaaagacagcacaaagaaaaccagacagagaagtattggcttgtcagaccagctcgtcttctgcccccttacccaaagagcgaggtcgagttcagtgttaacattctggcccaaatgcttccttcattaattatttttacttattttatcttagaaaaatttcctcttggcaaagctcaccttttctttaatcaatatttgttagtaaacattttaggcatcttcaaagaacttagataacatgtaggagtagttatttggttagattcagttatacaaaaaagcaaatcaagcaatttatttttaaatgtggaaatttgggtgccattaagatgctttgcttcttggcagtgcatatggtggcgctatatttggtggtgatgagtagtgtgcagcataaaatgtaaaaaaaaaaaaattaaaaaaattaagccgcctgataaaaatgccttgatgcaatcaagctgacttattttaattcaactactaatgacttaaatcctgtcacctcttgattttcaattatgtggagtaccattctgtgacttgattatatttgcgcagactcattttatagtttggtgcaatttaggatacccccaaagtgcaaacgaagggtctcattaggaaactaaatgttgtatgcattttggttttcccacagcagttccgccgagcatcctggggcctccaagcctccgataagctcctccagtatgacatcacgcatcttgctacgccagcaactcatgcgtgagcagatgcaggagcaggagcgcagggagcagcagcagaagctgcaggcggcccagttcatgcaacagagagtgcccgt

SEQ ID NO: 29950 - DNA, 2300 bp, Homo sapien
ttagaaacatgatctcatttaatgcagaaaacacacatatgaggcaagctctactgtcattcccattcaatatgctaggagatgagggcctggagaagttaatgaattgcagaaggtacacgggttgttaagttgcaaagatagaatctgaacccaggtttcaagttaagaactccactgtctgtgttgtcaggcacattgtctttcaaagaagcaccaggaaatgcctggatttggactaatttctcagaagagaaacttcttcccataacctaggctatctccaagggaatgtaaatatgaagattatccttatagacagtgtaaaatagagattattttctagtagtttgtgggccgaggcttgtactctgtgaaacacaaaacagttgagcatcggatctttaaacctggaggattttacttaaaaaagaagtttggattgccagctacccttgaaaaatttggagattttgagctaggctggactcatattcccacatggccacaatcagctgcagtttttatctgctgttcctgctagatagatgtgtgtcctctggtttgccacagacctcactactccttattaccttcctcgtagctcatgttcctcatttatgttgcctgtttgaggtatttgggttagaaacagctggagatgttctgtctactgcatagtgtttataggccatctgctttcaacttacgtgaaaaataaaaagttattaacagtaaaagagccaaatatatcccattctgcttacccaaacctggatgtaataaagacctcactgacagtgccacatagaaagcaaattgcttctttctttactaaagcataatattctgattcattaaagaattaggatctgccagtgaattaacatttatttttaaacatgaatctcttttctttttaagtgtaatagtgaaataagcacattctactcattgccctcattttatgtttattttagtaatgtctactgtcatcattatcatgtctggaccctttataaaaaaaaaatctctgtgaacctctgtgtacatattaaatcagtcatttgaaacaatatgagattgtcaacctaacggactgcattatcctgggcatttagacaacattattgaacttcaaatttttagcttaacataacatttgtcagcagtagatattaagcatttatcataatttataagtatatatttgcttgcctcttttctttttttgcctcaccccagaatataagtttcataaagctggaaactatatctgtttgttcacaatgtatattctatgctttgtacagtgtttagcacttaacagtcaataatgaatgaataaaggaataaatatgtaaatatatcagtgttgtatatgataactcattcttctgtaatcttaagaataatatgtaaaaattctcagcaaaaatgctcatgcttttttcatttgagaattaaataggggagatatttatttcttattatccacataaatatatatccacttctgtgtgtgctatgttctatttaggatagtgcccggtcttcctgatgtgaggtcaataggcaggttacacatctatgtagctaagaataaggtgcatattaagaccaggatgcaagaagaggctgttgaacttgaacattcagcacagagtctcttctcttctatactaaaagatagtcatcctgcagtcggaagtggcagttattcggccattggaaaagtctcatgtaatagtagcttttagatgatgtctcctccaaaggggcattctgctattaacctattgctgaaagagaaataccattgtctattaatactactggaactaaagatgaatagtgaattggccttgatctgacagtgagtttgactttgatagctcgtcacttaaaaaggttcttttatatttatgaaaaaaagcatgacgtcaagccagggggaaaaattgatatcaacatttaagaccaaactcgtagggcttccaaaaaaaaggcccttatgtgaacgtttttttttacatgcataactaattagcttaggttattataagcagggcttctgtgataaagtttccggtggtgtctcgggataccttgtttatagtaccttctctttgccagtccatcttcaaattggaattatagaaagtagagggagggatagtctaccgtctctcactggattggtgccacctaaaacattgttatgctggaaatgctagaatataatcactatcaggtgagatttattctgactcatattcagtctttgaaatataatgcaa

SEQ ID NO: 29951 - DNA, 2300 bp, Homo sapien
tgctttaggataaacttgttaaaattgggaactcagccagggtcatgcatctaagaacattgtgaaagcatcttagggttgttcatctagctatggtctaattaattttcaaatggacaaagtagtttcttgggccatataacaagcattttcattcatttaagtgaagctggatttggctcaaagcagggtcatgagaaattctaatggctccttctcttctttgtgtgtcctcaggagagcttcctcgatgtcaacaatgcaagatttgtgctgcgggcaattggagtagaatcagcttcctgagagccaagttctttgacttcccctagaaggaaagggtatggaaccaagcatatgggaaggctctctaggcccttttacattattggatttagctacgctcacataatgaaattgttgagattgtttaaaccttctgcagggacttctgttagcagaaaagaaacttgtactaaagccataagaagattgtattatagatataatggaatcttttttatcttttgcctggttttctgcacaggactgacatatttttctgggcatgaagccaaaggtctatttaatttctacttaaaatttcccatggccactaatactctccccctagatagctgctttataaatgaataaataaagacaaagccactagaaaggttgtgaatccttgtaagctttttttttttaaggtggctattttgcactccaataacatctataaaaagcgtgttcctgaatctttaggacaatgcttcactgctatcaatcaaacttccgtaaaatattgaacttatctttgtcctaagaccacagccatgattaaataagacttgaatataaaaatgcaggtttacttgcatcagatgagttctcgtgaacatatgaggttatatcactcctatttttactgcatttaggatttttgagtggtaataatgtttttcaatttaaaactgacttatttttatttttctaggaggtttttgccaattaggtgacaggttttttttgtttgttgttttgtttttgtttttgtttttgagagagagagagagcaagagtgagagagagattgaagtcggggagagaacccagatgttagaaactggcccaagcagtcagcttctcataaaggaccatcctgacagtttgactgtaaaaaaggcaccccattgagcactacatgttccaggaaatggctggccacggaaaaccttctgttcctagcattcatttccagaatgtccccagactgcttgtttgctccctcccagccaacaaagggcagtcaaatgtacctgaagatcaattagaaagtcaccctggcttccagaaatctcacctttatagaaccctcagcagtcagaggctgtctcagcctatccttttttattctataaaaatcactctcctctctaacacccgggaaccctgctgaaacgaaactgacagcagatgggttcccttgccatcaatttatgaataaacagcctttgttcattttgtctcgaacttagttttgtctttgacagatgtaaccatgacttaaagcaatacccggcttgtagaagaagtatttacttattcaacaaatatctactaagtacctactaagtgccaggcactattctcagcactgagacgtaagatacgtaatttgtcattggtgactcacttcttgtgaatccaagagctccataaatagtggtcatttattattaacaatcctttctgagataaaaacctgctttttatagtttacggagaagtagcttttgttttataagtgtaactgcaaccaaatagttcccacatgatatcatagcccacttgtgatacgggagtaccgggaacggaagagcgtggtccctttaaatgatacggaagtggggaagggaagtgaggggtagaggaaggcgggtccctggctcggctctacccccatggatctaggtgaggacaggcgctcctgctttcccgcccaaatgttgtattttccaagcctacccttgccggccacgcccccaacctgggcctataaaaaccgccccccgcaggccctagcgggcagacacactgaagtcgctagacatttgaggaacacatccggggaagaagacacaggtggctggtcatggagagcccgctgggggaagagcacacagacaggcaccggcaggccattgaccagcgggacaaggtggagtttggctggggcagtgggaggagagctggggccgccgagctgccctactccaggggaaaaccacctccct

SEQ ID NO: 29952 - DNA, 2300 bp, Homo sapien
tctggctgggataaaatccaagagtctccatcttttgctatgtgaccttgaacaatctgctgaacctatctgatgaactctgttttcttgtgtatataatgacgataataatgagttgttctaaagaatgtatctgcccactgatttttgttttggcttctgatcactacatgccccttcctgcctttattctctgcttttgccattatccttgactataataattttccagtgcctcgtacttatcggaattcctcttgtgcttgaaggtctagctcaaataacatcctttctcatcctttttttgaatgcagaactcttcattttggaactgtaaatttggcacttgtatgtcatttatcttcagaatttctgttaatggaagcaaatgaggaggagattatggggctagaaatagatgacctacaattttgttaaaagaaaacaaatacatttgaattatacagggtcagaataaccatggtttagcacatccctgggagttatgtatcttcaagcaattcttggtatcatatagcagtaggagtcaagccttaaggcagggagagtgacagagagaaggggagttagacgcagggaaagttgaaagaaacagcaaagtagatgagttttcagcagagaagctggaggaaatcaaggccacctgggattgtgctgacttttaatctcagttcatcgtgtagtcaacccctgaatgacaaacagggctcagcaaacattttttgtaaaggcccagaaagtaaatattttaagctgtatgttctatgttattaattcaactattcaatgctgccattttagcacaaaagcacccatagacaatatgaaacaaataggcatggctatgttccaataaaactttatttatgtattagaaggcagactggatttgagctgttgcttgttgactagttgaactagaatctttataaacaaaatatagacctttgagaaaagggctgtgtctccctcttacatctttaactgtcaatatagttcgattttaaagattcattaaggatgaagattatttgcagcataacacatctcatttataatatatgtctattaatccactctgatacctggaatgttttcctcctatgccatatttgtattgacatttactcttttggaggcaacagttttaattcctaaatatgctctctgtagtacattttatgaatgtttcattagttaaaaataatgtaatactttctatatgagtttcataaattgcttctaccaaatttaatttatacacactctgaaaaataaatgagcattatgtattaagtttaaaaaaaggaagaaaagaccttacataccaactaactccaactgattggtagttgttttctgtaattttttgatgatataaatttgatgacatgacataaagctaccagtcccaagagtcggaaagcagtaattgactgatgttgtttgccatggatggggtgagggtgaagaaggtagtagtcttgacattcagatcatgtatctggcaaatagtacaaaaaattctatatacatatgtgtgtgtgtatgtgtgtatgtattctgtgagtgtgtgtttatgtttgaaagatactcaccaaattatttacttggattttctggatagctcagtgatgggagaatttatttttctttttgatttgggattatgtggaatttcgaaattttttacagtgaaaaatgttacttttgggatttttgcttctggtagtatgaaaggactagataccctaaaaaatcgttctgctgcaagacaacctagctgccagataatgtgcatgaagtatattttttatgcatttctgtactttcagtagagttaggaaaataattaataaaccatttgataccactgttacgagggggtccttgctcccgagctcccaagatggtggcaggccacttccaagatggtggcaagcctcgtgttctctgacctggggttcttggcctcacagattccaaggaatagaatcttgggccatgcagtcagtgttatagctctattagaacctgcgggtcacagaagagaaccatggaacccagtgactagtgttcagctctattaggacgaacccaggcacttagccatgcaggaacaatggcaagcctttagcccgatcgggagtggcaatgggcgcctcgatggatcaggagcacagcggacaccctgccagatctggagggatggaagtcagcggtgggtctgcgaaagcgcaaacaggagtggtggacagcaagtgaaagctcacctcgag

SEQ ID NO: 29953 - DNA, 2300 bp, Homo sapien
cctgggattactgggtcagattttgttgccttttttttttttttttttttgaaggcaaataggcattcattgatgtcacactactccttttcctctaatattttgagaaaaagaataaaaatgtgtgtggggattttgtgtgtgtgtctttaaaaaatatacaggccaggaagtttttctccaagtttgaaggtggtaaataggtgatttttttagagtcgccgaaatggactagattaacctgacgcttaagtcgtgtcagttgagccaacaaagtttagcacattgttgactttttaaaaaaacactatactcagctttcaatagcctgaaagagcagtgactatttctaatagagaaggtcatcctaaagtgcttattgagagtagcttttgttgttgctattgttgtataaataagaaaggaatttaaagaattatttcttagcaaacgtgtggcagatgctttcttcggcagctgtcgttctagaggggaagtcgcctggttcagcgacgaggcacgtttggttgttatttatttccaccccgcgtcggcttagttttcctcggtgcgcactggcacactttggcgagaccgactctgggaaagaaaggggtgtggggaggccaaggctctgtgaaacccccgacgtgaagcgaaagttctcctcccagggaggttttcgaggaaaagcgcttttctgcgctgcctaggagacctgcgtaccctcccgaagccgaacagttgctcggagcagtcggcttggcgccgcgagcgccgggtgcccctcttcggcctcccgggtttctcggaaaggttaggacaactctttgtcagtctcaaagacgaaacaaacacgccgccccgccggcagccccggccccgcagagccccggccagagggagcggtgcgcgccgagcccggccgacccagacgtcagccggaggcgggtcaccgggttaacagctattaagtggagttgctctccagacaaaagcagggtggcacccgagcgtgatttcacctgccgcgcggagggggccggggcgcgcgggcgcggggcgcgggccgcggagcccattgtgtggggcgcggcgcggcgcggcgcggcgcggggtgtttagaggcgggttgtgattggtggagcagggcggggcgggtgggcgcggcgcggcgcgtcttgtcagcccgcgagccggagcgcccctgcgcgcgtgcagtccgcctgcacgccgaggccgccggaccccacgcccggcccgcgcgggcgccccgagcccggctccgcgcgcctggcggctacatggagagtgtcaggttggtccttctgattgatctttgccggtttcgctctccttcccccggctccgcggcgcccgcttcctgggggcctcgctggggaaggcaggagagcccgagggttctgaagttgagtcttttaaaaaatcatcctcatcctcgctgtttaccaagttgggtaggagttgcgctctggaagtggaggcggggagggagtggaggggcaagaaaaaggagctgcaggcctgtgggtcctggagagagatacccccccaccccccttgctctttggctcacactctcgctctctttttttaaatgttcatgggtggggtgtagttgagagttggaggaagtcctgcttgtgtgtttctctctctctctttttcgtttgcgattcattttctgccggtctggccttcacgcagccactttggtgaagccctcgccatcactccgttcgggggacgtatctggggtgtgatttctgtcactttcagagcgtgtgaaatatacaaggagccttccatctcagtgtaacccatgtggatgtttctttgcttctgatagtttgtttctatatctgtctaggctattttcagcttagctgttcaaattcgacgagttcacacacagtaaagggggagggagaggcacagagccccacaccggagcaggcgagcgagcgaatggaacactctggcaggttggggattctaagcctctgttgcattacttggctggttaattaagtagtgagcggggtttgggtttggacgtgcagcagactgaggaattgccacggggtactcccagctgaaccggctctgaatgtagctaactcaactgtcagaactgcatgaaggacggtcagtggaaacgggactttttacccctctcctccccaagtacggtgttgggaaggagaggacctttaggaagtgggtggtaaagttttagagcaaagtacatatagactcttcctctttgggattaactc

SEQ ID NO: 29954 - DNA, 2300 bp, Homo sapien
gtggtcccatggtgcttacagccaccaccgtgcaatttagtagttgagtaagcactgcattgcatcactctctaattattttgtttaaggcttgtctccacagctgggtcatgagcgtctgtaatgttgtttgcttgtttattgtttgttttgatgcacctgcagactattagctgataaacactgacctgctaaggagttagtccaccttctgaaagcatgcatgagttttatggatgcctcatgaagaacttagtttctaaaataaaaacacattgcatattcaaagtacatcccagtttttgtttataaacattaaaactcaattttaatactttgggaaaaagaaagtcacttaggcgttttgaaatgattctttccactttctccctgtacattggttggagagcacttcctttatttgtatttcctgccgttggggctctctgccagcccctccggaaagagcaccttttctctttaagagtcagaactctactgatagtcgggggactttctggcagatttaaggtccttctacctcgcaaaagagcccttggttctctgttgaatattcatgagagggtggggtcacattttgtgacctgaaaaaatcccattaataaatttggtatctgacacaaaaacactttagggtgaagagcgatctgcgctgtgcccatttaacatctgatcatactttgatggtcacttcgcgcttgtctcttttacagccagagtaaagagggaattgtctgctccccgctgaccctgttgaaattcaggcatttgcttgattggaaatattaccaatattctttctggtctgtagtaacctgcatttaatacacttcacatcaaaatgtactttcaagtaaaattcctgggattactgggtcagattttgttgccttttttttttttttttttttgaaggcaaataggcattcattgatgtcacactactccttttcctctaatattttgagaaaaagaataaaaatgtgtgtggggattttgtgtgtgtgtctttaaaaaatatacaggccaggaagtttttctccaagtttgaaggtggtaaataggtgatttttttagagtcgccgaaatggactagattaacctgacgcttaagtcgtgtcagttgagccaacaaagtttagcacattgttgactttttaaaaaaacactatactcagctttcaatagcctgaaagagcagtgactatttctaatagagaaggtcatcctaaagtgcttattgagagtagcttttgttgttgctattgttgtataaataagaaaggaatttaaagaattatttcttagcaaacgtgtggcagatgctttcttcggcagctgtcgttctagaggggaagtcgcctggttcagcgacgaggcacgtttggttgttatttatttccaccccgcgtcggcttagttttcctcggtgcgcactggcacactttggcgagaccgactctgggaaagaaaggggtgtggggaggccaaggctctgtgaaacccccgacgtgaagcgaaagttctcctcccagggaggttttcgaggaaaagcgcttttctgcgctgcctaggagacctgcgtaccctcccgaagccgaacagttgctcggagcagtcggcttggcgccgcgagcgccgggtgcccctcttcggcctcccgggtttctcggaaaggttaggacaactctttgtcagtctcaaagacgaaacaaacacgccgccccgccggcagccccggccccgcagagccccggccagagggagcggtgcgcgccgagcccggccgacccagacgtcagccggaggcgggtcaccgggttaacagctattaagtggagttgctctccagacaaaagcagggtggcacccgagcgtgatttcacctgccgcgcggagggggccggggcgcgcgggcgcggggcgcgggccgcggagcccattgtgtggggcgcggcgcggcgcggcgcggcgcggggtgtttagaggcgggttgtgattggtggagcagggcggggcgggtgggcgcggcgcggcgcgtcttgtcagcccgcgagccggagcgcccctgcgcgcgtgcagtccgcctgcacgccgaggccgccggaccccacgcccggcccgcgcgggcgccccgagcccggctccgcgcgcctggcggctacatggagagtgtcaggttggtccttctgattgatctttgccggtttcgctctccttcccccggctccgcggcgcccgcttcctgggggcctcgctggggaaggcaggagagcccg

SEQ ID NO: 29955 - DNA, 2300 bp, Homo sapien
aaaaaaagaggggcactaattttaaaaatccaagcgtgctgcaaaagaagatcttgctttgcagtcccagagggtgcttgcaatcaggaataaccgcaggctaaattataatgtggaattctgttgccctttaacctgatgctgcctgttcacattcagtgtttgttaacaaacagctttaagaacaaaattgttgggagaattactatttgattgtatgcactgactttattgaaaataagaggctttattttttttaattgcatgtctctgagaaagttgtgataattcctttacagaactgccctagttggcttaaaagctactaggtgttaagcagttacatatctgtaggacagaacacatctatttgtgtgactgaggctggaacatttgtgttcattccataactagccattttagggaactggactgcttagagctctctagccccatctcgaactacttatagctcttctgttgagagatggttttcctgaccgcccactttcatggcgcccaggctgtgtgccttttgatactgcaacgcagagcagctgcaggggatgctaataaaatgcaggattttggacactgagcaaggtaagagtctgcctttttctcctgccccttgaaaagggattgctaggaaatcatttcctggtctctaactggaccagctgagttagagaggaacatttgcattggatactccacccctccccaaagtggagaaggcaggcgtggaagcactgtgagactcagaagggagatgaggcagtaaaccagatctttcccattttttcccccagcctagtcttctgtttctatgatctgccttttgaactgtttttgtggctgatcagttccacctaatatgtctcttgatttctgctattgtaatactcaggcgacatgctgttctcttcatttttataagctttagatgcttctgcctgtcattttctggcggtttatcttcagcgtctggatttgctttcagacttgaatgtctatcaagctgccgttgctttgaatgtgagatcaaaagaagatgaattccagtaaaaaatttccttctatgaagaaaagattggggcctatgtaaacatcccactgacagctcccaatgagttattttagccgagtattagcacctggatgacagacagtccagcattccatgctaaataacaaatcagtagcttctgtggcagaagaacattgccacaagagcaatacattttcagaaggaatccttttcttcctcctttttttttttttttttttgttattgaatatggctgttcaactcttcctcctgtttttcaagctgacttgctgtgccttcagcagtttacttttcttcacagtatttgctgaattactccggtgacggaagacaggactgtgacaatcattttggggcgggttaaggagtgttccattaggcaagctaggcatctggagataaacaggtagtttggttgatggtggagaaagaaaatgtaaaggacagccagtcaaagccagatccagggcatatccctggaatacgggacgatgtgttctttaaaaatacatgtgacaaaatcctctaaagtctgcaaaatctgaattttcttcttcttcttttttttttcttttaaagcatcctgcctatgtaaatgtcaccacaaaaatatctcaagagcaggtttcccgaaaccctgttggtgtgtatttgtctgcgtgaatgagctgtgtttggctagggcttggtctagccagggcgcactgcgtgtgctgtgtcgctgcttgcagacctggagcggtttagatatgtgtggcattaatagatttctttaagtgctaaatgcaactttgaaaattacctgcaagctccaactgatctttcaactttgaaagtgaagaattacttgaggaattcttgtggtttctttgtcatttagtgagagcccagccagctactgtggaggcaaacctccctgaggttgcctacaaagggcaatgttccagtgtgttttctcttcgagtgtgcttcagccgcacagtacttcctgtttattcaaacatcttttttaccactcggcaacccccgcttcgcagaaacagccagaacccatctacagcaagaagacggaaatccaaaggcagacagtacgggctcccttcgccaaactcttcattttctctgtaagtgtccagagaaaaagaaacatttttttgctgggttaaacttttaaactagggatccgttcttgtgcagacattctctgaagggcgaaataaggtgatcc

SEQ ID NO: 29956 - DNA, 2300 bp, Homo sapien
gccaccagagtcaaacacctggcaggatttccccctttccctttgtgaaattttccaacagaaccaggttgtggaataatacataatgaaaatgattcttgaataaaattataagtttgaatgttctgcacaatactttccccaatattggatggattttttttttaagatgctagcactgagatcactggcccatttcaatttttattgaaacaaataaacccaataaaaacacttatgctgagagctgtagcgccacagtgaaagaatcaccctgtattgaatgtattgatttatttatttactgcaactggaaaatcgagtattgtgttaatgtattttataagaatcacattgctcgatgaaatggctaatttatttgagcgtatacataaatagctagcaattttctctgagacaggctaatgaaaatgatgccatgaaattgtctatacgatgaagagtgacggagacgagttattattgggtgagtgctaagacgcgctgaactggccatcatatctttgaacttttgaactgctacttgtttcgtgtgatttattgattttgctatctctctgtttagctcaactttagtttttgcccagcagtgcagataagtggcataggagatttaatttcatgggtatttggggttaaaacctatctttaaaaagaatgctaaacatgttttaataaaacatgagttgcaggggttttaggtttctgtacgatatggatctgataagaaccaaggcagtttagagggcagcccagaggttccaggctagggaggaactctttctgagctttggaagtttcaccagggccacatgcattttatttgctagatcagcctggcttcattcttaattacatgtatcatttatccccctgcctgtgcccttttgctcatggcacatgttttgcctcgatgcctggtacacagaaggtttctcgggttctcgcaggcagcatcactgtccctgtcctcccgtccttgcacaccgagggctggccgctaccgaagcaccctcattttggctgatctcatggggaaactgctttcaagagcagccacggctctcacctagggaataaagatatggaagccttctcagcgtcggggccagagctggctcgctgctgctcagctgcctccagattagttctctgtggtccccatcagcattgttaccctccttatcagcctagccctgacctttgagtgggatgtttcactcactgctttgtggtggggggggggtggttttcgtactaagtgatcatggcaagaaagcagccttactttttattgttgtctttggacctgcagaacttttcttaaaaatgtaacattttgggaactcattcttcataatattttttattttattagctaatttctaaaggatgatttgacaacagtattttatgctttttgtttatttgtgggtggggggggtggtgattggaggaggtgggaaagagctttatcatgtaaaagtaaccatcctagaaatttcaggtaataaattttcaggtgcatgaatggttaagactcttcactcagtgacacagtatgtgaatgaggaatttttatgaaggtaacggtcttgttctttaaaaatctgatttatttagcaggtacttctaaatgaccaagtaattttaaccttcagagaaagatggggagggggtgggtgggtagagaaggcttgtatctctgcaagggattgaaaattcacatcccttttaatgattaaactggcacggtctttatttggatgttaaaagccttttcttacattgcaaacattcttagcaaatttacagtcagatatttggaaacagctaacacttgaaaaaaaaaaggaggaggagggcctgtttgaactaggaaacaaaattagtaggaatggctgaaaagacaggactgaccccaacaccattagctggagaaaaaaaaattccatttcattgcaactatgttattgtttactttaccatacacatcctaatatggttacctccccgtcagaggaggccaagccaggggttgagaggccccctccgggagaaagctcctaactgcttctcagacaataagaaacaaacggtacaactccacaaaaggcttcccggaaaataagtgtcaaataaatcctacggaactctcgcttctgccactgagctctgtatatgcaaacctgtttttatgccatcgcttccccaggctgagctgcgtttgtttggaaatgtaagccactgccttttctttttttcttttttcctttttt

SEQ ID NO: 29957 - DNA, 2300 bp, Homo sapien
actcaggaggttgaggcaggagaatcacttgaacctgggaggtggaggttgcagtgagctgaggtcgtgccactgcattccagcctgggtgacagaacgagacttcatcccaaaaaataaaaataaaataaaaacaataacattaggatttagttacaatgttgaactgtttaaataaggttaccaatgaaatttttctcactacttcttcttcatatatatatattttgagacagagttttgctcctgttgcccaggctggagtgcaatggcacgatcttggctcaccgcaacctctgcctcccgggttcaagcgattctcctgcctcagcctcctgagtagctgggattacaggcatgcgccaccacgcccggctaattttgtatttttagtagagacggggtttctccatgttggtcaggctggtctcgaactcctgagctcagatgatctgcccgtctcggcctcccaaagtgctgggattacaggtgtgagccaccacgcaaggccgcttcctttattttttgtttcgtaagtgcatttaaaattatccacaaagagaaactgtccttccttcatccaacaccatcttaacagtatttagcatccatatagagataatgtgtgtttttgtaattaacctaccatttcctggatgcttgaggatttgcgactggccaagaaatcttgaaaatgttcaactgtgtttcacaagttttgagaaagctagaatctgtgatgctcttaggtaatctgaaaggcagatgaacccatcaaagactacctatattagtaaaaggtaaaggtgatagacagacgtggctcaggctcaaactagtattttactaatctagagactatgttaaccacaccaatctgtgatatacttcagatgattacaatcgacatattctaagttagggctataaacacatcccactttcctctatgccttttatttaaactgcaaatctccaaaccatcagattagagaacgggtcaagagggacaaaatgcccaggattcctttttcactgctcacaggttgtactatgacccaaacttcacaaaaatgagtgcaaggggtgggggaaaatgtggtaactgtaacaaacaagaatgctgaacaattactattcctggaaaaataatacaaaccatgtaagttcagccagccagcagactgctagttatataaagccagtaaatatgataggagtgagattcaaacacaactaactcttactaaggtcatcaatgacttccatattgacaaatccaatggtcagttctttgtcatcatcttttttgaccacttggcagaatttgatatggctcacaactctcttcttatttatttatttatttatttatttattttttgagatggagtctctctctgtagcccacgctggagtgcagtggtgcgatcttggttcactgcaacctccgtctcccgggtcccagttcaagcaattctcctgcctcagcctcctgagtagctgagattacaggaatgagccaccatgccgagctagtttttgtatgtttagtagagacagggtttccccatgttggccaggctgatcttgaactcctgacctcatgatccgcctgccttggcctcccaaagtgctggtattacagtcatgagccactgtgcccagcctaattttgttttttatctagagacagagtcactatagtctgtcacccaggctggagtgaagtggttattcacaggcaggatcatagcacactatagcctcaaactcctggactgaagcaatcctcctgcctcagcctcctgagtagctggaactacaggtgtgagcccccatgctcagctttgtttcctactttaaacacttaccttgatgactttctggttcacaatctcagagttttcatcccatctctgatctttcctgttctcaatattctatgactaaaacttttaatggtgttggctttttatttttattttacttttttgagacagagtctcactctgtccctcaggctagagtattgtgatgcaactgtggctcactgtggccccaagctcctgggcttgaacaatcctcctgcctcagcctcccaagtgtagctgggactacaggcacacgccaccatgcccagctaatttttgttttttttaatgtagagataagagtctcactatgttgcccaggttgatctcaaactcctggtctcaagagatcctcccacctcagcctcccagagtcagaacccagatcctggaactcttcttttcttcttctataccactgcttcc

SEQ ID NO: 29958 - DNA, 2300 bp, Homo sapien
actgtaattatgttatttaattgaaattataagtggttgaggccactcagttaaaagcatcttttctaatatgggggtaatgtttttaaatgagtggtcatggattggtgacatttgaaaggcaggcatttgggatatatttttggaaaactcgaattattttccttaaatgattagtgaactagagaatatagttaagtagcgtttttttttttttttttttttttttggcttattctctttaactagatatgcttgaatgtattatgtgtgagtatatatgcacatatatatatgtgtgtgtatatatttttatatgtacactttatatgcatatatcaaacagatctttgtaggtacagagtcacaagtatcaacttacaatgtgacaaagcagagaaacgagacgtatatctgacaattgtgactaaacaaaccgattgtttaaaattcgttgaatgttaaagattgaaatgcaacccatagtagaactccagggatgggtatactacaagttctttttggagtagctggagatacaacaatagcactcccccccgccccacgagtgagttcttaattactaatgaatacaattcattttaattgttattatagcaacataacatttaactgactcctgtttagtggtgtcccctggaataggcagtgtctcctgtcagagtgaggacaggtagaaggcacagcgggcgtctgattgagccagttattcatttgctgagtgtttgtgtttatgcaaaggggcctcttcctgcatatttaatctagagtaaggcagtggcttttgttgtgtttagcccacataccttcagtccttcctcacactgccgccagcctgggagccctgagagccagcaggcttccaagcgcctgtagtttctcccttacaaactctcaactttcttccgttgtgtgaaaattgcctctcccgccccaaagctttgcctcctcaccatgaacgggtaagtgtgtgcgaagccaaggctgacacttttgtttcattttactaatgttgagagggtactttgctgcccttctgagcgcctcctgaaagcagtcctggttcctgggccgttgtcagcttctggctgcattgaaatagacaagtacaggtgcctcttaggaaatgtggctgaattttggactcgcagagaaaggctcgtgaggactagggggaattaaaaagaaaagagagagagagagcagctttattattctttgtcctaacaaatcctgttttgtaactatcctgcagataatgctgccattgtttgctaaaagccttcaaacagtgtctaagactgaactgtaagaaaacagaaactctgccgctgtattgtctatacccgggccagggtcctccccgaaggtctgtgccggaataggaaaggttttcttctgtggaaatcgaatcgtctcttcattgatattaatagcacactagagatgttggccatgatgctcagagaggcggtcgggagggaaggaaatctgatcttgctggggggaaaatgacagcctcttggccccacggtggaggagacatcatccaggctcagtgtgcataatggcatcctggcttaactgtttgctctaggaattttaatcttgagctgtttgttttactatctggggtcttgctattttttgttcccgtactgtctttagaaagcaccatattcaggggctaatccagtctttttttaaagtgaatttttaaaaacagactcagagaaattcatgtagtgtacacttagatcattctggggtatgatgggggtattctgctttctttttgagggtagagtgttatttcaaaaataagttgccacaattaacaagggtgaaccatccaaggaagatatgtcctgtgtgaagatatttcagggtgtgggaattatgtccaggctctaaaagaaggagttttcatgaccggttaactgttgcctctgtttgagtaactcttttcaacagaagagtgtgctgttcccccgccggttggaaactgtgagaatttaaataaaatttcatcaaccttattaaaatatgtagggacttgtgtcttcttgggtacaaatcagtctagagacttagaagcatttattaacagtgaggctgctgaaggtttttaataacaaaattacaaatactctatctaattgtaagtatatgacttttatacttggtttttaaggggaaaaatacttttttttgaggcaaagtaactccgtcagagcaccttctgtgattagtgctattgtattcttaaattttgattg

SEQ ID NO: 29959 - DNA, 2300 bp, Homo sapien
accaactcatcttatcacttactacttattttatgccatcacaagaaacagtatttagacaggagcttgtcctatgccattcttcagttttgttcgaaattaacataggctttctttaagagaaagggcagggtgaaccaagaatatcacagtacactagacattaggaactattatgttcagaaacaagagcaagccatgtgttcacacatcctaacacactgacttatttcgtagcttggtaatgcatacaaaatcgtacacaaatttgcatcggacagctgagatcaaaatttctgtggcattagagagtggcattcactggcaacgagcttgtcattctgcagtgaagttatgaagaaggttgagctggggagggcgaagttcattgtcgtcccattccttatcagtatgtagagtttctgttctgatagcaggtgaagtacatctaaaaattgccagcatggaggtacagaaacacctgtagttttttagttgtgaatctatttgtttagcatttctaaccaaagtagtttcagttaaatcattgaaattaggaacataaacacattgactctaatacgcaggtgtgatttttctttgtcttccacctacctcttctaatgtcttatgtatttagaaacctgtttatttgtaaatgaggctttgtgaggttaaagtggaaaacttcagaaggaaattttaaaggacttatgtttataaagccccttttcctttttaatgctcaattcgtagacatgttgggaaagaaatttcatgccttatgactgaagtcacctctctgagattttttaaacttttatttacctcgtatttcatagacctatgtgagattgtatttagttatactttgttatggtttagcttttctaaaaataaactttgtgaatatttatctaatgaaacaatgattcatttataaacagccccttaaaaaagaattcctcaattcgagtggtcagattgcatgatcagtaagtgacccctattcattttacattgcacccctttcttccatagggtttacatgggcaaaaattatatctgagaataggattttctgctgcttgtagaattaatccctgtttgtatgggagaggacaagaaaaggttgttgagggctgatgaaaggaaaccctcacaaagttgcaaagagctgcctttgaacttggtaaggttctaggaaatagtcctttgcctgggctgctcccagccatgaaattctgggttttaaaggaaagatgtgttgtaatgttgcccatcagtgtacatcttggagcctccttgcaggttactgccacacacacacaaatgcatgaaaattacatttcacttcttttaacaccggattaaggggagccacagagggtgtttagggtggaaaatttaaggaggcatttgctgtcaatgctgatcttgaacttggacgatcctgagagctagtgcctccctaaattttgcaccctaggcaccttgcttgcctcctataatttgggccctgctctatttttgcaattaagaaaaaccttgacccaagtaaaacacatcaattttttgctctttctatatttctaccctgtttttattaccaaaatttaataatgacaatgaatatgatcatataatattgtttgattactgtttctatgtagtttccccgaattggcaggcattctgtttctgaaccaaaaaccagtttggggttaggtctggtcataacacgcattttgttctttgatttcattggagctagggtttgacattagctaataaactttgcatgcccacgccttactaagttgtacagttgcaagtgtcctccatgaaaaagacgtgtgccggcattcccaggtcaaagtttgctaagcaggtttctaaggattcttacttgccagtgatttggttctgaaattgtggcaatggtaatttggtattcaaaacagagaagtttggaataggcatcttagctggggacagtaaagcagccgacaggaattatctttgttgtagacactaccaccattacctactagttaaggtattttgcaaagtgttcttgaatgcgtcccattttattcttaaggaaaactcctttttgcgggtaccattattacctactagtttacatatgaggacattgctgcttggagaaattaaatcatttacccaagttcacaggtcaataacaacagaccctaacccatgagccagtgctcttaataccagtgatcttaaccactgtgtagtctttgctatgttccattaattgtccagggata

SEQ ID NO: 29960 - DNA, 2300 bp, Homo sapien
gtttaaaataataatatctgctaagaactttgttgtaagaatagaatgaaataatgattataaaagacttaaaacaatacccagtacataatgagttttcaacaaatggcaattatatttttagagagtaccgaaaagttacttctttcagttgttgattcatttattcactcaaaagatacatattgagtacttgctatgagctgggcatttttctgaaattttggagcattgcgatgaaaagaaatagttcttttatctaattgagcttatattctagtggggaagacaaatgagcaaatagatcagggcgaaagctctgaagtaagcacataggatgatataattgagactaacttggaacctaacttaagtaggtgggcaggacaagctttttgaagtggcctttgtccctaagtcccagtactgagaagggaccagttgtgtaaagaatgggctcatggcatcttgggaagctgagatagcaagtgcaccagccctgagatgggaagacacttgccttgcttgaaacaaaaggaggaccactgtatctacattgattatagtttgggattgggttggtagttaaggcagcgtcagagaagtagaaagtggccagattatgtagggccctcaggccatggaaagaaattcaaattttatcctaaagatggtaaacaacttcagcccatttcttcatttcttttctttttcttttttcttttctttttttttttttctatgtgacatagacttcatggctttagggagcatgtctgagccttggaagtacttcttggatctcaaagctgcttggaggcttggagaataggactttgccatttgactcgaagtgtggtccatgattggtagtatcagcatctcctggtagttttctagaaatgcagaatctcaggcccactccagatctagtgaatcagagtcttcggggatgggtcccaggaatctgtattttgaaatgctctccaaaagatgcttatgcacagaagtttgagaagcatcaatctagaatacatctggacagatttctgcaggacatggagctatgctcattggagaggaatggaagcctttcctgggcacccaggggatgctgccagccgccgggatgctggctcaatagggttaggtactggtgccaggcttagcattctaagcgcttgaaaaactctctggtcacagcacatcttcagtgttgatggcaggtcagcatgagagtgaatcatggtaaaaacaaaacaaaaaccaaaaatctctttttaatcaggaagcttaaaggagaagttaattagtttaaagtatttagaagaaatatgcttctttcaaaaagacagaagcttagaggtagaaggaacttgaagagcatcggttaatgccctgaccctacaggtgaagagactggaatcgagatgataaatggctctcctggggccacactagtgactgaagaccataccgggtccagaactcaggcttctcagcttttgagccctgaccatcgcaccgtatgtgctttcttgatggaaacatctccatgagtattgctccttatgtaatccataatcatttttagaataaaatagaattattttggagaaaaaaatgatgattacctttcctactagttttaatgttcgttattagtactagtatttctaaaataatttaaaattatttaaattttttactttttttgttcttcgaaaaagatcataacttaatagggaatggtacatttatctgtgtaatattttagttaaaacagtttattgttacctgaagacttgataatgggaagtggtattttcatatgctaaaatatttaaaatatttggtacaaagcccataataaataacaactttacagtgtacgtgttgaagtgattagtaaatgtatctttcaaaacagtatttccggttcatatttaacagcatcacacttgatgtattgacataccctggcttgaacggtgttttcccctacctcaagaatctatgtcttgctgttttcaagtgtaaggaagtggtggttttagaagttacatcttagttatgtgtaaaaaatatttttgtgttgcagtgtcccagaagcttttgttgacaattccagtttccgaacaaaacatttcggcaatggtgagggcttcgatcccttctctgatttgctgtcagccatgaacggatggatgtgatgcctgctagccaaaagggtgagtgaatgaatgtttgtgattattcatctgaaaattcacaagacaaaaagtccttcaagacagttg

SEQ ID NO: 29961 - DNA, 2300 bp, Homo sapien
ttatggaattgcatattaaatagaaatcttgcagttactgaaaacttttaggattttaaacaaacattaaggagcatataatgttctagaagataaatatttgcataaggcagttcagtccttcagcatgtgtatttttaaaaacaaacaaaaccccatcaatatttaccctaagtgtaatttgcaaagtaaaatgagagtaattttgaaatcttgtgtaactctgattcatttattttcataggatggatttacattttggaatgataaatgtgcaataaagagctattaggaaaaccattatttctctcagatttgggaaattctaacactgctttgttacatatcactatttcccaaagaaaagaaaattaggcccagacaaactgtgacttacccaaggtcacttactcaactagaaagtggctgagctttggtgaaaaccagtccttctctccctcagaccagtggtatttccatgacagcatgctgatttttttcagggagcatatgcgcgcatgtacatgtgtaaataaaatggttatttttaataaaaaaaaaattgttttaccacccatggtcctggttaaaatcgctattttgcttccttttaacagactgcaagcgtggtgacttggaaatatcattttctttctcatcctttcaagaagcaaattcagcgtattgctttacagtcttaacatttttttatgtctctagatacagaattgactttgtcttttctttgccttctaagctgtttagagcaaggtgagattacaatcataagctgaatctggaaaaaaaaagccctattatctttcttgactaccctcattgcctggaaaagaactattatccaagtttcacttaatcatatggtaacttacaacagttgtgatttgtaaaatacatgacgatttggtcttgtctcctttgtctctcttacctctttgtgatcatattctgcttattttaatgcatgaccagccaactgtgttatttttcagaaagaccaccccacatataaaatggagtggtctttaaatgtcttgggctttgaaagattgtttagccattccttcccaagtgcttcaggtttggattttggaaacgtatgtttttgccattggtgtcactgcaaatgttctcatcttccttttttctttgaatttgatcaaactttgttcacttgtagtacttccacgatcagcagagtctgtctagtctttcctgctttttccttttttttgttccaaattttcctttttttttttttccatttctttactttcctttgatacatctttttaaaaagtcaaagtggaaatatatgtaattgaccaatgctatagcagtttatagatgatataaattattaaaagaaataaatacatattttataactggatttatatcataaaatatttctaacctttatagaaggatttatatatttttatttatatcttttaagtacttatatctttttaatactgctacggcattggtcacttgtatgtattcggctctgattttcctaaaagacatagtaaaggaaagtaatagaaatacacacatatatgtgtgtatatgtatgtgtatacacacatatatgtgtgtatatgtgtgtatatgtgtgtatacacacatacatgtgtgtatatgtgtatatatagtgtgtaaacacacacaggcacagcatatagtaaataagagaatttcatatctttacaaatatattcaaaagagaaccacttcaaacacatgggttttactgaatgaagatcacttctacctttatgtggtggtctaaggtttctgtcactttctttgttagttgtatttgaaagcaggtgagtaaaccagaaagaaatgattcagtctgcctgctccaggcacagaagtagagggatataggcctgcagctctcaggctttctgtggacctgcttccccactctgttttgaggcagaaactgggggatgtcagctcaagctttgcttggccacatgtgcctccacggctagctgagagtcacgtagatgccacttgtcacatacacccttggatctgagctgcttgagggtgttaccacacatcacagcttggtgctggggctcagcatggccaggtggctaaccagggcttggtgtcaactacatttgggatgatgacacttggaggacacagagccactgtgcagcaggagtcgccactgctaacagccagaggttggtgcccattttgccccaatcctcctcagtcccttctcaagtggaaattttgcaagtcgactt

SEQ ID NO: 29962 - DNA, 2300 bp, Homo sapien
ctacgcataatgatgttgggtttggatgtttaaatgatgtttgtattagaatgcccaactgaggatgtccaaaaataaggtagggggtaacgctgggtgatcacagagcaatactttctgccccagaagtcatttggggtcgataaaggagtacatgagagaagaggtgaacaaatgagatataaataaatcaacgagtgaatcagtcaataaatgaacacagatccatgtgttacttccacaatggccaaggaaacaaccaattctccactctattgtgtataatctcccaaaagcgcacaggtatatgaacatccacatctctcactgaccaccatgacagcagttaaagattctgcccgagccgctcctcatgcactcagcacagatgtggctgaatgtgcgtctcacgggggttatgatcacggtagggagtgacagttggcaaatgtgaggtccctcttcccaacctgcaaagcagcacagccagtttattctccaactgccctgacagaggtggggaaatagagacattgaaaacggtgagtggattacaagttaataactggtttgcaaatggtgagctgtcctgagccacattctcgttccccaaggaactcaacaccagacaccttgccagggaaaaataatacagacagactacgtaaacacattcaaatcccaaacctgactataaaacccttgtgtagtctaatgtttgacccaactaaagtatcatttccagtccctgtagtgtgaaaattaaggttgttgtgaaaaggcaatccaacgggcaatttggaaaatagataggaatgctctgacgttcaaaatctatgactgtgagggagagaagcccaacaggggatcacgcatttttccttccttcaacttatttttccttcctttccttattatgtaccagacccatgggtggggaagtcaatgctgttctctggaaaaaaagcactgtgccctccattgattttgaaagagcaccctcctgaaggcgctgggctgacaccagtgcccacctgctctgctcatcttcagcttcaaaaggccacagggacatgagaagtgtctccttgagcctgggccctgggtgctcctaataatctcatcacaccccatcccctgaaacacacacacacccatcttctccctgggctctcagaatcagtctctccctcacctcacaaagcactccctcccaacattcacagcccccacaaaactgctgcataccattgtgtcaggaggagctattgtgctggaatgatgaggataggaaaaaagaggctgatggcccaaacaatgtgggcaaagtgggaacaaagcaaaaaagcacaggagataagatttttaaacttccccatttccatcatcaaacattctaaagaaaaatgagaaagtggacggtcaatacattgtttccataaaacacaacttcaggtaacagaaacaattctcattattaataaacagccaagaatcaagtgtttaccatgagccaacactgttaggggctttgcacacatttgctcatttatgtctcccatcaatcctaacatcaggttccatcactgccaccgagataaaccgaaacgcagagactccgtcatttgctcaggatgccaaagctactaagtggcagataatcagtgcatattaaaggagagaattcaagctacttagtctaaggtgaaacattccagaatgatctaattatcttaagattctaaaatgtggtactaccaaaaaatccactcttggcttcaaaccagttggacttatacccttagggaagctgttagctttattagtgagggagccccaactgtccaatgcagtggtaccgcacgtccataaaatgacttttgcattctgtaagccttgggtcaaccacatctctacttgatggggctcgattagcttgcaattcctgaaagcagtgaaacaaatagtgcacttccggaaagaatctccttatttaacaactaacactttgggataaaagaaagaaaagagtggacgttctttcctgaggctgccttcaggttgtaggccctgcaggcctcttccagaatgaagcaggtcacaatgaagggcaggtgacaatgaagaagggcagggaaggtgactgagatggaagatacagtcaaaatggtaaaatcctgggagaagggctatagaagaaaagaaagaaaatgaaagaaaggaagggaggaagggaggaagggaggaaggaaggaaggaaggaaaggagggaaggggaggggaggggaggggaggggaag

SEQ ID NO: 29963 - DNA, 2300 bp, Homo sapien
taataatctatttaaattatattaaagtatctgggcaaaaatttaattaaagacagaagtactgtcaagccctgtaaatatcttgacaggtctactcaaatggaactgatatcacgaaatatttacatatgtctgctgtgttcgggaacatctcagcagtgcctgtgcaaagctaattgcactttccttccaaattgtatttttaataaaatagttttttttttaaaaaggaatatgaatacatacacagttgtgttccagtgttctgtttactatttacttctctatactcagaatcatgttgtgatgagtgtatttcctcaaactgctgctaattcagataaatagctgaaatgggatcattgaatagaaagcccatgtcattctgtttgatttcaacagtttgaagatatcagaggctagcatgttataggacaatttactgagggaaaaatggatctgaatgtgggattattgggccttgtttatgttcaatagaatagatttgcttaggacaaacattttctctgagttttatgtttggacatatatttatttattacttgtaagtcaggtggacatccacattttaccagatgctctgattttagctaattttgtgattcactttgtttactaggacactgaagaatatttctagcatcaaactgaatttccgaggtgtcctttctccctcccagctgtgcaattgagtcataatgtgactttctctgctccaggttccctgcttttgaattaggggtaatattttaacatatgttctttgagcttagggatccaatgatacagggctttgttattactcacatttttaaaagatattcttggtgctctcaggacagtgaccgcagcttttgttgggggagggtgtgatgtgagttttgcttgagtttcttttgccctggtgcctacctcctgatgaccagtggcactggtggcttcccctcctgggggtgagcacagagatggaagtgaatgctcatgtctgaagtgaagggaggttgcagttggtcctaattcagcctggttcaaagtgaggtcctcgctcacctacctctgtatctgtgtgtgtgtgtgtgtatgtgtgtgtgtgtaggttattaaaatacagatccttgagtcagaatttttgctgattgacatggtaacgtacatttataacaaacttcccttgataattctgatgcatgctagagacctgtgaatcaagtgatttattctttcagatgtgtggaactgaaatctctatcttcacttggattttactgatgatttctttgattttaccttgaggcccatcctgtgttgtttttaatgtatttggatttttattacgaatgaaaaacggtggtttttaaccaagcacgagtattggaatcacagcagagctgttgttcccaacacagacacagttgcacgactcctggatgtgccgtatctggggtggggccagcatctgtgtttttaaatcgcatcccacatggtcctgatgcccaccaaagtgggaaaactggacctgtcaattatcagagttggaggaaagcctgcaacccttcttaagagtttaattgaattggttggccattgtgaaacctaagagaagaaaacggagctcctttttcaggagggcacaaaaagaaaccttggagacttagagaaacagaggcagaacaagagcctcacagttcaataacgtgataggaacaacctggaacatcggtggttttcaccaaatgtcaatatcagataatttccttttgaattttgtcttgcctgcatccatgtttcccaatgggtgttgtcatgctgtagctaccaattagtgtcagatgactctctagaatttttttttctgagtattccatcttaattttaaaattgtaactgtttgctctttggattaaccctgctggcagaagtattttgattttcccaagcatcttgggaaattctctatcgtatgtgatggggcatgcacgaatattgatggaaatagcctagccaacgatgccacacaaataaagaaaccagaatcctaagaagaaggcatcctacaagattatgaaataaaggaagataaaatgttaaggaggcttatttaaatattcagggcttcaactaaagatctaaccactaagatcaaaagagttatttaaataaaagttgttgagacattttttcatctgtattaataatgtggcttttgaagttacccggtaataatgtgtccataatgcccacacctaatttttaatttccattttggctttaggtgtggc

SEQ ID NO: 29964 - DNA, 2300 bp, Homo sapien
tatgtcttgacaaacaagacgtcgaaccctagcctctaggaagctaggacattccatacaaactaaaatgcattttattggtctagattctagtctaaaagattcagtgaatagtcttatctggatagcatggaactttatgcagcatgcatgcaatgtgaattctaccaggctgaaattaccttagcagcctccctttcttttattctgtagcatcagcgaatggctttgttattttttttttttaacttgcgaaagatacaatttcaaagcgatagtcttatgccacccttgaaattaagatttaagttcttctgtaaattaatgtttaacaatatttgtaaaggggcattacgcgaaagaatttaataataaccttttcaggatattatctacaactgtgctggtctcaagaccaaagggacagtaagcctctcccctccccgcaaggggaagtactttgtaggaatccacaggggtgacttttaatatattctcataaagaattggcctggtgtacaccagccagccagtagctggaaatgctggtttgggagtctggccacttctgtggtggtgggtctgaaaaaatttacttctgttaacaacaacaacaacaacaacaacaagacatagaggtcttacagctttccaagtcacgttttggaaacacatactctgcttccttctctatgcgtattgataaaagtgaaagaaatactagtgtcttttgttttatgtatgtatatttcaaaacatttaattcaggctcttagtttattccttcgaatttctaaattcaaccaaacttcaaaaaccgcaaaaagaaaaaaaaaaatctcaccttttcaaagaattggacaaagctttttgcacgtgactgatcactgggagagcaggtaatttgtgttaaacaacggactgacatgctagcccccaggcgttttcctaagaggagtcgtggcaagaacacagttcctgatgcagccaccttcccccaaagtggactcgattgcacattcctgcagtggctctgacaagggggcagaagctcgtcccacattcacactctcctgattccgagaaacaggggagaaaacccctcgctggctggcggggtttctgtttccttgcaaacaggggtttgtccttctgctgaactttcacctcccgaactcgccttctttcattggacaaagtgcagaaagaaagaggagagaccgagggaggacgggagagagggagaaagggggttgaaaacaccacctcccaccccgctctccttcaactgtcactgatggcaaaacactttcacttttaactggaggaaactcacattctagcctgtcctctcccctccctttcatatttttagctcagaatccaagcaaatagccatcgcattcccatcttcgtccctagttaacactctcccttctcgttttttccgctgtctgaatgggccccccatttcccatctcctgaggaatctccccctccgcccccctgccccttattttccaggtctttcctgccagatccctctgttgccagggactgctctggcgttcccttcctctctctggtccgcggggctctgcctccctctcctctttccaatcctgcctggacgcccctcacttccccctccctggatccctccccccaacccccccccccattctttggcaattgcgattttttttttctgggagcccggttgtttacccagcaggtggatgtgacgtcagggacgcacaacagcaaaaaataacaacatctccctccgcgacgtgttggcctctctcgcgcgccttatttatttatttgttccgggatgtcgggggggaggggggagggaggaggggggtgggcgccagcgccccggcgaacggcaaagagggagccgctcccgctcggggggccgctggagtgcccagcggggtgcgtgaagcggagaggggacccctgcgggaggtagagggtcgggccggggtgcgcccccgggccggtgctgcccgcgcctctgccgccgccgccgccgccaccggcgctggctgggctccgggaagctagtccggagcggaggaatctattgttatttattgtgtggcggttgcacgctgtactcgcggcggcccggccctcgcccgggagtgcgtgtgtgcgcgcgtgtgtgcgcgagtgagtgtgtgcgcggggtgcgcgcgcgggcgggagtgggcgcgcgcggggaaaggcccgaaaacaccttagtttgcaccgagagaccatttgcagcgggtgagtttgtatttttc

SEQ ID NO: 29965 - DNA, 2300 bp, Homo sapien
attccgtgtgaattcagcatatggaatttccagtgatgtcaaagagttgttggcagtattaactgagttgacataaagcttttagttcagtgcctagatcatagtatttaataaatgttagatgttattattgacagcttagactgtgagctcctcaagggcaggaatttttattttttcatccctctgtgcccactctgtggtctagcacacagtgggtatgtcattaatccctttatgtcttgacaaacaagacgtcgaaccctagcctctaggaagctaggacattccatacaaactaaaatgcattttattggtctagattctagtctaaaagattcagtgaatagtcttatctggatagcatggaactttatgcagcatgcatgcaatgtgaattctaccaggctgaaattaccttagcagcctccctttcttttattctgtagcatcagcgaatggctttgttattttttttttttaacttgcgaaagatacaatttcaaagcgatagtcttatgccacccttgaaattaagatttaagttcttctgtaaattaatgtttaacaatatttgtaaaggggcattacgcgaaagaatttaataataaccttttcaggatattatctacaactgtgctggtctcaagaccaaagggacagtaagcctctcccctccccgcaaggggaagtactttgtaggaatccacaggggtgacttttaatatattctcataaagaattggcctggtgtacaccagccagccagtagctggaaatgctggtttgggagtctggccacttctgtggtggtgggtctgaaaaaatttacttctgttaacaacaacaacaacaacaacaacaagacatagaggtcttacagctttccaagtcacgttttggaaacacatactctgcttccttctctatgcgtattgataaaagtgaaagaaatactagtgtcttttgttttatgtatgtatatttcaaaacatttaattcaggctcttagtttattccttcgaatttctaaattcaaccaaacttcaaaaaccgcaaaaagaaaaaaaaaaatctcaccttttcaaagaattggacaaagctttttgcacgtgactgatcactgggagagcaggtaatttgtgttaaacaacggactgacatgctagcccccaggcgttttcctaagaggagtcgtggcaagaacacagttcctgatgcagccaccttcccccaaagtggactcgattgcacattcctgcagtggctctgacaagggggcagaagctcgtcccacattcacactctcctgattccgagaaacaggggagaaaacccctcgctggctggcggggtttctgtttccttgcaaacaggggtttgtccttctgctgaactttcacctcccgaactcgccttctttcattggacaaagtgcagaaagaaagaggagagaccgagggaggacgggagagagggagaaagggggttgaaaacaccacctcccaccccgctctccttcaactgtcactgatggcaaaacactttcacttttaactggaggaaactcacattctagcctgtcctctcccctccctttcatatttttagctcagaatccaagcaaatagccatcgcattcccatcttcgtccctagttaacactctcccttctcgttttttccgctgtctgaatgggccccccatttcccatctcctgaggaatctccccctccgcccccctgccccttattttccaggtctttcctgccagatccctctgttgccagggactgctctggcgttcccttcctctctctggtccgcggggctctgcctccctctcctctttccaatcctgcctggacgcccctcacttccccctccctggatccctccccccaacccccccccccattctttggcaattgcgattttttttttctgggagcccggttgtttacccagcaggtggatgtgacgtcagggacgcacaacagcaaaaaataacaacatctccctccgcgacgtgttggcctctctcgcgcgccttatttatttatttgttccgggatgtcgggggggaggggggagggaggaggggggtgggcgccagcgccccggcgaacggcaaagagggagccgctcccgctcggggggccgctggagtgcccagcggggtgcgtgaagcggagaggggacccctgcgggaggtagagggtcgggccggggtgcgcccccgggccggtgctgcccgcgcctctgccgccgccgccgccgccaccggcgctggctgggct

SEQ ID NO: 29966 - DNA, 2300 bp, Homo sapien; identical to SEQ ID NO: 29965

SEQ ID NO: 29967 - DNA, 2300 bp, Homo sapien
atgtgctttgggggatccaggaatgtatttactgggcatatgtagtagagcagtcagataaaggaagaaaagtcatattttaatgttaaagtgatagatttttcatgctaacagtctattcagaaaaagtttaagagttttgaagtttttttcccctgatttaaaaaataattaaagctgaaaaagatataaaacctacattaaatagccaacttagtatctatccaagttgatactttagtaactatagcccagtcaatccacgtggactgatgtatttcatcaggggcccaggtatgaactgtcattagcaaggtattgattgagtacttcattctttgccacactctttgacatagttattttaggcttaaagtctgacaacaacaaaatgcagtcatggtgtttaatgtggatttgcttttctaaaacaatgtccagcaaatcgagttgtaaattcagtgctttacagtagatttctttattggactgcacctgcccagtggaagtcccgtgttttcccccaaactagtccgtgattgtgcttctttagtgaccttctgataaggaagcggtattcagaattgcattttttgtttttttcagacagagtctcgctctgtcacccgggctggagtacagtggcccgacctcggtgcactgcaacctccatctcctgtgttcaagcgattctcgtgtctcagcctccccagtagctgggactgcaggtgagcaccaccactcccggcttatttttgtattaataattttagtagaggtgggttttcaccatgttggccatgctggtctcaaactcctgtcctcaagtgatttacctgcctcagcctcccagagtaattggattacagtcatgagccacagcggctggccagaaatgcatttttgatattcaggttcaactcttagggagcattcactggttcatagttcaaggactgtagtccttgctgtgcttaccccaacctgggcatgggcctttggcattgcctccacctctgagctcatgtgagttttgtctctagtgtgcagtgttttagcaactgtccaggaagtacaacatactgagagtccttgggggcaacgtctctgggatcagtttctggtaaagagcattgcttttatagattccagatcctagtgggtcagctgtgattgaggtgctttctcctctcagcaagcttcttatttctcaccaacaaccagatgtgggctttcatgcattatttgtgtgatgaaacataatcttaggctgatataattgtaccccaacatttttgagcatgaactgctaattcaatatagagagaaagaaaaggtggcaggaattgagagtcttgaactcctaaggtttgatgggacaggtcattttaccatcccaggcaatggtccttggtaaaaccagttaaattgcagtgtttctggtgactaaacctgtagtatgttgccatctagtggaacacatagcaaactaaagattaatgcagtctgaccataaagttcagctgagctaattaaatcagccagagaaaagaactgaaagtattttctaaaagcaagtgttttggtaacagcaaattcatatgaaaccagagttgactttttttaaagtaggcaaatggtcactctgtttctcaagagtgcttgaatatttgccacccagttactaacaagtttgcaaacatatcaccaggccaggacactgcattttcgttgtcgtctgtacaataggcagtttctcatctaaagtcctggagaaaatgcttggttatcagtaggttattttggtatgttttaaaatgtgattttcaggtgtccattccctttcttattaatacatacttatctttttttttctgttaagtttccaagaataaatctgctgatttttagaagaagccaacacatgacttcacaaagtagggatttcacattttaaattccaactagcatccccaaaatgtccagtcctgtggtttgagacctgatttttaggaagacgtgaaagattctactgtgggctgttttgtgagcactgactgcttgttttgtttgtgtctttgtcctgctcctgcttgcctagatccctccctggtgccacagcagctgagtgcgcatcaaatctgaagaaaatctacacagtacagacagtacaggtaagatcaagagagggactaactggattaacacggcacacgtcagacacctaatcacccaacttgaaatctgttgctgtgctggcagcccctgtccagggttctgctctggagttggctctcggg

SEQ ID NO: 29968 - DNA, 2300 bp, Homo sapien
cagcattggtattaaatgcttccattttggttataaaaaagatatagatttataacttatgaatctagatatatgcttgcatgtgcatacttgcatttttctggaaggaaactgttgccagtggtttcctctgggaatgaagattgatagtcttgggagggagggagacctactattcacagcttgtttttacgttgtggacttgttagtgttctgtgtagagaggtaggagagtctggcagttgaaagtctagactctggagtctgaatacctatgttcaaatcccagctgtcccacttactagctctgtgaccttggggttatcttaatcttatctctgttcctcatctgtaaaatgggttaatagtatcttcctcattggcttattgtaaggattaaatgagttattacgggtaaagtgctcagagcagtttaaacaatgccatataccacgcttcttggaaaaatgaaaggagatattaagcaacaagataaatgcatctaaccaaaagcaccctcccctgttttagtgttggacagattttataaaatctgtcattgcttccagcattgtatgttgtatagaagttaagtttaaagcagcggtcttgtttttattattgtcactttatgtgaccttgattaccttttagggagggcatctactctgggattcatgacagtctgctatgatgctgttgatgcccctgaactcatcttgttttgtagctcttccatcccagcgaatgctcaaggcatgaacagaacacatgctaggccaggtagaaggtcaatgaggagatggcatcccacgcccttcactgttcaaagccagagaggaactatctagaaattcaagtgtaaagaggatgtccatgctggttgtgacatgtgtgttcacaggcctcatgcctttgcttttcttttgaaaaagaaagtgacagagacctggggagatgctgtgttaggagggcccctcctactttgggctcaggaatctcaccgcctaagggacttcctgggtgctcagaggtacaggaagcagagcgctctgtgttcacaggtgcccgctttcctcctcccgactcgccggtgctttagggcagatctggatactttggctgattttgggaaatgttctctgaagttagccacacgttaagccaggcttgaggccttcactgtggtcacatggtagctccagaggttgggatgggggctctggccccttcaaatcagcggagttaggaagtatgctctcaccaagaggaatgcaaagcccacctgctccaacctcatgccccagtcggtggttctcttgttcgttcttctttctcgccctttgttctgtactcgcgggcactggagtctctttatccatttggccatcggttcccctctccatttatctgtcacacccaactgtgcttccatctgccctccatccctccttctctcctccagccatctgccagccttcactccatccttctgactgctggtatgtctgtccatccctccttccctcgcaccacgtgggtctggggctccatcccctgtcccatccatccctccatctgtccctagcctgccgctccatcccgctgcccttttgcatggctgcagagccagcccgcagaccgttccccggtccctctcacccccgtgggccctctagcccgtccccggccgccactccaggccaggccgtcagtctcccacgctgggcccgcgcctgagcgggatcggccccccatccctccgtgggtctgtctttgttcggcggccccggcccggccgtgcctcccacggcccctccgcgcggctcccaggccctgaaggcggcgggcggcgggcggcgggcggcgggcggctagcccggggcggggcggggcgcgcggggcggggcggggcgggggccgggggtgactcagccgcgctcgccccgcggtccgcgcgtccgccggccttgcaggcggggcggagaaaatggcgctgcccccggccgccgcgccccccgccggggcccgggagccgccggggtcccgcgccgccgccgctgccgccgcccccgagccgccgctcggcctgcagcagctgtcggcgctgcagcctgagccgggcggggtcccgctgcactcgtcctggaccttctggctcgacaggtgagggggcgcggggcccgccgcgcacggccccgacccgggtcctgccgccaccgccgctttgtctcggcgcggcccctcgccccggccccgctccgctgtggcacagacctcggcccctccgcgcgtccgcc

SEQ ID NO: 29969 - DNA, 2300 bp, Homo sapien
agtatcaaactgcaattcctaacccatacaccctccaaaatctattttctatcaacatacatttacagatgtgcctggtcagccacttgctgctggccacttaggagtcccaagtcaggtgctcaatagttgattttcttgaaaaatcacttagatttttaaaaaaatatccaaactgtccccaagggccttactattcaaagtaaggtcagcagaccaacagcattagtctcaccccggagcttgttagaaatgcagaacctccggccccattccagaactactaaatcagaatcttcattttaacagggtccccagtgatttctgcacatagtgaagtttgaggctctggactaggtttaccggctctgctctgtcatccctcctcaacactgctgccagaataatgttcctggagcacacctagtcatgtcgctccccttctcaaaagatttcaagggctcctgactgcctgcagactaaagtttcgacttcttagcctgatcattaaggccctctatgatcttgcactatcctgaaaatgcccatcaaggtgcctgccttgcatgtaatcagtaggcaacaaataattttctgcacagaagaaaaaacaaatgagtgtgggtgagaaacaatgcgttgcttaattctggctttaccatgctaagcactggggatgcagtggtaccaaaaaccaggcatgatcccttgccttcaaagagcttagagcctagttagaagagcatgatttttaaaaagaaatgaaagtatataatgacaaattataagtgctaagaaggaaatgactagagggcagggatacagagtaaaacagacgggttagaaggaggccctacggagagggagcctgttgtggggctggtccaggcagaggtaccagcacatgcaaggtcctgcgagacaaatgcggtgtgtctgagaatcataacaggggctgccctttcaggcttacccagaaaatagatatcctgggaggaaggtggcatagggttcaccttccaagtcacttaaagatgaaatgctgcatttcttttccctgatataggtccttcaccgggatcacggatgagttagcgagcaggggatgctgcggagtcgctgtgagtccagcactggaaatcagaccaagcgaaatttgaatcccagctccgctacttcccggctctcaactcccttgacctccaagcctctgcttcctgaggtataaagtgggattaaggatggcaacaacttcgtgattactgttgagggagataatgcttgccaagctccccagcacactgccacccacatcagtgcgcacctgagtatcagcggttttaggattacgatgactattactatcgtaaattactcccagctttcgggcagaaggctcattccagatattcctgtcccctctgaggcctcccgaccctgccagcccaggcaacctcccccgcgcacggccaccgtgaccccagcgcgggcgccgccgccggacccccgttacctggggccaaacgcgacttgtcgccaccttgcgtcctgggccctgcctccctcccggccgcctcccgaccccgcggctgctgcggaggcgcccccagcccagccgggcccaggcggtgcgggatgcctcggcggggctggcggcggcggccgcgctgcgcgctccggcggaggggagggggctccgcggcggcggcggcggcggcggcagcggcggcagcggcggcggcgggcccggcggggggcagagccaagaggcgcggcggcagcagcggaggagtaggaggagacggaggaggatgcggggggctgcggacggtggcgaggccctgtccgcagtgaagcccgcggcgcctagggcgcagggagtggccgcctcctcctgcgcgcaccattcctgagatggcggcggcggcacagcggcggctcggggagcccaggaggggccggccgggagcgggctgagccccgcaggacggggagctcgcccagggccggcggagcggcggagctcgggccgggcggcctgcgggagcggcgaggcaggggacggccccggggcggagcgcacggcctggtgaggccgcgatggcgaacgcgagcgagccgggtggcagcggcggcggcgaggcggccgccctgggcctcaagctggccacgctcagcctgctgctgtgcgtgagcctagcgggcaacgtgctgttcgcgctgctgatcgtgcgggagcgcagcctgcaccgcgccccgtactacctgctgctcgacctgtgcctggccgacgggctgcg

SEQ ID NO: 29970 - DNA, 2300 bp, Homo sapien
caaggaccctgcagccggcaattcagagggcatttcggacaacttccccccaccccccactttctcctgcttccaacagaagatcctcaagaaatctaacttgtgaagaagtccccctaggttcctctacttcactgcaaaatgtaatgccacttgaggttgtcaaaaatagcttctgtagaaaactggccatggtctttaggaaacgttgcatgaagaaaattagtacagcctttatagaaaaagaaaaaaaggaaccacacatggaataaaagacgtcagtaccgctacaaaaagactgcagggcctattgtcaggaagaaagtcgagttaggaggacgaatgtgcggagctggagtgggctgagcatcctactcctcacccaccccacccccaaaggagtcagtacaatccaagtgtctgtccacttcgagtcattttgaaggcagcttagaaaattaaacaggggccagaaggaaaagatacaacgtcaccgtccgagccaaagggaaaggctgggttgggggtctatgtggcggggcctccctcataaaccaatgcctttcaggtcgcagggatgggtcgcctgggtggtccgggggctctggcagcaggggaactgggccctgaagcagtccctcagctccctgttgaagaggaagcacacgacggggttgatgccggcctgcgcgaaggtcagccacacggaggccgtcaggtaggcctgggggacggcgccgggccgcaccaggacccgcaggtagctggccacgacgtagggcccccagaggagcaggaagagcagcgtgacggcgtagaacatcttgcacagcctcttctccgtcttgaattcttccagcacgaggaggcggcgcgcgccgcggcccggccctgcgggccggatgcccacaagcgcgggcggcgtgggcccgcggccgaagcccgccgtccagttggcggccgcctggccggtggcgcccgggccgtggaaggtccagtcgtggctgacggcgggcaccaggcgcgcgggccgcatcttgcggcggtcgtggatgaagaagagcaggcggaggtagacgaggtgcgtggcgcccaccaccacggccagcagcagcaggaagcccagcgcgccgggggcgccgtcgggccgctgctccagggcgcacggcgcgtcctcgtcgtcgccaccgccgtccagcactggcgggaaggccgcggccagcgccagcgcccaggcggcgcacaccagcatggcggcgcacggccagccggccaggcgctctgcatagaagcggtggtgcgcgatggccaggtagcgggtgacgcccacgcccagcagcaggaaggcggcgtggaagcagaagagcgcggccaggaaggcgagcagcttgcagcccagcgcgcccggcggcgcccccgccgcggccgccgcacgccgcgccgccagcatgacggccgggaggcaggcgagcgcgcgcagcccgtcggccaggcacaggtcgagcagcaggtagtacggggcgcggtgcaggctgcgctcccgcacgatcagcagcgcgaacagcacgttgcccgctaggctcacgcacagcagcaggctgagcgtggccagcttgaggcccagggcggccgcctcgccgccgccgctgccacccggctcgctcgcgttcgccatcgcggcctcaccaggccgtgcgctccgccccggggccgtcccctgcctcgccgctcccgcaggccgcccggcccgagctccgccgctccgccggccctgggcgagctccccgtcctgcggggctcagcccgctcccggccggcccctcctgggctccccgagccgccgctgtgccgccgccgccatctcaggaatggtgcgcgcaggaggaggcggccactccctgcgccctaggcgccgcgggcttcactgcggacagggcctcgccaccgtccgcagccccccgcatcctcctccgtctcctcctactcctccgctgctgccgccgcgcctcttggctctgccccccgccgggcccgccgccgccgctgccgccgctgccgccgccgccgccgccgccgcggagccccctcccctccgccggagcgcgcagcgcggccgccgccgccagccccgccgaggcatcccgcaccgcctgggcccggctgggctgggggcgcctccgcagcagccgcggggtcgggaggcggccgggagggaggcagggcccaggacgcaaggtggcgacaagtcgcgtttggccccaggtaacgggggtccggcggcggcgcccgcgctggggtca

SEQ ID NO: 29971 - DNA, 2300 bp, Homo sapien
tgaagtcagacttcatttttcaaacttggcctcagatacaaagatgacatatcaagagccttcatttctctcctaaagcattaaagcaattaaaatttccaaaagaacatgaaactaaacaaccctatttttaagtgtttccaaacttatttcttttttttaaacttgtttcaaaacagccttatgaggactgttttccaaacagctgtgtaagaagccagccacttttgaaatctgatttttcctgtgtagacatatcatattttctatgcttgaagaagcagggaatacccaagctggcattcaatagtagcgaatatgaaatagaccattaaaagaaagtcataggaatgttaaaatccatgttgactggtttttacatttacccggcagcattcccgagctagcgttggcatggagactggaaaaggaaactttccacaagtctgtcacttgctactgtttctacttactccactgtgagtccaattttaacatttttttaagttgaaaaaagggtttgactccttttgtgttttctgttcaaggcgttttttaaacatgagaacacgtgtgaaaaaggtttttaaaaatcagccaaagattggggtttccaaatattcagctgtttaacattcagataattgcctgccttccccccgctatcccccacatttcgtctgaatgctttggcacgggggagccccacagtctgaaagtaactctgtcccaactctccttactgcatttattaaagaggctgaaagacgcatctgcttttcaatagtttgcggttcttaagagaccaggaaagccagaggttctgactattcaggaagaaagttgggtttcccaaaacgggcaagcaagttcggtgtggtcacatctaggtattcttgacgtcatttttgttgagggaaacaggctgcagtttttggagccaggctaggatgagagatggagggcaaatctgtcacttattctttcctggtgtgcctggaacccactagacactcaattcatgtttacgtgaatgaaggaatcacaataacgccctatcgcatctgtaaaaccgaagggtgattttcctgggctggaaagtttaagaaagaagagagagctgcgtacctagggcttaaggggcctcaggctggcactcgaaaccaggcgttctcatttccctttggcatcaccctgaacggctgtgcctggagctggcgcggggctgaagaggggaggaaatacatgtgaggaaaatcagaggagagggtcgggaacagatgtgggcataaagggaaggcctctgacttgaaataaacaaataggagtcccgcagctggaaggacaaatcctttcacgtcgcgggtgatgtgggattggggcgattttgctctccctttgttctttcccctgccttccacgtttccagggtatttgattgatgtctgtcttctctgttaagttattccaccgtgaggagagagccggtggcagtacctggcacgcagcgggcgcccagtatagacctgctgaacaaacgaatggattcaggggctgctgtgtccccctcacccaccccccgccccctatgtgtccacagcgccccgcacgtagtaggcgacccctaaacatctgtacagcaaatgatttgcaagttttcggcgctgagcacgtggagctttggaaaccaggacagcaaatgagtgtctcggagaccacaaaagcggttccggcgcgtgcgaaaggcggtggctgggcgacggcggagggaacggcgcagagcggggcgccccgccgggagcgctgcctgcgtggcgcccgaggcgggggcgcggggggccgcgcatagcacgtgctcgtctgggagccggccgggccgaggcgggcgcgcgtgtgcgcgtggggcgtggggtgtgtgcccgcgccgtgccccccgcgtgtgctgccgggcgggcgccggcgtgagtcacggcggggctagcctttataacggcccggaggctcgcgggagccgccgcgcccgtccgcccgccgctccgcgctccacccagcgcacccgggccccgcgcccccaactgcctccggcggccgcccagtcccgagggcgccatgaggagcctgtgctgcgccccactcctgctcctcttgctgctgccgccgctgctgctcacgccccgcgctggggacgccgccgtgatcaccggggtaagcggcccgggcgcacctgtctgcccctgatgcgcgcctgggatgtgcccagggggcttgggacggggaccctgaagggcaggctagaggca

SEQ ID NO: 29972 - DNA, 2300 bp, Homo sapien
ccatgcactggccaggctggaagtgcctggggttgtccccaagagcagccccaaccaaagatgaagggaattgggtaaatgcccatgctccctagcctctgggatgatggctctgaggcaggttctattctgcagtctccccgtagtccccagtgggaatgagcttcattgcacacagagatgacctgcttgtgaacaaactctcactctacttccttccctccgtttcacttcctcatccccctaccagtgctccctagggccacttccctaattaagtgtatgcgctcaaatatttgcttccatgggaaccaaattacctggttcaaatccgtactctgccactggccagctgtgtcttaggaacattactccactcccctaaactgcagcatccttggctgggattgtgagatgacaaaagtagaacaaacctcaccagacaggtgtgaaaattccagaaaatagtccgtgtcaatagtttagagcagcatctggcagtcagcagacacacaataaatgctagtattttcttatttattataattattgcttattattgatagcccctgagatttccttggccaagttcaagtccattctgagagttctaagctctcaaacttcagacttcctccaggtgaatctccctggttgtttcagggaatctaattcatttattcacttaacatatctttagcaaatattgacttaacacctattatgtcgaagacacagtgcgacgggggatataaaaaataagatgaggtcacggtctccagtgagataaatcgtatccacacatagctactgtctaaggcaaatggtgataagtgctcttgtgtgtgtgccaatagagcataaaatgagttcagaggagggtgaagaacattgtgtgtggtatgaaggagtatcgttggagttgggtttggaaaggggtagaactttccacagttccaaagagttgatggaggggagaggatacaatacatggagaggggggaagtgataaactctaggagtttggcatcccagagacagctcaactatgtcttaatgtgagatcccatagattgatgagcctctatctctcagagctaagaggacagcggatgctcccccaaattattattaccattcctgacacttacatagcacttaccctgccctaggaactacaggggatgtgctacgtatgttaactgatttaatcttcaccttcagggtcagcacaactatgatctccacttgacagataagaaaactgaggctggaggggttaaatgtcttgctccagctcccgcggaagctaagtgcctttcacctaatcctgtgtggtctggctccagggttcacactctacactgcctctcaagtgtggcaccttttcaggaatttaagggaatatgttgctgtgatgttgacagggcttgaggagagactgaaagaaagcccttcagccccatagaggaagtccccagaggatggatggttctggaagttacgggttaccaggacaacgcatcccctcagcctggccacgccccccgggctcccgctcactggttgcaaaactcagctttgcccctgcacggagtttcccttcgcggggcccgctggggaagcatccgcggcttgtggtggctgtggttttgtgcccaggactcacacgtaaaaggagctcattcggaggcaggggcacgcgcttgtccccagaactcaaaccccagagtccctccggtaggtggtacagaggcgagtttgatcctaaacaaaacagggcagggtcttcctgtttgttttcttcctccagcggggagcaacagctgctaattggatagtgaagtgaccgatttattattctcttacccgtgctgagcagagctgtaggaaatctccgggactgggagcagcacaggggggtatctcggggtctctctgagaaggagttgacagtggggaccaaagctgccggctgccatgttttatttggcctgcccagtgtttaaaaaaaatgtttttaaatagatgctgacatttttaaaaggggaagattatacatacacttctacatctccgacttgtgtcaagaaatgggaagttctgggcccagatccccataagtcagcgatgaggggggccgagcaggggctgcccgttagacggccgcagagtcccagcccccagccctgctcacctttcttacctctctggccccgtcggcatttgagcctgggaccccagacgaaaggatacgcttccttttagaacccctgccaatctgaggacggggccacccc

SEQ ID NO: 29973 - DNA, 2300 bp, Homo sapien
ggcatggtggctcatgcctgtaatcccagcactttgtgaggccgagatgggtggattgcttgagctcaggaggtcgagaccagcctggacaacatggcaaaaccttgtctctactaaaaatacacaaattagctgggcatggtggcggggcacctgcaatcccagctactcgggaggctgaggcacaagaattgcttgaacccgggaggcagacaaaatcgcactactgccctccagcctgggtgacagagtgaaactctgtgaaagaaggaaagaaagagagagagagagagagagagggagggagggagggagggagggaaggaaggaatctgtttgtgagcagagctggactgcgggctggtggaaagaggaatgcctctggaaccagccccctgatgtagaagatggtgttggccccctatctcctgcctttggcattcaccattgctgtacgcaacaccagcttcttactgaagaaacctgtcactctgtctggggctgtctctggccacaggagcatgctcagtccatgcactggccaggctggaagtgcctggggttgtccccaagagcagccccaaccaaagatgaagggaattgggtaaatgcccatgctccctagcctctgggatgatggctctgaggcaggttctattctgcagtctccccgtagtccccagtgggaatgagcttcattgcacacagagatgacctgcttgtgaacaaactctcactctacttccttccctccgtttcacttcctcatccccctaccagtgctccctagggccacttccctaattaagtgtatgcgctcaaatatttgcttccatgggaaccaaattacctggttcaaatccgtactctgccactggccagctgtgtcttaggaacattactccactcccctaaactgcagcatccttggctgggattgtgagatgacaaaagtagaacaaacctcaccagacaggtgtgaaaattccagaaaatagtccgtgtcaatagtttagagcagcatctggcagtcagcagacacacaataaatgctagtattttcttatttattataattattgcttattattgatagcccctgagatttccttggccaagttcaagtccattctgagagttctaagctctcaaacttcagacttcctccaggtgaatctccctggttgtttcagggaatctaattcatttattcacttaacatatctttagcaaatattgacttaacacctattatgtcgaagacacagtgcgacgggggatataaaaaataagatgaggtcacggtctccagtgagataaatcgtatccacacatagctactgtctaaggcaaatggtgataagtgctcttgtgtgtgtgccaatagagcataaaatgagttcagaggagggtgaagaacattgtgtgtggtatgaaggagtatcgttggagttgggtttggaaaggggtagaactttccacagttccaaagagttgatggaggggagaggatacaatacatggagaggggggaagtgataaactctaggagtttggcatcccagagacagctcaactatgtcttaatgtgagatcccatagattgatgagcctctatctctcagagctaagaggacagcggatgctcccccaaattattattaccattcctgacacttacatagcacttaccctgccctaggaactacaggggatgtgctacgtatgttaactgatttaatcttcaccttcagggtcagcacaactatgatctccacttgacagataagaaaactgaggctggaggggttaaatgtcttgctccagctcccgcggaagctaagtgcctttcacctaatcctgtgtggtctggctccagggttcacactctacactgcctctcaagtgtggcaccttttcaggaatttaagggaatatgttgctgtgatgttgacagggcttgaggagagactgaaagaaagcccttcagccccatagaggaagtccccagaggatggatggttctggaagttacgggttaccaggacaacgcatcccctcagcctggccacgccccccgggctcccgctcactggttgcaaaactcagctttgcccctgcacggagtttcccttcgcggggcccgctggggaagcatccgcggcttgtggtggctgtggttttgtgcccaggactcacacgtaaaaggagctcattcggaggcaggggcacgcgcttgtccccagaactcaaaccccagagtccctccggtaggtggtacagaggcgagtttgatccta

SEQ ID NO: 29974 - DNA, 2300 bp, Homo sapien
gctcatctgaattaagatatgcttaaagcgtaaaatacactccagatttcaaatatttagtaaggaaaagagaatgtaaaatattcgttaataattttgtactatcaatgatatgttgaaatggcatttcagatatactaggtaaaaaacttaaaaaaaaatatttcacctatttctttttccctttttaatgtggctattagataatttaaagttacacatgtggcttccattatagttgtattggacagcgctggtctggcaggatactgtatggattaagaaggcaggtaccagagtccaactgcctgtgttctgttcatgaaagaatgattctgagacttatttaaaaggtaaggcagggtttatttaagactatcacagtaggggtactgcaataggggagggagatggggatcaactctgaatacagaaaggacaggtgggggattatagtcagtgagcagagtaaggagagtcagtggatgaaaaattgcgaagaggagacacccagggttggggaattcttgctaaactgacctaacaggattcttgctaaaggcaggtcaaggacttatacattaaaggtgggggatgaggaaattgatcagatttcaagggtgatcagagatcaaaggtgaagacattttgctaaactgacttgacatgatttttgctgtgcaggactggggccatatttgaggcctagtcgaatagagggctcagaggagacgaactaagtttgggcgaggagagagtgtttgtcagtttgaatcccagctctgccgctgtctggctgtgggttcttgttgaaactggacaaccactctgtgctcagttcccttctctagaaaatggtgatcataaaagtacgcacttggagtattgctgtgagggtcacaggagatgatgtgtgctaagttcttggccccttgcctggcatgtaattatcactcaataaatacaagcatttgttattatttccataaatatttgggaggactgattctgaaacctccagggatcccgaatttggagcactggaaatgctaacacagattcccggtttcctcccacttcacatgtcttgtaaagctccatgagcacccagtgccattctcctaccacaagttgatggttatttctatatccgctgaaagtttctcttcaaccacatgaccattttttgccaagaaacagaacttccaccgtgtcgcaagttccacaaagctaaggtactggtgctccccagctacgagacccagttcccctccatagttccagatgcacaccatccaaattcatgcttcattcaaatggcgcatgactgtggatcatggacctctgggtcattcacaaatcctggaacttcagaggtaatttgggaaggccaaggtcagcccacttaaaacagttctctctctttctctcccaatttgaaattcctactaaccccagagtgagcaagttacaagggaacatttgttgtgagaagacatggcaggccaggaccattggccaatgttgggccattcaacatgtgtcattgttggaaatgggacagatagtctaattctctagtgaggagatttagaattatgtggagataggagaaattcatttctttgccagtaatctagctcatcctgttagaaaagccttaaaagtgcatcgtaacagagacagctgagtctgacacccagccctgcatgggtaaagtcagctccatttattggacctagatgtaaattttggtaaataggctcttatctttcagggagggttttctgagagaccctttgcccagcagagacctcggggaaaccaaagatggcaaagaactatccactctgttctctggccctatctctcccaacttccacctttgctcaggtaggtggaaccttcatgtaaatggttccctgcttataatgcacattggaattgcccagaacgtctgttcaaaatgcaggctccagggtccaatgtccaggttgagaaagctgatatagcacccagggatctgcaagttaatttttaaaagaaagtcacatggggcagtaattctagcaaaccttcctcctaggccgctgcagagctgtagaaacccagttgcacagggctttatgcctggcaagggcaccccttgctgtgtgcatcccagaggaggcacgtctgaagtctgcagaggaagcttctatcttcccttccaacgaattcctgctcaggccagcaaggaagagagtttgagttgtttatggggtaagaacaagaaatctgttctgattgcacttcacaaa

SEQ ID NO: 29975 - DNA, 2300 bp, Homo sapien
gcactgggccatggcttgtgtacgtaccctttggctttctacggcccttttacccctagaacgctatccctctctcttcctcttccttctttcatccctcccctaaggaggcagctgtggcattgaggccttgagaggttgctgacccttgctaaacagtgttgcttctcctggccctcctgggtgcgcctgcctggagaggacactgcgtgctgatcaaacttattgttgacacattcattctctcttttattctctcccttctgatccctggactgatctctaggaatttctgctccctgggtgctcagtctcagtgagcttccctggtggcaagccctgatatgcttcccttccatggggcagtcctgataacaacctattttatatttgcatataaacctggctgagggtctgtcttaactccaatccccccacccccgggccccaactcctagcagcattctaagactccgtccctcccctaacctggggcttcagcacagccgcgtctgtgtcttttatcatctggggtcgtcctcctaccagatctccctgcctgaggacagagggtcctgagtcacgttcaagtcaatttggcaagcgtttttggagcagggcagaaagtgaagggcactaccctgttcctcgacttcaaaaatcgaacgcgggggaaatggtgcacaattcaggcccagttataatagctcctaatacccaatatcttgttttggtccttcgtgaataccaggcatccatcagcgaaccttccatgcctgatttctccgaatattcaaaacaaccctgggaggatgagccccattttggagatgaaggagctgaggcacgaggttttaatgcgggcatgtggtcgccagaatttgaatagcaacttccctaaggaaacgccctatttagactctaggggagaggaggatcccaggaggagtccgccagcagaagctcagagtctggcctgggggcatttagttatgccacgccctttctctactgttccctcccgcgacaggggcctgacagggagtggggcttcgggccagcgtctcggccggacgcagggacttcagaagaggcaaatacaaagctccgcatggcagaggaacagaggggcgcgggggaacgcggtccaaaggtggaccttgtcggcccctgggcactgcaagcctcgaggcgctgcgagcggtgaggctgttgcaagctcccgcggcgcgcgcaaactgcgtggaactacttccccggggcggcttcggggccggggtcccggcaacagcctcacggggcgccgtgcggggcccgaagccagttgccagctcccgggcgcggccacgtgcgccccgccgggcttgcacgctccgccgcgccgggccgcggggccaccgacaggcacgcgcgcccccagcgcgcacacactcccgggcacgcacaccgaccgcccggcccacgtccgccacgccccgccttcccccgcgccccgcctccgccctcgcggcgccggccgccgccctcccattggccgcacggcgcgtgacgcgcggcgccaggccccgcccctcgtcagtcactcggcggaggcggcgctggcggggactagtctcgtccggagactgtgatggatttaaccaggtggggagggagggagggcgcgagcttgggagtggagagggaaggagccggcccactccccgtcgccggcctcgggctgcccctgcgcgccccctccagatccggcccgcggctcccctcccggcccccccagccccacgctcaagtccacaagtccgcccgcttcctgcgcccgccgcggcccttcccggggcgccgccgccaccgcctggtgtgcgaggctatccggcccgggcccggggcttgcagggtgccagtgggggcgcccggttcccttcctcgctctctcttccagtccccggaaagggtgggtgggtggtctcccgagcgaagtttccagcactggattcctgcgaaattacgacggctcacccgcgtctgtgttttgctgtctctcccccgttttcctgctccctgcctcttccctcccttttcccccactctccactcctcggaaggccaaaaagacaagcgaaacctgccgcagacgaagggttttgggattgtagcgtctgcaccttcagaaacagtgctgaagcctttaaatgcagcatctgcgatgtgaggaaaggcacctccaccaggtacttgaagatctgtgttaccttttgttaaaggactttttttttttttttttaagtgagagggtagtgagc

SEQ ID NO: 29976 - DNA, 2300 bp, Homo sapien
tatgaaagtagtttaaggcttacagttaaaacacagcttgtgaagagagcatgtaactttccctttcaaaactgccttgcaatataatttttaaatattaatctaaatattgcttctcagttgtttaaaaatataatttaaaatgtgaattcaaatttgtaaccttcatttgtcaatttttcagggtttggctgtgtagttgaacatgtcttaatttttgttaaacaaataatgtttcttgtggacaattttgaaaatagaggaaagtatagaaaagaataaacaactgtactcccacatgtagaacaatgccaggtgcatgatgggctctcacatatttgctcagtggatgtagagacagatactgttaatatcatttgggtatatatgtctaggtttttttattttttattttatttatttattttttgagatggagtctcgctctcaagtcgtgcaggcttgagtgcaatggcgtgatcttagctcactgcagcctccgcctcctgggtttaagtgattctctcgcctcagcctcccaagtagctggggctacaggcacctgctatcatgcccggctaatttttgtatttttagtagagacagggtttcaccatgttggccaggctggtcttgaactcctgacttcaggtgatctgcccgcctcggcctcccagagtgctgggattacaagcatgagccactgtgcctggcccagcattttttaaatgagtattagtctttttttttttttttttttttaagaaaatagggatcagaacatgcaaatacaatgtaatttcttctctttaaattaaaaaaatattttgacatttcttattttttgttatttgacatttcttttgtttttgagacagagtctcactctgttgctcaggctggagtgcagtggtgtgatctctgctcactgcaacgtccacctcctgggttcaagcgattctcctgcctcagcctcccgagtagcagggattacagacgtatgccaccatgcccgactaatttttttattgttgtagagatggggtttcaccatgttgaccaggctggtctcggactcctgacctcaggtgatctgcccacctcggctttccaaagtgctgggattagaggcatgagccaccatgccctgcctgttatttgacatttcttttcattgttattcttattttttttgtgatagctggaagatttaaatttgcctgtggcctttagcaagagggcagcctcactttaggcatgtctggtaagtgaagctgtgtataattttatcaggtaatggctgctgtggatcctcattaaatatgtgaccttaactccatacctttttacattatgatctcgggagtagggtcctttattcctactgcccacacctaagtttagagacgttctcactcagtctgtccaagtgcattcttctcttcctccttgttagtgtctgatttctaccaaactcatctgcttattctcctttttttccttacatgaactctttgctctagccaaatggttttctccaaatcctgcattttctttttctctttctttttttttttttttttttttttgagatggagtctcactctgtcacctagactggagtgagtggcgcaatcttggctcactgcaacctctgcctccccgggtccagtgattctcctgcctcagcctcccgagtagctgggactacaggcgtgcactaccacgcctggctcatttttgtatttttagtagagatggggtttcaccatgctggccaagctggtctcgaacttctgacctcgtaatccgcctgccttggcctcccaaagtgctgggattacaggcgtgagccaccacgcctagccccaatcctgcattttctgttaacctgtttatattagtaaagtgtgggatcttgagagagagtattctggaggtgtcacacagcagagaagcttattcaagttacaagagaatagttcgtttttccagtaaagacttacgattgacatttaaaacttttagtagttctaaaactaactccttccctctgcaccctccttcctctaaaaagagagagagaaggaaagcaagaaagaaattagttggcctatgcttactgtgacatttgtcttctctgtggcaattaaaacttcaaaacattcttacaggtcagttgttccttgattctttgggtaacatggctagtgtggcaaacatggtttcatcatgcctgcaaattttgattatatttcctcctcctttcatcaaaccctgctctcaacattacctagttt

SEQ ID NO: 29977 - DNA, 2300 bp, Homo sapien
cagaagtctaattagtaactcctggttaattctaagctattaccttcttaggccattgatttttataagttttaacttggatttttaatattatcagtaggtaaaggtcatactgtataagactaaagtattctgtagctttcacagataaataatttttttttttttttttgagacagaatctcgctctgttgcccaggctggagtgcagtggcgcgatctcggctcacagcaacctcttcctcctgggttcaagcgattatcctgcctcagcctcccaagtagctgggactacaggtgcacatgccaccactcccagctaatttttgtattttttagtagagatggggtttcaccatgttggccaggatggtgttgatctcttgacctcatgatccgcctgcctcggcctcccgaagtgctggtattacaggcgtgagccaccttacccagccagattaataatttttgatagaaatgacagcttctgaaaaacccttgttaagaacctttttctatcttgacttgtattcaccaaatctatgagggcatagttttagagcctgtaaaatagaattatgttttaccaagacatgtatttctcagatatatttgtgaagtctttgactattttatttatttatttttttcttttaattaaaatgattttattattattttctgtagagatggggtcttggtatgttgcccaggctggtcttgaactcctgggctaaaatgatcctcctgcctcagactgccagagtattgggattactggtgtaagctattgtgcccagctttttaaatattttaatctaagcataaaacaaatttatctttaaggaatttttaccattcgcctgcccaaagaaacccctggccagcattttgaggggctgaacatgttaactgctcttctggcaccaagaaaatccaggacagcaaaaccacttgtggaagaaataggtatgtttattacagttgggaggaaattaggataaatagaaatatttggaatgctgtgtatttgtaggggaaatgggatatagtgaataggaaattgaagaaaatacttcaggtataaggtgatcatgtgaaaccatatgaaaatagcttctttggtgatataattaagacattaaaaatcctattgaaccagatcactcacatttttggaccaattgaaacaacattttgtggttggcaaaatattagcatcttgagctaagatcagaagtatacagttaagtgagttacgtaaaacaggggtccccaaccctcaggttgcagaccagtactgatccatggcccgttaggaacctggctgcacaacaggaggtgagcggagggccaggagtattactgcctgagctctggctcctgtcagatcagattagattctcataggagcatgaacttactgtgaactgtgcctgcgaagggtctaggttgtgtgctccctatgagaatctaaagcctgatgatctgaggtagaacagtttcatcccccaaaactatctctttacctctttgatctgtggaaaagttgtcttccacaaatccggtctctggtgccaaaaagtttgggaaccactgatgtaaagtgaacaccacctctgtcaagaaatggagcatttccaacacccgaagaataccatcctgtattcttccattactttgccctctctccagggtaaccactatcctctgttttgcctgtttttacgttgcatatgtagatcatacagtatgtgttctttttgtctggctgctttcacttaacattatttttgtgagatttattcatattctagctgagattcgtttgctttcattgctctgtaatattccattgtatgaacataccacatttttggttctttttttttttttgctgtcacgaatagcggagctatgaatattcttttagtacatttggtatatgtcttttggtacatctttgtgggcattttttcctatactttttcttcccctagttgtacttaaatccaatacttaaaaaaaattaaaatttaacacattcaggtgcttctgagattcctgaggaagtagttgacgatgaagagtttgattgggaaattgagcagacaccctgtgaagaggtatcagaaagtgctttgaatccgcagtgccactatggatttggaaacttacgatcaggagtgttgcaacggttacaggtatgttgtctttctgaaagatcttgatctatagggtttttccatttggatattttaatttcagttatgcttacacttggtagtttttaaaaataa

SEQ ID NO: 29978 - DNA, 2300 bp, Homo sapien
gtgtgtgtgtgtgttgccagacacataataaagtacccaggaaatgcacagctctagtttgcaaagtgctttcaattagaatttcctcatggatagcatagcttgtttcagttgattctctggcattaataatttaaaaatattaatgcttgtgacctacaggaatgaggtcccatggcagatgtaaagattatttcttttttttttttttgagatggagtttcactcttgtcacccaggctggagtgaaatggcacaatctcggcttactgcaacttccgcctcctgggttcaagggattctcctgcctcagcctcctgagtagctgggattataggcacacaccaccatgcctggctaatttttgtatttttagtagagacggagtttcaccatcttggccaggctagtctcgaactcctgacctcaggtgatccaccccctcggcctcccaaagtggtgggattacaggtgtgagccaccgctcccggccaagattctttgtaaagaagctaatttggaatagtttagtcacaggcctatctcaagggaccttttgagagctttattaaatcaaagttggcatcaattcattgtcaatattgagtgcctattacttgtaaggctcagtatggtctaaagcaggcaggcttggctttagaatgtgaaacaaagtaggtggtaataacagagggagtcaactctgtaatagtgtagagcctgggcctaggaatcagactcacctgggtttcaattcccattgcaccacttactagctgtgagatcctgtgcaagccaagggaatatataatgcctacttcatagagcggtcaggagggagaatgagatcattacaaagggtttgctgcagtgctggcacatagtaaatattcagttaatgttagcccctgttactattaattttttttctgagtcctaatgaagtttcaagaatgtctccttagaatcataaaacagctggagattgaaaagacttttgaagttttctggttatctccactgtcctaggagagtacttttcatcccttttccactgatacttaaaaccacggaataaataccacaactggattattctaattagtggtggaataacaggaaacaacatgtgtggaaaggccaagggaatatgtgggggaagagggaaaccagcgggagaggcactgagagagtgtaaggggcacactccaaagggagaaaatacaaggaagacaagtagaaaaaaagacagaaaagatgtcctcagacaagtgtaaggacaagagtgagaaaaaggaaagaaggggaatacagagggaccttaatttgtgaatgcagtcaccgacacggtttaagagtcaaacgttctgagttctaattactgtaaaatgcatggttataaaacgtactgattaacctctctgagccgttttctttagagtttgcagcgtagattagatgagattagcgggacggacgctctgttaaagagaaaactcttcaaataagccgttaagaatgagagagaaagctgcagaaaaagagaagtggaaagagagagggaggaaagggaaagtgtaagaggaattgttcacaaggcaggtgagaactaagggaaaccactgtaacggtgctgctgtggctactgcggtgactacttcagcacatcaagcgttgacaacttgccaagttcgttattagagttctacatgcacaatttcatgctaccctcacagcatttctatggggctaggttctcgcattatccgcgttttacagaagatatagagaggttttgtaactttcccaaggtcttacagctgagaagttgtggccaggaagggattcaaacgcacgtctgtttacctgtcaagccagtgctgttaaaatcatctctaagaacctcgaaaaaggctcggttgctagtcatcccgccggttcaacgccggctcccaggcaccactcgccacgccctttctccgcccgggggttttgaaagttccgcctcttctcgaacggcgtcccgtctccatggagattggcgtggggagagacttcctgccttacgcgcgagcacttccgcctcgagccggaagctccgtccctcacaccgagagttcctgcgcgtggggagttggagagtttgcgtggcgggaacgcggcggcagtgagagcgagcggcgccggcccttgcgtccggtgcggcgatgctgaccccggcgttcgacctcagccaggatccggacttcctgactatcgccatccgcgtgccctacgcccgggtctccgagttcgacgtc

SEQ ID NO: 29979 - DNA, 2300 bp, Homo sapien
ctggccaagtgcttgatgtgctaccctattccctctctctgcaaggatatttgtaattgagctagatgctctgaacaacgaaggtctaaagacacaggggactggttctctgatggcacaatttgagagagctattttgggtgtgaatgtcttttgcctacatctaccacctaggatcagggtcagacccactgtcttttaagagggtcaacagtgtaaaggctgtgtccaaacttgcatcttcttagaccaaacaataaccttccttccctcccttggtccttctctcccctccttccttccatgactttgtgctatgctgggttttgggaagaggaggtggaacaacgcagtaccttttcttttctttctctctctctcttttttttttttttttttttttttttgagacggagtcccattctgtcgtgcccaggctggagtacagtggctggagtatctcggctcactgcaacctcagcctccagggttcaagggattctcctgcctcagcctcccgagtagctgcgattacaggtgcccgccaccaagcccagctaatttttttttttttgtatttttagcagagacagggttttgccatgttggcctggctggtatcaaactcctgacctcaggtgatccgcctgcctcagactcccgaagtgttgggaatacaggtgtgagccaccgtgcccgggcagtaccttttcttttaaaagctcacagatgagtataaaaatgtccacgcactggctgggagccagatgatttgggttctgggttctagttctgtctccccagacttgctgtctgtgacacagctttcccatttgtaaaatgtcagggctgcagaggacttctgaggtttccgccctctcctacctcctgggagattatgtcatgtaataatgctaacagtggtaataaaaacccagccacgttgagtgttccaggtttcacgcactgtgccaaatgtttcacatttgccatttcactcaatcctcgtggccgttttacaaccctcattttataaataagaaccctgaagctgcctgagtttaggtaactacttcagggccacacaaggagtaagtagttgagttgggatttgaatattgattccaaaccttgagctcttaatgactttgctgtatacattacttcttgccacaggtgggccagtgacgaacgaacgttgggttaagcagggaggtattcttgttaggattattagcaatgcttagtgtatgtatgtattgttaattttattattatttttttgaaacagtctcgctttgtcgcctaggctggaggcagtggcgcgatatcggctcactgcaacctccgcctcctggattcaagcgattctcgtgcctcagcctcccgagtaactgggattacaggcacgagcgaccacgcccgactacattttgtatttttagtagagacggggtttcgccatgttggccaggttggtcttcaactcctgacttcaggtgctccgcccgccccagcctcccaaagtgctgggattacaggcttgagtcaccgcgcccggcctgtatttatttttatatagagaagggcgagggagcggggtcattttgttacccagactggtctcgaactcctgggctcaagcgatcctctcgcctcggcctccctcccaaagtgttgggatcaccggcctgagccccctgcccggcctcgctctacgttttttaggcgcattctgaacgtgaagtgtatacactgaattctcacagcaactgcatagggcatcagtaccagtgcccttactgtacagatggggaaaatgaggctcagacaggcgaagtaagtagcttaagttcacacagagaggaaatggcagggattcaaagcctaggagtccgcctgcaaccctctcgcctgaccgtccagtcttcagctccgcggagcctgggcctggggctggggctggggctgaggctctggaagccgccgggacgcagacgccactgggccccagcgtcacacctcggccgcgcacgcgctctcgggttccgggccggagcgcgcggcgggagcgaggacggcggcagggagcgtgcgcgcggtgacgtaccgggcgccatgttggagggttggtggtagcggcttggggaggtgctcgctctgtcggtcttgctctctcgcacgcttcccccggctcccttcgtttcccccccccggtcgcctgcgtgccggagtgtgtgcgagggagggggagggcgtcgggggggtggggggaggcgttccggtccccaagagacccg

SEQ ID NO: 29980 - DNA, 2300 bp, Homo sapien
aggtcagatttagagataaacattagtgtttgtgtgtggagggggttgagggagtgttagaataagggaagggtattctgaataaaggaaatggtgtgggctgggtgtggtggctcatgcctgtaattccagcactttgggaggctgaggtgggtggatcacggtcaggagttcgagaccaggctggccaacatggtgaaaccctgtctctgcaaaaaatacaaaaactagccgggcgtggtggtgcacgcctgtaatcctagctacccaggaggctgaggcaggagaattgctagaacctgggagacggaggttgcagagagctgagatggcaccattgcactccagcctgggcaacaaagtgagactctgtctcagaaaaaaaaaaaaaaaaggaaatggtgtgaagaacaaagattcaaggtgtttaagggaatgaaaagtaagaaattgacttgtcttgagtgaaaaatgaaggaagccctgtgagaaccaagattggactaatgagttctaattttcagttgatggttggtccggaaacactcccctgttcatttaaggatctggttcaaatccactttattttaccctgggaacaggaatcaaaaaccattacatagtgatttacagtagtttttgtggccatactggattaatatattttgttgatcctctgtacactcaattgaataatatccccaaaggccaggaaactgagatggctcatcagtacttacttttcagctccaggagttgtaataattacattttggagattttcagataaagtagcaatatgttacagtagtcataccaggtgccctgcctttaaatcagggttgcagtgtttcatagttgtgtgaccttgggccagttagttttctcctctgtaaaatgtggttaataatagggctgggagggggattaaatgcaaaacacttactgtgactcatactaaactttcagtgaacactgaatattagtaaagttatttttactgggaagatcataaatatattacaaaaaaggtttgagtctctttctgtgggatatatgatgcaacacaacaagccgtggattgggtgttgctttgtaaggaaaatcaattacatatgtcttaagtacttcaatctctcaacatctttgttgattccatctgagcttagttactctactacgtatagtgtatgatgttacgggtctagaataactagattagggtaaaaaataagtataggaaaaaaaaaattagtggctgagtaggatattctcttttggtcctttgttattgttttagtttttgctgtttcaccagttttcatttttaaccattttcctttactagcaaaattagaatcaatgggaatttaacccaccagagtgattttagaaacaaaaatgatgaaactttatgttgtagtacttttcttcatactaaatcactgatttttgttattgcagaatgtgatggttgttagctgtgtttatccttcttcagagtaagtatattttttctatttctagtatattatttactatatttaatcattttattgcttctaatatattattcttaaaatagactgaatttatttaatatgtaattaagtgtgataacatacttgtgaacctaccattcagtccccaaagtagaatattactaataacattatctatatgttttttccattaaagagatttggattaaagagattggtgatttactgtaattttaatattgttggatttacatactgtggtggcactcattgccctgagatgccattctagatgcctttccagggtgtctctagggcataattcccatgtttggaataactacttgatggcttttctctttatgatggaaaatatttccagttgtcaagatttagatatagcaaagtaagaattaaatttggatacaatttctcaaccttggaactatggacattttgtaccagataattctgttgtgagtgggtgtcctggggattataagaggtttagcactgtccttgacctctacccacttatgccagtagtgttcccctctccaaatatctttagacattgccaaatgtctcttggagatgtgaaaggcagggaggggaggttgtcccctgctgagaaccattggtttaaggttaatctggctctgctttcatagactactctgttacccaggctggagtgcggtgatgagtgatcatagctcactgcagccttaaactctagtgatcctcccgccttggccttccaaagtgctgagattacagatgtgaaccaccacaccc

SEQ ID NO: 29981 - DNA, 2300 bp, Homo sapien
aggctgaggcaggagaatggcgtgaacccgggaggcggagcttgcagtgagccgagatcatgccactgcactccagcctgggcaacagagcgagactccgtctcaaaaaaaaaaaaaaaaaaaagcttttcatgtgtgactttgcacatctgaggacacagcctctccagctgatgttagggtcgcccctgtgttttctcatctcagctccatctcggatcagatcattgacttgatacattatttcaaagggcattttcacctcttacaggagaatccactgggtaatacctgttggattcctactagtaactcagtagctggagtgagcacatgtttcctatggttcagtcaagttctggataaaggcttgcccttcatcccttggtcttagtggctagctgtcattggaacccaggactaattccccaggcttgacagagtaggtttggcagcagctggtagcataaagacagaggacagggcatccgtctcacattcactcacagtgtgcacatgtgcaaagaactattatctatctccttcatttctcatgactgtccctttatacagatgaggaactgcagactcaccaggttccactgagctgatggaaaggcaggtcagtcagaccccgactcccagctctgaaccacagtaccctgtagtgacccattccatcctctggaacaactggctgattcactgagtatgatgatccagaccatttatctgacgttacagaccaaactgcctcacattattgatgaagcctttaaggctacttctgactcttaaatgttgacctgtcacagtgatgggccttttagaagctaaacctgtaatttcctcttaggtctagttaacatgacatgacttatcccctgggggcgacttgagaaatgtcagaagagtccagaggtcaggcctcttcaggttctggctgcaaggtcagacaacagcaagagcgtgtgtcgggactgaatggggaatgttaagttgatgcttgaaagcccagaccttccaacagtatcctcagtactaaaagccctttaagtgcaggcagtatatttgcctgatgggtccagaaaattgaaagccagcccttgtttgaatggccactcatgtctgatctgttgtttcaaaactaagtgcctgggagggaagactagagcccattgattgctgtgctgacctttgaggacgtgaaggtttgggtccccagccaacaatcagaggctgaagctttgcatctggcaccgtggactgttaagctcctttcaaagctgctgatggagtatgttatgattcccactgccttggctccttgaggttgcattaatgacgtttccaaagatgtcgtgagttctgtggactgtgttttgcatatgttgtcctagggaaacataagcttccagtctcctagcagagtgaatgtgtgtgtactcattatatgtaaacatatacacacagatgcacttatgcctacatgtttgtatgtgcatttcaaccatgtaagtgcatactgtacgtttgtgatatcaaacatattattgtgggtaacattcaaaaagacacggtcctaggtaacagcagaacagtttcattctcagccttttgaactgatctcagaggccagcacatatcttagactgttgcctgggctcgagcctagttctctgcagagataaaatctaacaatgaagcaataagcagtaaaatattgtcctgtttcctgcgtagagatggagttagaaatcagtcacgctgaatcacgtgactggcaggctccgggatgggctctgcaaacaacaaagcccatcaggcttgcactttgcatcttaagtccttcaggaggaaatgtactaaaggcaaatggtaaaattaggatgatggaggtcctgaccgtgctgagagccccatccagagggaagtgagtcatgaaagggcccacaccctgggaattgctactgtgccactggcctgacaatgggtgtaagaaaaacagatactgacaacggaagaagggctgtaaagatgttgcatctcttttcaggcatccctcagcccatgaatactacgatccaaatgactacattggagacatccatcaggagatggacagggaggagctggagctggaggtatgaagaacatccttgtctcattttaggagtcattattaagaacacagaatgcctaataagttctctataagcataaattagtttacggatgccgatggaaagtaacaaaagcagaaccacttttactgatgccctttgaaaggcacaactgag

SEQ ID NO: 29982 - DNA, 2300 bp, Homo sapien
cgaggggtggtagaacatctccaaaaaagtgtacaccccaagtaagcactaatttacatttatggtgtaggacagaacttctctgtttctcaaaaccagtttggtttgaagattatcaccctgttgacactagctcattctgtgaaactgacaagcccacacacctttggtgaaagaatttgtttcctacccattatctgagagcccatgagcagtttaatgaatatactgatggaggattccctggcacaagcttatctgaacaaaggccaataatattccaccccatgcagaatcctatcaaagcaatgcattaattgattaaagcaattaaaagaaagtctccacctcaaataggcaacaaatgccaccaaaactgattaaagaacactgtccagtgacctcaaccatgcactgaaaaatctagtgagtgacaactttttaaaggtcagtgtgaaacaagtaatccttatgaacatcaaggcaattctttcactctgatgaagcagttaaatagtgaaggtcatggggctttagcagccacataaaagaaagaaggaaagcaattagacaaaatggatgctgtaatcccactttccaggccccagagtctcgctgaatacagagctcctgctttactgttcagaactctcccgcttcactgttcagaaactggaagcagattccaaatgagaattccatagcttgattccactctcaccaaaagctgactgcgtgtttcttaggaatgtctatagccttgggaggtaaaaataaaataaaataaaatcaatggatgatgctatgaactttacacccagtttggaattccaaaaatattcctccattgctcaggactgttgctgaatcctacccagccaggtttgctgtactgcagggaatgaatgtccagatctatggatcgccagggttttccaatcaagtgggaatccaaggaccagcatggactagcagcattggcatcacttggaagtgctttcagtatggagattctcagaacccgccccagacccactgtatcagaaccgcaaccacattaaaatgtgagaaacactgacctacaggaccctacagggcacttttgttttgttttgttttctgttttgtttttatccttcttctagcctgagtttcctcaatggaaagatgacagagtgtacacacaaaacaaaccaaaactgaaggagggcagttgttgacatgatcatgggggtgatgagtcttctcccagttctaacttctgcagtcagcatcgcttcttttgtaatcacgggaaaataattttcaaatggagctaaccctctcacaacattgtactaatgatctttaaagcgacggatttagaagcgctcagcaccacgcttgccacactgcagggcagacacttcagaggtgttaggtgaagtggatggagccagcacgctggcctctcccactccgacagctggcgagcagctcttgtccaccaaaacttccccgggtagattcacccaccggtcctggaaacctgctaaatcctgaaggttcacagaacctctggtcagaactgaagttgcagccggagcttcccgcaggctctgtaactttccctggaatgaaataaataaataaagaccgtaagtgctgagatagcgggccccaagatatttttagtcctctgcaatcagccactagaggaagggggagggagaagggagtaaaaaagttttgatccgttcgggaaggggctcgaagagaacccttgggagaaagcagtagcctcagctccaaactcagcgagcttttctcggctggcgttttgtctcctatagcgtagactgtaagagaacagaaaggagtttcccgagaagattcaggctggcgtcctgggctggcccgtcccttctggcgagcctcagtgtcctcccacgcgcttctgccttccagcctcctccctttttcggggggctggcgggaggcatccaaggcacgatgtatgtgcgctcgcgctcgcgcaaatacggccggaggagtcctgttcctcgggcattttccgaggaagtctggatcaattaggctcagtccggggagagccagcgagcgcgcgggcggcgtagccggcctgtctgggccgcctcgtggggagggagggggcgcccggccgcccggcggcgaccccggggcctggccgccaccatgggcttcgagctggaccgcttcgacggcgacgtggacccggacctgaagtgcgcgctgtgccacaaggtcctggaggacccgctgaccacgccgtgcggcca

SEQ ID NO: 29983 - DNA, 2300 bp, Homo sapien
tgagagaaaatgtttgcaaatcctatatctgatgaagaagtaatttcaaaataaacaaagaagttttacaactcaacaacaaaaagccaacaagcccacttttaaaatagacaaaggacttgaataggtgtttctctaggaagatagacaaatgaccaataagatgctggacatcattagtcatcagaaaaatgcaaatcaaaactacaatgagataccacctcgtacctactaggatggctagaatcaaaaagtcagagaagtgctgataagaatatgaagtcaggactctcatacacgcctggtgcacatgtaaaatggtgctgtaaatctaaagtggtgggaatgttaaatggtgcagctacttcagaaagcatactgacagttttgaaaatgaataaacagagctaccgtatgacccagccaatttcactcccaggtatacactcaagaaaaattaaaaacatacatccagaaaaataaaaacctacgttcacatgaaaacttttacatgaatgtgtatatcatcattatatataatagccaaaatgtggaaacagcacaaatgtccatcagtagattaatggaaaaaaatggggtaaaccatgttatgtgacgttattcagccataacaagtaatgatgtattgacacatggtacaatatgaatgaatcttgaaaacatgctaaatgaaaaaagccagtcacaaattaccagatattatatgagtccattaataaaaaatacccagaacatggaaatctgtagatacagcaagcagactcatggtcacttagtgctcggtgggaatgtcggggtgttggggggattgggcggtgataactgaagggtgtccttcaaggtgatgaaaatggtctaaaattgattgtgtattgcacacatgagacactgaattgtacactttaaatggatgaattgtataatacatgagttacatctcaatgacggcatattttaaaaaaataggtagacttgtatgccgacatatttgtgataaagtttggttctgtctctttctctctcactgtctaatagatgatcataactatagtttcatcagccaggatgtgctagtttatgctggtaacaaacaactctcacatctcaaatggcttataaaggtttttttttttgctcacatattcgtcatttggtggttgggacctcacttggctctgtcagcctcactacaggatccatgctgctatagctgccactaaaatggaacattacctgtccagaaggaaaaagaaaattgaagtctgaatggttcactgtagcaactcaaggctttacatgaaagtttggctagtctcttctgttcccagctcattggcctagaataatcacatgacctctcccaaccacagggaccaaagaattcaactggactttgttgaggaggcagagatctagaaatatttcaggaacagccctaatatctgccatatagctaatattcattacgtgttgactatgtttcaggagctgttctaaacccttgtatgtattatctcacttaatactcagaaaaaagtattttgaggttgatgccattattatcatcaaactcaatattttacaaatagaaaattgaggcataggagtaaaataactttcccaggcttagtaaaatagctaattgttggaatttgaatccagacatgaacaccaaagcccatgtttttgacttccagacaatattgtcacccagcaatcccatattttcttatccttactcaaacacaaatctatcacaaagtccaaacaggaaacaggtacaagaaagctgcactagcatatattagtaaatgaaaacaggttagcagtcagacctttagtattgtctagtgtgtttctagtgcaccgatgattttcccatggtccttggcagagccctggtttctcaggcttgcctttgggcatgctgaaagacctggcagcttcaaacagagcagctctgcttcatcctttaggcttccacttgacttcacttatttcttggctgacaaaaagaaaagctgggaaaactgcactgcctcactcacacatctccatccacactaagctcagagacacattctaagcaaagcttaaaccaaatggatgaatcaggctcctcttctgtttctgtggttaagaatacctacttctatgtcatggtaatggtaagtgttttgataaacactgcgattatgtgaaacattgagtaaaataaattctagcttggaagaaaataagaatacctaattcatacaagggtatcattacttatagga

SEQ ID NO: 29984 - DNA, 2300 bp, Homo sapien
agtcattaaaacttcattatgcattatttcagatatagaaaatgatacagacatacaatagggcataatgataaacatccatataattacttcttaatttaagaactaaaaccaaaaaagctaaatttcctactctctctccatgagagctttaaaataccttaaagttgaagtttatggccgggtgcagtggctcactcctgtaatctcagcactttgggaggccgagctgggcggatcacgaggtcaggagatcgagaccatcctggctaacacggtgaaaccctgtctctactaaaaatacaaaaaaattagccaggcgtggtgtcgggcgcctgtagtcccagctactctggaggctgaggcaggagaatggcgtgagctcaggaggcagagcttgccgtgagctgagatcgcaccacctacactccagcctgggagacagagggagactctgtctcaaacaaaaaaaaagttgaggtttataattttcataccttttaaaatacacttagtacataattaataattatgtaatattgatgtattacactatataattatacagtataattatatataaatatataaaataattatgtataatgattatatattttaatgtattatacattataatgtaagtgtattttaaaagatctgaaaattataaacgtcaactgtattttaaaacttcacataaatggtatctaactgaattttttaatttacctttttatgcaccattgcttgagtcagccatgtttataaaagtggcccattttcacagttgtgtaatattccatttaactttatgcacttgtatttgagatgatgttcacatttcatctctttatatgttttctcaacatatgtgcaggttaaatattgtatatattaaagcaacaatttttagatggcccataacatcattgaagaactctgagctggaattcaagtaggtgccactcctgatcccaccaattaatagttttggggacagttgtcaactcacatggttgctttattaaaatcattatctataaaatgggcattatagttttcatttttggcaaattattataaaaataattgatatgaccattgttataatatgctacaatttacagaactgatggcagtgtaattttattataaaaattgggtcatctaggagctgggtgccctgttttttacggtaatgtgttcttgagattgtgggatatgaatgagtatttaaaggtgaagtactgtgatatgtcaagcatacttactgtttaaaaactttcagcttaaaacctcttatttaaaaaccagcttctctcttcatttatctttaggcttctcgttgataaatatggctctggggttagtgcctttaccttttccgaccccctaggtagtgtttatggtcatttaccacagtgtaccattttgtaaatagcactgtaatggcttaaaaaagtggagaatgcctcggggacaggtatttacccagacaaattgaaatggatagttgagcacttacccaattaatttattaaatgtgctcagtcaatctggataaatcaaagaaatgtgctgttttcttccttcattgtcagcaggaccttggcctaaagtatctgagataattatctcaactttctacttcatctttgcctatacagacctagcctaatttttccccagtgaacaaatgaaatcattcccacctcctaagaaacctttaaaaactttaactgctagatgctactctgttatactttctactgtgctttaacttttcgtttctgataaatacttgggcatatttgatcttcagttatgtaacacttgaataatatatgtatcactttttacttttgagggataatgtttaaagtagattttataatggagagccttcttttaagttaaaaatactaaggggggggaaccttgatatttgttttacagatggcagctgaatggaagtgatattgatatgagtatggaacatcgttataagttgaatggaggaaatcttgtggttattaatcccaacagaaattgggatacaggaacttaccaatgttttgcaacaaattcacttggaacaattgtcagcagagaagccaaacttcagtttgcctgtaagtttatgttcacatgtctagcaaatccaacattagaaaatatgtaacttaatttgtgtagtcgttttggatttcagaaataatacatgggttttattaattcagtaaatagactgagaaagcaattcagtatgatttttggacattttatagtgttcaaat

SEQ ID NO: 29985 - DNA, 2300 bp, Homo sapien
tggaaaaaggcatttcatgcaaatggacatgaaatgtgagcggggtagctattcttatatcagacaaaacaaactttaaagcaaccgcagttgaaagagacaaagagggtcattatataatggtaaaaggccttgtccaacaggaaaacatcacagtcctaaacatatatgcacctaacactggaactcctaaatttataaaacaattactaatagacctaagaaatgagatagggccgggcgcggtggctcatgcctgtaatcccagcactttgggaggccgaggcgggcggatcacgaggtcaggagatcgagaccatcccggctaaaacggtgaaaccccgtctctactaaaaatacaaaaaaaattagccgggcgtagtggcgggcgcctgtagtcccagctacttgggaggctgaggcaggagaatggcgtgaacccgggaggcagagcttgcagtgagccgagatcccaccactgcactccagcctgggcgacagagcgagactccgtctcaaaaaaaaaaaaaaaaaaaagaaatgagatagacagcaacacaataatagtgagggacttcagtactccacagaaaacactagacaggtcatcaagacagaaagtcaacaaagaaacaatggatttaaactaaaccttggaacaagtggacttaacaaatatgtatagaacatttcatcaaacaactgcagaatacacattctattcaagagcatatggaactttctcgaagatagaccatatgataggccataaaatgggcctcaataaatttaagaaaattgaaattatatcaagcactctctcagaccacagtggaataaacctagaaattaaccccaaaagtaaccttcaaaagtatgcaaatacatggaaattaaataacctactcctgaatgagcattgggtcaaaaatgaaatcaagatggaaatttaaaaattcttcaaactgaacgacaacagtaacacaacctatcaaaacctctgggagacagcaaaggcagtgccaagaggaaagttcgtagccctaaacacctacatcaaaaagaccaaacatcattctcagcaaactatcacaaggacagaaaaccaaacactacatgttctcattcataggtgggaattgaataataagaatacctggacacaggaaggggaacatcacacactggggcctgtcatggggtgggggcagggggggaatagcattaggagatatacctaatgtaaaggacgagttaatgggtgcggcacaccaacatggcacatgtatacatatgtaacaaacctgcaccttgtgcacatgtaccctagaagttaaaatataataataaaaataaataaataaatacaaaactaaaaaaaaaaaaaaaagaccaaaagagcacaaattgacaatttaaggtcacacctcaaggaactggggaaacaaaaacaaaccaaacccaaacccagcaaaagaaaggaaatagccaaatcagagcaaaactacatgaaatttaaacaaaaaaaataaaagataaatgaaactaaaagctgattctttgaaaagataaataaaattgatagatcgttagcaaattaaccaaaaaagaagagagaaaatccaaataatctcattaaggatgaaaacaggagatactacaactgacacccctgaaatacaaaagatcattcaaggctgctaggaatatgtttatccatgtaaactggaaaacctagaagagatagataaagtcctggaaaaatacaaccctcctatcttaaatcaggaagaattagatacccagaacagaccaataacaaccagggagattgaaattgtaatttaaaaattaccataaaaaaaaaagcccagggccagatggagtcacagcagaattctactacatattcaaaggagaattcatatcaatcttttcagcactattacacaagatggagaaaggaccctccctaattcattctatgaagccagcatcaccctaatgccaaaaacaggaaagggaatagccagaaaagaaaactacagaccgagatccctgatgaacatagatgctaatatccttaacaaaatactagctggccgggcgcggtggctcacgcctgtaatcccagcactttgggaggccgaggcgggcggatcacgaggtcaggagatcgagaccatcccggctaaaacggtgaaaccccgtctctactaaaactacaaaaaatagccgggcgtagtggcgggcgcctgtagtcctagctacttgggaggctgaggcaggagaatggcgtg

SEQ ID NO: 29986 - DNA, 2300 bp, Homo sapien
tacgggcgtgagctactgcgcccagccccagttttgtttaaaaactaataataatcacccacacatggttatgagtacctatattccaactactcaagaggctgaggtgggaggatggcttaagcccaggagtttgtggccaccttgagcaacatagcaagacttcatctcaaaaaaaatttatcacaataatcattttcacataagtatacctataggggaaaacctagaacatctatatagcaggcttgtccaacctgtggcccaacacaaatctgtaaactttcttaaaacaatatgaggtttttttgtgattttttttttttctttgagctcaacagctattctagctttagtgtattttatgtgtggcccaaggcgattcttcttcttccaatgtggcgcagggaggccaaaagattggacatccctgatatacacgttaacaggtgccatccttggatggcaggattatagagatttctacacgttcatatctgtactacgtcatttttatgaatacgcattttccacttgtaacaaaaaaagtgactgaaaatcatcccgggtcacagtgtctcatgcctgtaatcccaacactgtaagaggctgaggctttgggaggctgaggtgagcagatcacctgaggtcaagagttcaagaccagcctggccaacacagtgaaaccctatctctactaaaaacacaaaaattagccaggcgtggtggtgcacgcctataataccagctactcgggaggctgaggcaggagaatcacttgaacctgggaggcgttgcagtgagctgagattgcaccactgcactccagcctggggaacagagtaaaactccatctaaaaaataataataaaagaggctgaggaaggagcatcgattgaggccatgcgttcaggaccccatctctacaaaataaaaaaattactggcatggtggcatgcatctgtcatcccagctactcaggaagtgggaggattgctagagcccaggagtcgaggctttagtgagcaatgactgtgccgctgcactccagtctgggtgacagaacaacatcgtatcgcaaaaaaaaaaaaaaaaaaaaaaagaatcatcctggctaatggctgttcagacatctgtgcttatgagaacaccagccccttctaagctgtgtgtgtgtgtgtgtgtgtgtgtgtgtgtgtgtgtgtgtgtgttttgagatggagtctcactctgtcactcaggctggagtgcagtggcacaatctcggctcactgcaacctccgcctcctgggttgaagcagttctcccgcctcagcctcccaagtagctgggattacaggcacccgccatcgtgcctggctaatttttgtattttcgtagagatggggtttcaccatgttggccaggctggtctcgaactcctgaagacaagtgatccgcccgcataggcctctcaaagttttgggattacaggcataagccactgtgcccggccactttctaagctttgtgaagagtgagttgactgagcagccaggtagatgtgggttcagatctctgcttctgtcctgctgtgccaagtgctggggcagacgcgggcagagagtggacagtggcatggtgcctgctgctagccatttctatgcaaaaccagatttctagtcccatcctggtggccaattctaggtacctgggtgggcctgggaacctgtgaaacaagtaaactgacttagacaccccctaccccaccaggcctgtcctagcagccccacacaaaacgctcacgtcctgtccccaaacaccgccatcctcaagcacgtgctctgtttccaggccgggctgggatcatatgggaagcggaagctcatcatgaccagaaactgtttccctatggagagcacttggagatggcaatgctgaacctcacactgtaggactcacacacgactccaacgggattgtgagaatcaagtcaatctcatgggaagaatttttatatgggaaagcggataaaactttcattgtactggaatgtttggagaatgttaaattccaaatcagaaaccacaaactgccctctaataagacatcggctatctaagcgtgtgggtgccccctttctgccagcagttctggttcttacgaaaatcaccatatatcagacatgaaaattctggctttgtgcagataaaaaagtgtgtatcaagtatgacgttcccccaatgtggacacacttggttcctcagaaagccaagcccactgcagctgccacatccctggacacactcggttcctcacaa

SEQ ID NO: 29987 - DNA, 2300 bp, Homo sapien
gacttgctgtggatcctcaggtgactccatctcaggatagagggactgagagggtgtatgcaacatctcagacacagaaaccgttgattctgtctaaaaacacagcaataaccacatcccatcctcttgatttaaatgaaagtgtttgggggaataaaagatgaaccttttttttctttgtcagatcttgcgctcatttggttctggtggggaacaacagctataagagaacaagtgtattcaattcgaattaattcccctctcttattctcatagctgagcagggctcaagtgcctctcatctgaaagaggtaataagattttatctgtctcctcatctaccttttgcaagtatacttaacaaattagctctcgagactcttccaaatggagttttatgaggaatttgctaaggtaaacgttttagactttgaacacagttcagatttcgggggcagtactgaaatctgaactgtgttgctaactgccctgcctttcaactcaagacacaataactttgaactaaaataattatatttttgttgttttccactctgtccccacgtctatatcaccaccacccccccatcccaccccgcaggagctaactcctctttcctgtccctgcaagatcaaaactcctcctgcaagccccgctagctctgtctgctcatctttgtggcagatatcgctattgtacttttatactcatttgtgtgataagtacttcaatgtccacttcttccacgagcccctgagcctctggagggcccagaccacacctagtctttctcaccgttacatctcccttgtcaggcacatggtaggtgcttaataagtatttggtgaacgaatggcttgtttggagacagtccaaaggctggaggacagagggaaagctccctcctttcgggccccagacgggtggcgctgatggagaggttaggataaggcctccaggaccgaagcgtgcacctgtaaggcccctgctaaaaagaccttcctgaaggcggaggtactgcgagagtgtctacgttagcccaaggcctgacccgacgatcccagggaccctcgccctaactggccccgcctcccgggccccaaacccagactcggccccgcccgaagctccggatcctggggcccgcccctggccccgcgtcggccgaccgtgggctcgctcctgggcgtgcctcaaaccctccgcaggtaacgcctcccaacttgagccacattccgatcccctcctcaaacccctccccgtttcccacaccctggatccctcgctccgtctcggccccgccccaagcccagctaggtctcggcccctgagcccagccccgaccggcctcccagtccctgggtccctcccgacaccggcccctccctaagctccgcctcccagggcccgcctcctgagcgcagctggcagcccggactcggccccgcctcctggaccctgggcccctccccacgtcggcccgtccaaagctctgcctcccagagtccgcgcaccgcctggccatgtgctacgacatagtcaaccccccgccccggccccgcctcctgagcccttctctgggtctggccttagccccaccctaagacctgtctcctgggctctgctctgagtcccgcctcctgaacccaatggcgtttatccccgctctaatgctcgcctccaggactcttatcctgcccacacgcaaggcaccgcctccaggacgccaccaacctggacgcttctgaagcccagcttccaggatcgccctatcctgactccgccccaggacccgccaacctggactctacccaggacctgccccaacgacgcttatcctggccctaccccaggcctcgccctcctaacgctcatcctggccccgccctacagcccgcccccaggacgctcctcctgaccctacccccaggccccgccccctctctgccgccgcgcactgccctgggcccaccccctcttcagtccaggcccggcttccgcccggtctcccggcaacgctgcggccccgcccacgtcatggcgcccgaggagaatgcggggaccgaactcttgctgcagagtttcgagcgccgcttcctggcggcgcgcacgctgcgctccttcccctggcaggggggcggcgggcgagcggagaggcccgcggggctcgcgggagtccaggggcagacgggatgggtctccgtgctgaaacccccggcgctcctgccacgtgagttcctgggctctccccggtcagggccgcgagacccggtccccgtccctggggcctggccagagt

SEQ ID NO: 29988 - DNA, 2300 bp, Homo sapien
aactcctgacctcaggtgatctgcccacttcagcctcccaactagctgggattacaggcgtgagccaccacattcagttaatttttttttttttttttttttttgtatttttagtacagatggggtttccttatgttggctaggctagccttgaactcctgacctaaggcgatccacccgccttggcctcgcaaagtgctgggattacaggcatgaggcaccgtgcctggccagacctgagttttgcctgagaatttctctttctaagaaagtacatcatatggcagttacaaggtctcttttatctaaaatatatagaatttaataaataaaaatttaaaaaatttacctgagattaaaggacaaatcaaaacacatatgtaatatgttgtctgtaggagtatattttaacagtgacataaattattaataatcactaaatgttataataatttattaactaaaatgaacaaaattcctattatgatatctatgaaaatacttccttagagtaaaatattctcatatcttgagagggcactggttaaaaacagcaaagatgtggaagtcgatgtcttatcaagtacttactatcaagtaagtagcagacccccttcacaccttttacagagttatccaaaaagcagtcatttacacaagagcagacaattttcctagctttctattgagtttatatgttaatattgttaaaaaatgtaactcaattttcttataaaattacctgaccaaattttatatatcatatcaaaatttatttagatgtcaaataaattttataatattataatatataatgatatcatattatgataagttccatttacattcagacaatttcactaggcagtgtctgtctaccactaattcttttttggttccactatttgcacaggcagcacagctgggaaaacacagactcacccaacacagtctcttccccgtgtctttctcctcctcaaggaatcatttcatcagtcaatcaagtcatttgggactggaggccgagtactccctaacatagaaagtctcattcctgcatgctttcctcagcagagggggagagaagaaggtccttttaggggacacttgcttggacgtagcctaggctagttggagggctctgaccagcagagacagactccgccgcagtaggaagggatgaggcagctattctgaacctggagctccaccacactttgtcccgtctcactgaggcaattttgagaggctgccctggaatatggtggttgttgagaaataatgtgggctttgacgggattcaggtggtgtctgcggtgtgaagacaggagctgaatgtttagaatctaggctgtttttcttgtgatcagctgggttacctgtttgcgaccaagtccatttttactagggaggctgaataaattccacagaacacaatggccctcccaggatgactgaggaagggtgagaaagggggaaagtttttccacctagaatcaggggctgattaggttagcactggctcaacctaatcaatgcaattttattgcatttgatctaattatcttccccatttttaaggtaggaagggccatttcatttggtatttattttttctctgcacttttatttcatcatctatgtgtggatctaatagactcaaccataatttgacatttgttgtttccaagcatttaagaaattataatatctatgcatacaacgttaacactatgtataataaattctctttctgtgcaaaatatataacatatgtcaatatagacatgtttaattgtgcatcttgaaaggtgaacaggatcataaatacctccaggtaggaactgggacagaaatcggaagaaatgattccctgatcttccggtccctgtgctcccggttctttgttttcttgacactatgacaagatcctgaaaatgtctccccttaactgtgtctaggtccccagtagaactacagcaagaaacttctgattgaggctctaagaagcggcaggaatgagaaaactcttcagccaataagagtaagccacgcccagccgagggacgtataaaaggcaggtctagcagactaacccacactctgcctttggacatgtgagagagcgcacctttcacttgagcttcaacatgggaaagggaaatgaagaccccgatctccactgttcctccatccagtgctccactgaccagccccctttccaacagatctcctttacagaaaagggctcagatgagaagaaaccattcaaaggaaaaggcaagaccgccttctcccat

SEQ ID NO: 29989 - DNA, 2300 bp, Homo sapien
aatattataatatataatgatatcatattatgataagttccatttacattcagacaatttcactaggcagtgtctgtctaccactaattcttttttggttccactatttgcacaggcagcacagctgggaaaacacagactcacccaacacagtctcttccccgtgtctttctcctcctcaaggaatcatttcatcagtcaatcaagtcatttgggactggaggccgagtactccctaacatagaaagtctcattcctgcatgctttcctcagcagagggggagagaagaaggtccttttaggggacacttgcttggacgtagcctaggctagttggagggctctgaccagcagagacagactccgccgcagtaggaagggatgaggcagctattctgaacctggagctccaccacactttgtcccgtctcactgaggcaattttgagaggctgccctggaatatggtggttgttgagaaataatgtgggctttgacgggattcaggtggtgtctgcggtgtgaagacaggagctgaatgtttagaatctaggctgtttttcttgtgatcagctgggttacctgtttgcgaccaagtccatttttactagggaggctgaataaattccacagaacacaatggccctcccaggatgactgaggaagggtgagaaagggggaaagtttttccacctagaatcaggggctgattaggttagcactggctcaacctaatcaatgcaattttattgcatttgatctaattatcttccccatttttaaggtaggaagggccatttcatttggtatttattttttctctgcacttttatttcatcatctatgtgtggatctaatagactcaaccataatttgacatttgttgtttccaagcatttaagaaattataatatctatgcatacaacgttaacactatgtataataaattctctttctgtgcaaaatatataacatatgtcaatatagacatgtttaattgtgcatcttgaaaggtgaacaggatcataaatacctccaggtaggaactgggacagaaatcggaagaaatgattccctgatcttccggtccctgtgctcccggttctttgttttcttgacactatgacaagatcctgaaaatgtctccccttaactgtgtctaggtccccagtagaactacagcaagaaacttctgattgaggctctaagaagcggcaggaatgagaaaactcttcagccaataagagtaagccacgcccagccgagggacgtataaaaggcaggtctagcagactaacccacactctgcctttggacatgtgagagagcgcacctttcacttgagcttcaacatgggaaagggaaatgaagaccccgatctccactgttcctccatccagtgctccactgaccagccccctttccaacagatctcctttacagaaaagggctcagatgagaagaaaccattcaaaggaaaaggcaagaccgccttctcccattccagtgagaagcacacacaaaggcaaggtaaggccttgggctgctcctatggaggctggaaggagggttggaatcagggatactgagctatgtgtctttagcagggttttattttgagatttggggatgggaaatggcttagtgcccttaggggactttgagaaatgtgttcactcatgacactggcagaagagcttcacatgaaagactgattctcaaaaatgcatgagagatagactatgggactctgcctagggagaggtgagccatctaaaccttctcttgcagcaggatcagatcccaatccaaacaaggagaattctgaggaaaccaagctcaaggccgggaacagcactgctggatcaggtaagatttgactctttcaaggtgagaagggacagggcagcaacacaggctcccctggcaaggaaactgggagctccttggcagccagggcagtacagatcctggacactggagaacagaagagagctggggtttggcggtaacctcagctcctgtgtgtccaggatggactaggaatttcagggtgttcagttggaggcactttctcaaactctcattgtgttcacagaaccagagtccagctcatatcaggaaaactgcaggaaaagaaaaatcagttccaaggatatctgccaagacagagcaggtagaatcttggtgtttgttgttgttggtggtggtggtggtttttttgtttttggtttgccccaaaaggcaaataatcaggaaacttttatacgaggcttgagcggaaagggaattacttattg

SEQ ID NO: 29990 - DNA, 2300 bp, Homo sapien
ggaggagctttaggacgccgggttggggcggggcgggggcagggcggcggcctctctttggcggtgaacctctggctcggtatggagaggcgtgtcttcccttccagttgacctgtctaggatccctgggttccaggtccggcgagagactccacacagaggagggctgtcattctttcctgagcatcccggggatcccagggcccgtccacgtaccgggaggtggactgtctactgctcatgcgggggtttgcaggcaacagcttaggttttctaaccagcccaggcggagctcgcatcccttttccccccgcgttcttcagtcgggttggcggagacctcagtccgcgaaacactgggtcggggcagaagccaggccagttctcctttctgcggctcgattcctctgcctcttctctcactatcacttgccaacccgtgtcccaccagcctcctcgccagcaccatggagcgccttgcaactaaatgtagacccgagaccccgcgcaaaccggggtgctgccctttccaggcaagagggaaggcaggcagagatgaggacaggaacggagacagagtgggacggaaggatggagctaggaaaggatggatggacggagggaccctggaagggagaggaagagggagagagggagaaagggaggaaaaaaccagggcagggagggaagaacagagggcaggatggaccgagggacaaaaggagcaagaaacagagaaccgaaggcagacagaaaaacggtcttctgcctccagaaccaacaggacccagcaatccgggaaaatgttgggtgcccagtgcgggctaagtgctgggcccacagccccgttggccggtggggagctcagcggccctccggatcgccagcctgggttacttcatcccagagcgattcagacgaattccgtttccgaaggaatgagcgaattccccagagagcaatgagcggagactcgggtggttgtctgtttttcatccacatggttcacagatgacatatccccacgtttagccctgcaacagagcgcgaggcggatagtcccatccacacagaagtcacgctcaggccaagtgaagcgtgattctggattccacgtttctttgctctctgcaaaggtgcctgttactcaagtctctgccgcccccggaaagcgtgaccatgttgactgtttcccgagctctgtggggacccagaaacttccaggaatgcgtggaagaccagcatcgtgtcggtgctctcctttccagttttcaaacaggctatatcgaagactccccattttgcagaaaacaggaatccatcctcaggccgtgatgcacgggacgtttctttttctctgtgctttcgctctcattgtctacatgaaaatgaacgagatccacacacctgcgtgtgtgagactatcacggcaactatgacacccacgcgctggcaatagagttggcagcctgatcccaggacaaaggtactgacggacatccagacacaccccaccacaatcactagcaaacccactcccaaacagacacatacgggcgcacgcgcgggaacacaagcatacacgcagacacacaaagacacagacagcttgaagaagagcaagggacagagggatggagagatagaaacggaaggagagagagaaacagcgatagagagagagacagagagggacggggaaactgcgagagagagagagagagagagagagagagagagacagagagagagagagagacagagagggacggggaaactgcgagagagagggagagagagagagagagagagcaaggtggagagggaagtagagaaagggagagggtgagggagctagagagggggagcaacagagccttggagagggaggctctgctctggtagacaggggaccctttggcgagggtagggtggagggtgcctgggccgggctagaacaggagggcagggccgcccacgcgggaaaaccaacggagccctgagacgtgtttttacttggattggttggttgctttgggcgtgcgtttcctagcgtcattcctttgttggctcctccctgtcctcttggtgctgtgggccctgaaagttgtcgagtgcgcctgtccctgtggtgggagcagtggcgccgagcgtgcccacgggccgccgcttgggtttctctcgtgttcagggtagtatggacgtggacaatggcagtggcccctggctggcccaagagccgggtccagatacgcgcgcctgattccaggcgtcataaccaacccggggccgcgaggctgg

SEQ ID NO: 29991 - DNA, 2300 bp, Homo sapien
gagtctggaagaattacagcattattgggtataaggtaccccataaagcagatatggcttagatcacaacctaagccatatttgacccatatttgacccaagtcttttcaaatatgtgaaaagtcttcccaagaaagacagctacaaataagcccagacagtgaagactacaataaatactcaccttttctcttttttaattttattttttaaacctctcatatggtgctgcatgcccaagattttaatgtccagacactgaagaacatctactaccatcaacaccatccaggaaaaaaacatgacctcaccaagtgaactaaataaggcaccagggacaaatcctggagaaaaagagatatgtgacctttcagacagagaattcaacatagctgtaaaaagaaaaaaaaaacctgaaagaaatttaagataacaaagtaaagaaattccaaattttatcagctaaactcaacaaagagattgaaatagttacaacaaattaagcagaaattctggagctgaaaaatgcaattggcatgctgaagaatgcattagagccatttaatagcagaatggatcaagcagaagaaatagtgagcttgaagacaggctatttgaaaatacatagaagagacaaaagaaaaagaataaaaacaacaaatcatgcctacaggatctagaaaaatagcctcacaaagacagatctaagagctattggttttaaagaagatgtagagacagaggcaggggtagaaaaatttattcaaagggataataacagaaaactttccaaacctagagaaagatatccatatccaactacaaaaatgttataggacattaagcagatttaaccccaaaaagactatttcaaagcgttcagtagatcctccaaaagtcaaagataagaaaagttctaaaggaagaaagagaaaagaaacaagtaacataccggtgagctccaacacgtctggcagccgactttacagtggaagccctaccggccaggagagagaagcaataaatatttaaagtactaaaggaaaaaaacttttaccttagaatagcatatacagtgaaagtgttcttcaaataaaaagaaatactgacttttccagacaaacaaaagctgaagtattttatgaataccatgtctgtcctaaaggaatgctaaagagagtacattaatgagcaataaatgatcacctaaaggtaaaaaaatcctcactgctaataggatacaaaacaaaacacaatattataacactatagctgtgtggtgtgcaaactactcttattcaaagtaggaatattaaataatatccaatcaaaagtaatagctacaacaacatttcaagacatagcacaataaaatataaatagaaacaacaaaaagttaaaaagtgacgggatgagcatacctgtcctgagccggccgatgtggtggaagctcggagctcgggagccggggaagccctggagcgtgggcggaagggaggccgccccgagagccggaagcctgggcaaggaatggaggcctcgggcgccccccagcaacagcagggcggcgccacactggtcctgcgcgaggctggccgccggcgacggcgggacgctctgggaggtcggcggaaagcgcagcgccgcgactggcggtgcttaggcttagagggggagagcagcccggccacgggcaagcggctccggggtgcctgatcccagcctcgcggccccgggttggttatgacgcctggaatcaggcgcgcgtatctggacccggctcttgggccagccaggggccactgccattgtccacgtccatactaccctgaacacgagagaaacccaagcggcggcccgtgggcacgctcggcgccactgctcccaccacagggacaggcgcactcgacaactttcagggcccacagcaccaagaggacagggaggagccaacaaaggaatgacgctaggaaacgcacgcccaaagcaaccaaccaatccaagtaaaaacacgtctcagggctccgttggttttcccgcgtgggcggccctgccctcctgttctagcccggcccaggcaccctccaccctaccctcgccaaagggtcccctgtctaccagagcagagcctccctctccaaggctctgttgctccccctctctagctccctcaccctctccctttctctacttccctctccaccttgctctctctctctctctctctccctctctctcgcagtttccccgtccctctctgtctctctctctctctctgtctctctctctctctctctctc

SEQ ID NO: 29992 - DNA, 2300 bp, Homo sapien
gacttcaccttcacgtggtgaggaaaggggttgcagtcttggcttttacgttatattaggtgggttcaggttgaggtatctgcaattcaaatgagtattacaatctctacttttatggataagagactgaggcccaccaagagagggaatgacagtccatatcctggaaggcaaattgtcaggcactgatttccgctatgtaacccctgccaatcatcgtgtatttaaaggatccccagataccataccaataggtgttcaagagagaggcctgtaatctaggcgtctgagaaagcaaggctagagattccgatattggagacaacagggctctgggaagattaaggttgagttttctggatctgcagaatagagtcactgaggagcaattgcaagatccgaggagatgaaagaacaagtcagggcatgcttaggaaaagagaaaaccagggataggttttaggcaagagtcacactgaggaagggcaggttcttggcgtcgctcaggaaggaatccaaaagcaagcctgtggtggaagaaagcagctctacggaggcactggcggtgttacagccctgcgtccactcctgcagggcagggagccctccgtgggttgtgctcccagagtagcagcctgggggtggcttgcagtcatttttataattcacttttaatggcatgctaattaaggggcgggttattcagaaatagctagaaatgggcagtaacttccagctgtttccatggcaaggggtggggacttcccgtgctgccgtggcattggcaaactgtcacggcactggtggaagcgtcttctggtgatctgaggcgtgaggtgctttcgctgcctctcccagtctcctgcgtgcctcttacctgaaagcccttcacaccctcatctgcccacctacaaacttcactgccctttcaccccaaccccgtttcacacgcactcccacatcaaccctgagcattcaagcttgcgtttccctgttaggaacctcggtggtggccggagctctgagaaacccctaggcagaaatccttgcctagtttgtggcagaaatcagggaaggaaaggcaaagttcaggtctttctcacaataaataaataaagatagctagatttgattgattggtggatggatgaaacgtgggagtttatgggcaaatatttatcagacactggaagtgtaagttgtcacaaagattatggagtgcacctgtcttatgaccctgttattttatcccagtatatgcactagagcattttttgtaactgtgtaaattgaaggcttataaattagtttagtgagagaaaagataacggattggaagagaattaccatattcattagttgtgtttttaaaattttaaagtaaaatagagacatgatttttttcatgctttcgaatgcatttataaaaaatagacttgagggctgggcgcagtggctcacgcctgtaatcccagcactttgggaggccgaggagggcggatcacgaggtcaagagttcgagaccagcctgaccaacatggtgaaaccccgtctctactaaaaatacaaaaattaggtgagtgtggtggcgcgcacctgtaatcccagctactcaggaggctgaggcaggagaatcgcttgaacccgggaagcggaggttgcagtgagccgagatcgcaccattgctctccagcctgggtgacagagtgagactccgtctcaaaaaaaaaaaaaaaaaaaaagttactcattaatagcatagaccaattggcctctattgaaatttctccattattttcacaatgtgccaggctgtgaaaccaggatttaataaagaaccagaatgccacatctgtgtcacctgggtagggaccagtcctgatccattaagtccgggtctctgggtaactggactcactgctgggcaaaacagaatgtccggcttgggttcctaaccggggaccgcagagcctcatgggaaatgtagtgtcaccttccaatgatgttaccatcaaggaccttgggaaccagcttttctctctgcgcatgcgccgccccgcccactccgccattttcctccggaagtgcggcacccagaggcggtcttgtagctgggccagcctggggcttggttctatgtccctgcgggtcggtgcgagggcgaagaggaacccgtgggcccgggggatcccggggggccggaccagtgttccccagttgtgggagcagacgcgtgggcgcatcgcgggcgggcagggcctgaagtgcaggtgcaggccgcggaccctggcgggggctgg

SEQ ID NO: 29993 - DNA, 2300 bp, Homo sapien
gcgagcctgtgatcacacgtgggcccggccgcaccggggcaccgccgacaccggcacccctttgatctaacgtgaccttccttcatcatccccggtcctgaatggcatcctttggtagtcttggtcttaattttcagagttttgtcgtctttgggctgaaattcggcttctttttgagcttccatgagctcagctgggctttcggctttccacacccagagcctatgtttaccgaatttccttctggaggtgctggtccctggagggtaaagacttcggggatccccctcccccaagctctgtgatccccgcttccccgtccttagcatcttctgtggaactccctcgccctgcgcgatcgcgcatcaaactcatcgtggaggggtcaaaaggcaactgagtaacataagaggggctgcctccccttcctccttcccttggggatgccgcagggggccatagatcttggctaaaatgagccgctggaggttagagaattctgccccctcctttttctcccccttgtgcttttgaatcatataggaagcatctacacacaacctttccagtccaaaaggtgcttctatttcctttcctttcctttccttcctcctactcggcttctcatctggctaaaaggtgaagagtgagtgagtgtgtgattttaacgcgtaatgaggctgcgccctgggtcctggaggctgatctttttcaagaaagcgcgtgcagctccggcagacggagggatgaataattaggaagggcttccatgaaatcactcacggagaaaattacctgcccattaaacgggacgcggcgaggagcaggagcctggagcccacctatcccctcccgaggcgggaaggagtgggcacccgggggcgcggagaaggggaaggagtcgcccggtggcctcggccctcggcagccggcggggctctccgaatttgttcatctccgtccccccggggactctcggctctccaggacccctccccactccccagcgggcgggtggccgagtccggaggttcagggctccgcgcgcccctcctcgcccccgcccctccccgggccgactccaggcagctctcattcctcccctcccctcccgcctcctcgccttccctcctagaagtccttccacccgcggcagctgccggaggaagcggacgctctgctgcgaggctgcgggggctggacccgggcgaggggcctcagcgcgcctggcgctggactgagcgctccctttctccgccgcgcccgggctgggctctcacgcccgtctctgctcgcgcccgcagccgcctggtgcactatcctcagaggcggcaccgcgggggtgtctgcagcctcggcctccgcccggcccctccctccctccctccctccctcgctccttccctgcctccctcaccacgtaggagttcggattctccacccgaatcgtcctgatttcccttctcctctcttttggaaaccggagaggtggagggagggcaacaccgctgcaaaggagaggcccgccaagtctgcccgcctgcaaagtgttgctttgacacattcttattatggaagttaagtaaaaatatagacatattaaaaaataactccggacgtggagctgctacggagaaggaaaccgggggaaagaaaaccagtaggcaggccaatggtttttcggcagcgcgctggcaagtttgtggaacactttctaggaattaggtcttttcctcccccttcatcatcttgacttctgaaggaagaacttggctttggattgcagtggagcctaaggagagagggttagacacactcgaataatccctctggctgggctgaatttgtgggaatttaggaagccagagtgctggaaatacagcagcctttgaagtaccctctgttaatttggatggatctcagtgtgccccgttcgagacctctccaccaaccccttctgatcttgcgatttgctcttcttgactttaattagtatctaggaaagtctaaactttggacctacctctttttttgatactcatttttgtacttttgctctctgggattggtttcttaaagaatctggatcctttttaatatgtcaaaatgagtctgctgatgtttacacaactactgctctgtggatttttatatgttcgggttgatggtaagttaaaaatgctttcatctttttttgcgccccccaccccccaatcccccaaaaccatttctttttgaatttgatgtgggttataaatgaaatgacattatgtctgttagtccgttttggcccggcacgg

SEQ ID NO: 29994 - DNA, 2300 bp, Homo sapien
cattaacatgtgctgaatgagtcagtggatgagagaaagacttctctagcttgttcatcccagtgtcaggatgtagtatgctactcccactaaaatcaaagggaacaggaaaggtctcctcttgatgaatcatttttcaatctggagtaatatcaatagtgtctcaaacctctttaacattgggttaatgtagtttttggatgaatagctgcgcctgatagcacagaagaagtcgatcccgcttcctatgtgaatgatttattttttactattagcatttgggaccctcataaggatatattaatcctattgcctatttaactaccagaaatgatagctcaataccaactatgccagccccaaaatagctgttttgggcacatagtgtacagagttgaaaaaagtaacactaaattattttatccgacatgttgtctacagggcacaatttgctgctaatttattcagggcgtctaaaatctttagatgcaaccgtgtttttctttagtttttatggatcgtttgtcaattctgcatttacaaaatttttcatgatgaaattctatttgtcttgttttattgcttgggatttttgagtcccagagtacggatactctagcatatgcagaaaattttgatccctactgtcaaattctctggagatatacaatagtcttccttctaaatgccaatggtagttggttttattgcaataaaatatttatcttgcaacttacacatttgttttataaatatggatcttgatttagtcaataaaatcaaatactcttatttatactcttaacatctattatttgaagtaatttattttctttgaaggtttcctgccgaatacattttagtttttgtgccactgtatacaaaattttaaattagaaggtttgaaactcaagttctaagtggctaaatatgtccagatggccagaaaaattgtgtcagcttcctacagatctcatctttcttttccttggcttagttctctttctacctcagtaagtagcaatattgaatttgtttgtgatttgcagatatgggctaataaaatttaaatgacaatttttccagtctcagaccattatccaaaagggaagaaactggacaaggaatgccaatgtctggtgatacataaaactactttttgatttgtatcctcagaggctaagaatcttatggataggaaaagatttttatggatacagacttatttttctctagccttatgtagaagagtgctagaatacaatttaacagtgccaaatacagattaataaaagaagaaaggatgaaaacagtaaaacagattactgaagaaataaaaaacataaaattaagtaaaaaaaaatgggtagatatctcaaacacttaagagaagaccattggagaaaacctcaaaaaattgataaataaatagtttgcaacaattaataatgacagtctttgtatttaagaaaaaaaatcaggtagacatctttccatacatgaagttaaaataatcatgggaatattgagtccttatcaaatcatagcttaagtgggaaaatctaggtaatacatatgtgtgaaagtacacattttttggttttctctagcattcttgaggaatattaatatttgttttttaaatgtttttatccctttcaacttttagttttcccactttgaaccctgataatagattattgtaatcatttttaatctctctttttcctgtagaattcagtgttctgattttttatgataggatccacctgatttagctcagggattcactgaaaaatcaatttaatatttttttccaaaggttgtatggtcttatgtgcaaactgtagctattcctttgttccaaaatatcttattttattgaatgacattggattcacaaggccttattaaaacacagctgaggtacagagttaggtacctgtgtaccaaaagtaaattaggtttcctttgcttttttcataatgtacttaaagcatgcataatagtttatctcattttaccattgtttcattttttttttcaagaacgacccacatttctcaggaggccaattaaccaggtggtactggaggaagaagctgtagaatttcgttgtcaagtccaaggagatcctcaaccaactgtgaggtggaaaaaggatgatgcagacttgccaagaggaaggtaagaccaacatatggatggaagattgttagataaccaatgaataattagaaaataaaaggacagctacaatgccaccaccaaacactcctatgtcttggggtactttcact

SEQ ID NO: 29995 - DNA, 2300 bp, Homo sapien
tgaaggccaaattttcttttctctttgttcaagaagttatttgttttctttctgataattcctaatagttaaggaaatcaccagataggtgtatgtctcatattgaaaatatgagctcattttaaatacagctttgactatgtttaataattatatgtataataatatataatattaaacatataataaatatatgtataataattaaaggcagacatagtgggaaaatgagccagatttactacataaatgacgctggtttttaaatctgaaatttaatacaaaagacctttcaggaatggattataagtatgtataaggaaatgctagcagctataataaaaaagcctgaattttgaaaagattaacaaaataaaattttatttctaattcacagctcagaccaatatgggtcagcagaatgggaaatggagtttctactccataccgttattcaggggttttggatctttcaaatcatagctctgccatttcttggaagcttaacatcctccaacagatcccctgtttctgtccaacagtgaggaaagagagtttcaagtcaaggcagtgttacggatcaggcctggagggtcgtgtgcactttttgttcctagttaccactggctaatgctcagttacttttttgaactctgctgcaaaagatgctaggaagtgtaggctaattttctgccttggaagaaaggagaagcagtgaggtaaacaagtgaattgagatttgcaggattctcaaatctagataatttatcactcatgacactgaggttgactgagaagcccttaaagcagcccttaaacttacatgggtcataattttgagtcaaaaactacatattagcctccacttcaaccctcccaaaatatatgaagtagacaatactggtgccaactaattgacaggggctctagaagatttagtgccctatataagcttactgcttacttagctagtaagtggcagagtggtttcatcaaaatcatgacttcaaagatcatgatctttttaacatattacagtgctatagctaaaacaaggaaaatcccacacattcctttgatgtgatatgctgaaatgtgccatttatattttgcttaccatttaccttttaaaagtctttcattaatcactaattaggcatgatattaacattagaaatcacttaattcccagcatctacatttcttaatctgctaaataagccaataaatcttatgattccacaagtttaagacctatttaaaatgtagattgagattttcttaattatctgagaggcctaaattttccaaacatgactagttctagaataatcttagttcagatttaaatgcatttctcagtaatggagacctcaaagttaatttttaagttgttctttaaatttagctttcaaatggattttcaaattagtttcagatactttaagggaatatatgagtttcatctttttcatattttaattatacacgctgatctctgtgaaggctgtttacataattgtcattgttttgtatagtagttttaatacttcccagaaaattaaaggatattggctcaaaataagttctttggtagaatattaaggtcaacattaagttacatgttcttgtgaattatgaacatttggaatatggaccgtgccttagcagaaaagcaatttgcaaataccccatgttaaaagttgtaattgctttcttaaaaatgagaactgtatttaaaaacacttgatgtaattcaagataagttattaattcaactcctagtacttatttttataatttataaggtgataaatcaactacgttgtgaatccatccatagcaaaccacaacacaagaggtcagtgttcttaatcacatttgcaaactcacgatttgattattcttttgaaaattatgggctatgcttatcaatacttgtgataggctcaaaactaaacaagcatttcctgccttcaaataatttttcttcatttttgatgcaccatgtttatattcctgtgcttattttcgttttaatatatactaatactatggttttttccatagggagacgcaatgaagttgtcattactgaaaacaataacagcataactgagcaaatcactgatgtggtgaagcaaccagcctttatagctggtattggtggtgcctgctgggtaattctgatgggttttagcatatggttgtattggcgaagaaagaagaggaagggactcagtaattatgctggtaagtgactatttccagctaagaaaatctcttgtctgtaggaatgt

SEQ ID NO: 29996 - DNA, 2300 bp, Homo sapien
atggtttgatcttggctcactgcaacccctgcctctcgggttcaagtgattctcctgcctcagcctcccgagtagctgggattacaggcatgcaccaccacacccggctaatttttgtatttttagtagagacagggtttcgtcgtgttggccaggctggtctcaaactcctgacctcaggtgatccacccacctcagcctctcaaagtgctgggattacaagcatgagccaccacgcccagtcatttctgttaattttaaaacctcaattgtgcattcccagacatcctttgccaaatgcccttttctgtggcaatggtggcatggagaaagtgatcatgttctgcttttaaatacctccctccacctgcctctgccaggtgcattctcctagggctaaggcagggaagatggaatgagaaaagggaaaactagatgaggatccagtcttctgcttggttagctctaaaggctattcttatctcatcttactctatgagtatcataagggtgctaaaggagaggtgccgacattcacttatcccactgatgaaggcctcaatcctgggcaccatctctaggcatttgcagttcttaagtgatttatccatatcttcaggtaaactaccagttgatgacattcatgctgtatctctcctagcctcccaagctgtggaggtcaccagatgaccctagaccctaatctcagctgctctccaataccagtgctcagtttggcagcttgtgtagaatctatcctctttacttctcaggagtgcaaaatttgatgaggtgttttaatgacctttccatctgaaagtcctccatatgtcatctctttaaccttgcttagagaatattaggactgttgagcaagtcactgaccaaggactcctccaactagaaatccaaccatgtcttccttttttgatggcactcttttaatttaagagttattctcttagcattctcctcccatggggatgacttccttccacgaatcttgcttcctactaaagtcaaaatgctctataccttctcggtcatctattcactgtggatcatagccctagtggtgttagtggaaggatggcttctagctgttgttattcttcatgtctgcagagagttggttgaaaccaattaattggtaactgtttacctatattttgggagactacttcattttgtcctcaactctggttcttaaattaattccaggacataagaaaaaatacctttaaatatatttttaaaaaagatagaataacaataaatgcaatagtgttaaaaatagttaatgatctttaatgaaactcatagcgaataaatcagagaagaattactcttggcttccatagcttttttttaatagaataaaatctaaaggaaattatgtcatatgctgaatgtgtgcttttttaaatcttatgaaattttactctttatagtgaagatgaatgacttcatttgcttgaaaaagtaggagaggtgatttaaaaaagggaaagaaacagatgtttgtggagcaaagtgtttcaggatgaatgtcagttgtcttcagtaatgataaactatggataatatttgaaatgctttaggacagatacatatgtgtatgttttcaaaacaagtattacttttccttttttcatgaaacataatccaaatgataaaacataagaaggcttagagataactgactatatttctattaaacttgaatcagaaagtaacccggtggagcctctggttgcgaagtgcaactcaatataaaatcaaacttaaatatattgtgatattcagttgtttttctgaacatatgagctcaaaagaagtaaaggtcaaatctgcatgcttgtgaatttcttgggtaatttgtccttttatgtcttaaataacaagctgagccagacctatttattcatcttcatacagacggcagcctgtgagtcctcctccaccaccacggccgatctcccctccacatacctatggctacatttcaggacccctggtctcagatatggatacggatgcgccagaagaggaagaagacgaagccgacatggaggtagccaagatgcaaaccagaaggcttttgttacgtgggcttgagcagacacctgcctccagtgttggggacctggagagctctgtcacggggtccatgatcaacggctggggctcagcctcagaggaggacaacatttccagcggacgctccagtgttagttcttcggacggctcctttttcactgatgctgactttgcccaggcagtcgcagcagcggcagagt

SEQ ID NO: 29997 - DNA, 2300 bp, Homo sapien
tctgtaagtgcctcccaaagccacattgaggcctcttccctgtggtcttcatgctgttacagctgtttgccagctgttttcctgataggggctgcagatgggagcttgctgggtacttaagtcctgtttttctaattaaaggcagttcgttattagaactaacatgtggcacatcacaccacaatgagaacaaaaccgactgatcttgactctagcaatgtttctccaggagagggtagaaatgccacttcccagcaactggattaaagttgttcttaggggcttttagccaagagtctccacccttcttctgtaatgaatatggcatttgcattttacagttttcccttaactaacacgctggtctggcattgtctagcctgtgtttctgttggaattaagggagcttagaaatggccctttaccttttagatttactctgattctattatatgttatttgtttgttttaacaattaacatcttattaaatgacttcttttttgaagctaagtcaatcctgaattaagagaaatatttcaaggatctacttttaagaaaatcatatgaaatattttaatatttgattatcttatgccatttgatctttgaatttttagtcacatagagaaaaccatatcttaatgggaaaataaacaatgattctaggttattaatctttaattgaccttcagcatccctcagcttagatacctagatctgggtgttctactgctatatatcatttgatattctgtgaatatatggtaaaaagatgtaaagatgcgtgatggtaattagggaagagaacaaagcaagtaaataaggtataggagagatctgtgataggcctctccggactgatggagttgctacagtagatgtatatcaggaaatccagaggaagatgtgggttaatgtctagtctacaacacatgcacagttatcccaatgctggacaccggagtggtggacgagagaagtgagagacatacacataggactgataatcgtagtttattaataacagcctgtccctagcccacgcttagtgtggtaacctaccagtacaagaacatctggcttaacaaacactgccatttgactgaaaattcccaagtgacaaaaaaatcaaggctcattgaatatgatcagacctgattcatatattacatgacttggagaaggattggatagggttaaaaaactaaggccaacataatgcactgatataaagggaacttatgagaaaaataatcatagactcattgtctataattcacatatgaatcaaaaatataacatattggaaaggggatattttgtcccaaaatatttgttgacctaaagtttttgttaaaataaatgctctcaaatatatagcctcttgtgtttaaaaaatatgccagatctaaaatgagaacactggagcacttgaatgattgggctatgtcaaactactaagaatgttcaagcaacatcattttaccataagccatcattgtacagaaacagtggctgaaaacacttctgtcccttttaaaaatcatttttctgcttcttttgtcattagttctatcagttattccagctattatttcatctgtacttgcctttctgaagggaactagtaatttcattgtgcctaaaacatttcaatggacaagtacaaattatatatattcagtgatttaatgcaacagtggaactctaatagatcgtatctgtatcatattgtattttaagttccagcaattaaataatagaaaggcactcgagaaaatatatctacagctcatttgtttgagatgataatccataatgcaattaattgctgcaggaagatcactattaatgatatgacttgaaacattcattcatggttttattgcttttttgctatttattttgcagttattcatggcagtaccttgcatgttctcttgtacaaagttctgtttaaaattaatgaaaaagcatgtttatctctgtatatataaatgaattataaaatcatatttacaaaaaataattaacttgtgactaatggaaaaagtttaaaggccagagatcaatggcttctattttatttcctttctagggagtcaggggcacaagaaaggggcaagaacacccaaggtaccaaaacagggtggcatgaactgggcagacctgcttcctcctcccccagcacatcctcctccacacagcaatagcgaagagtacaacatttctgtagatgaaaggtaagaggagcatccaaacagatgtaaacagtgtaatatgattgtttcagcccat

SEQ ID NO: 29998 - DNA, 2300 bp, Homo sapien
gcagaatttaaatgtgaggcccgaggtgaccctgtacctacagtacgatggaggaaagatgatggagagctgcccaaatccaggtacacatcagagtttcatgatatgatttgtcaactcagcatttctacgtttctcatcacatcatctccacatccgggccattagaatagtccattctagaatcctctatcaggggccagatacaatactggagataattagaagcaggaggttgccatcctgctttctctgaggctttcagagaagaactgtgcattcgtgaccctgggctgcagagggaacccttgtaaaatatgatattctttaatatcacaggtttctcttctgttcaaccagatgacagttaatactagttttttggtttggtagtaggcaggaaagggaagaaagatacagccttaaggatgtatctatgagccaattaaaaatcaggcttccttttcctcagctaaaataccaccagagaatggtagaagaggttggagtttcttgatatctgtcaagtccttaaattggccaggagcagagatgcacgaatcagggagccttagggaatgtgccattcaaataaaggctttcgggtactgtcagcgggccgtcttctccattatgttcactccttcagcaaacatgtgttgagccttctgtctaggtgttgggattacagtagtggcttagacatagtttctgctctcaaggagctcacaaaaggaaatgcattgatagatacagaataacaatatcaagctgatatggtttggctttgtgtccccacccaaatctttcaacaccttgaatcctgagattcacatgttaagagtggaatcagttggagatgattgaatcataggggtggtttccctcatgctgttcttgtgatagtgagtgagttctcatgagatctgatggttttataagcgtctggcatttcccctgctggcactcattctctctcctgtcgccctgtgaagaggtgccttccgccatgattgtaagtttcctgaggtctccccagccatgtggaactgtgagtcaattaaacctctttcctttataaattacccagtttcgggtatttcttcatagcagtgtgagaacagactaatatacaagctcttttgtcacataaaggtaaacctgtgccagctcagaggggggaatttgaatttgggagagagttctgaaagaatcatgacacataagtaatgtcttgaaaagtatgtatcagtctgataagcaaggaagaagaaaagaatattccaggaaatgggttatcacaacacagacacaaagctgagaaggaatgtcatctcctttgaatggcataaagtttagcatggctaggtagggcataggatttatgatgagaagttatgagatatcaggttgaaactaagaggggctttgtgtaataaagaattcctaatattatatgcacattggtgagccaagagtgttagtatagataggtgtaccctttagaaaaattaattttgttggccgggcccagtggcacacacctgcaatctgagcactttgggaggccgaggagggcggatcacctgaggtcaggagttcgagaccagcctggccaacatggtgaaaccttgtctctactaaaatacaaaaattagccgggcatggtggcacgctataatcctataatcccagctgctcgggaggctgaggcaggagaattgcttgagccctggaggcggaggttgcagtgagccgagattgcgccactacactccagcctgagcggcagagtgtgactccatctccaaaaaaataataagaagaaaaattaattttgttagcactatgggtgttacattattctggggagaggctagtggcagggacacgatttttgtggttgtccagatcagagatgtaaactgtctgaactgagaggtgagatagagacagggctcaacagtaaagagaaatttctaagactaaaatgacaaattggatgacttgttagatatagacagctggtgaaagaagatacgtaaatgtgttaagaaaaggagttggtttatgttaggggaagaacagaaagttttatttaatacattaaatattaggtgcctatgggatgtgatgtctaattattagttagaaatccaaatttggaacttagatgaattagggataggaaatgtttgtgtggtagatcagtatgtaaactatagtagataacttaactcagggagatcatgtagagtaaaaagaggactaaagtgaaagttcaaggaaaacctaacact

SEQ ID NO: 29999 - DNA, 2300 bp, Homo sapien
cttccagagaccaggagatccatttgggggaacaatgcaatagggatccttacacatattcttcattatatttaaaagtatacccccattactaagtgaaagtttgacatctttatttaacgtacattcaaatgatatgaggatttgaattttctctctatcttgctctctttctctcaagtactacactttagtgtttgttttctattactaggtaagcttctcttaaaagtattttgtattccaagaaaaaagagatatattctatgtttttcactaaatatcctttagcaagaccaaatcgatgtatgcttttcagctttgactgcccattcatatttttactgctgaaaagattttggttggagtctttgaattcttatctccaggctgtttactgaatttatagtcagttttctcaggattagactatctttcactttcaaagataggtgctgttaaccagagtttccacaaaatgtcgctctaaggtcgttggttgcaccagcagcaaccaaaatcaatgtacaatttgcttttaaatttttatcttccattaggtaatgaatgtgctcacctgaaaagacatggaaaagcacaacactatgtagaaaagagcaaatcctccttctctgccctatccattgcgcagttctgtcctccagaggcaaccaccgaaagcagcttcttacatgtactgctagacaccaaataattttttttgaagttatggtacacaactctgtagatattaattctgccatttattcagcattcggcatgttaggtatttcacatagtgtgtctttttatttatttatttatttatttaagacggagtctcgctctgtcgcccaggctggagtgcagtggcaagttatctcggctcactgcaacctccgcctcctgggctcaagcaattcttctgtcttagcctcccgagcagctggggctacaggcgaacgccaccacgcccggctaatttttgaatttttagtagagacggggtttcaccatattggtcaggctggtctcgaactccagaccttaaatgatccgcccgcttgggcctcccaaagtgctgagattacaggtgtgagccacagcgcctggccactgtgtcctatttaaaagaaagaaagaaaaatgactgactcaatgaatgaatgcctttcagacgtgtcaggtttgttttgctttgtgtattttttgttaatgcaataaaatatctcgagaacagaaacagagaagagaaaacagacctggtcacagagctataactggcaggttgggatttcagggcgggtatactgagtgtcaaacctatgcctgactagcttctcctaactgcaaactctgggcttgtcaagattgttttttgcatttgtttctctctctcttaaaattacatccccattgttagctttctaatgtgtggagtatgaagttgaaagagagagtttcaactgaaacatgaggaaatgatcccaaggcccaaccctgtgccttatgatttggatatcttttctacaagaccttcaacaactgcaacttaaaagaaaaggatggttgtaagagactgcccatctactgatatgttctggatagttctctgtttacctcctgtcctaaagccatgttgctcaaaattgattttttttttttaaatgggaatggggagaagtgagagtggagttgagagtttattccaattcctggaagcggcaaggaagaggttaagttggaccaggaggatttttgaagtctttggctgggaggttccatttggagaaaggtgcaggggagctaggggtggcgagagaaacaagacagtttctcattcgcctggatttccgattccgagcaattggattctcacctgagggcgcagttgggcacccctggcttgtggatggaaatattgaggagcagaacttgcctgaccagcgcctggagaatagagtgaagcatggaaaggaccacgcggcccctttaagtattatcgggccggggaggagagggagggaactgggagccgcggggactgtgggggaaacccacaagcaattgagctggagaggaggcagcgtgagagcagaaacttcagacgccgctgatccgggaggagctggggtgagccgcggcggccgtctctcccacccgcagcagcatcctctctgcccttctctgccaccccggggagagccgggagctgcctctttacagcttccacgagccaggggtgcaggcagctgcccccaggaagtttgggcttctgcgtagtttaggggtgcctgcga

SEQ ID NO: 30000 - DNA, 2300 bp, Homo sapien
ttcactgcaaaggtctgcacccatgactcaattttgtgtttcccaaagatttatttgaataggaaaaggttgaaacccatgagtctaagttcctacacagctccctattctgttgctttttggcattggagaccaccacaaaaatcataatataggatatcttatagctcagtcacctcttagaaagtcaattcatttaaaaacataaaattgaatttctacattaagaacaactggtttatcacaattgctgcattcttaccatctcacctcaactttcaattttttttccaagcattatttgcacatatatatatacacacatatatattctctttgagacttttaaaaatatggcccctaagcttactgagaaactgaggtatgggatttcccacagcaggatagttctctgaggaagttttgtgcaatagaaagaatactgaattagaagtctaaaaactttgattatagaactgtgtctgtaaattattaacggagtgaatgtttctgacaaagtcatttaactttttagcatatcagtttcctcatctttaaatggaagtggttatgtccatccttgcaataatggtatgtattttcacgtaatggacataaaatatagactttcaggcaaaacaagcaaaaagttataataaattttatgtactatagtgattagattcaagcacaatgtgtgggataaatctaatcaatattggactttggaaggtaatgaattccttcttcaggactttccaagggggacaaaggtttggactttatggtaaaaataaaaacaaaaataaaacaaatgaaaaaaacaaaacattgaggcaacctgtatgtccagggaaaatacggtcagtaagaccaatcatttattatttcagaatggtgtaagtatcagacctatagacatgccttttctgaatcataaggagaaaacaagagattaaaggagaaagaggaagaagaaagaaagaaaagaaaggaaggaaggaaggaaggaaggaaggggtggagagagggagggaaagaaagaaagaaaaagaaaggagagaaagaagggaaagaaaggaaagaagaagagacgcaaaagagggataaaggtccagtaataatttggtactgggaaattcggttggcagcagagcaagtgaaatctctgattgttccagcttgtgctgcttgcagtccccattgatctctccaccacagctttccaacttccactcaaatcagtaaagcagaacagtaaataggccaaagtatgattaaaacaaaagtcataagattagcaattagcttcaagcctactttgaatcttcttcttttactggaggaatttccagtaaaataagtttattggcatgccttttctgaacattcagcaacattttaaaagcagcatttcctctctccaaactgattcctacgtccatttctatgtctctttttgaagataaatatagatagacataggacttctaaagttctacttttaaagttctaagctttacacacgcacgcacatttccacctgtgatgacctatagggtgataaactgtagaaaagacattgactattcttgccagttagttcagaggcaggcaaacaacaaattcataatcctgtcctgtaacacatgagacatattcagtcctaaagactaaaatagtggtttttgacatttcttaaatacacagacatatttaatgatcaaattgtggaggtattgcatttccatacaaagtgaataaacaagttagtgactctagacagtaatatatttatcaaccaccaattgtaaagtatcagcttttaagttattctaatcagagtctctgtaatatttgctgtttctcattgtattttcttgttaccctcaggacaaagtgctaagatgcaaggaattttattacatatctagcatttgaatatcaacaaattttagcaacatatttgaacttcatgttaaattacacacatggcctttggatctatctgctcaaagtctttgcaagtcccaggaattctaagagttaactagaaaaagccaaacaaaactcttgcaataacatctagaacaatattgcagatgtgtggagcttacggaatgtggagcccatttattttgcatgcacatttaatgtgaaaaattatttttaagttctaaagcaacctctcggaaatgctaagaactgcaaagctacgcagaccctgatgcattcctaaatataatgaagaaaaaacagaaatgcaccaagaattgaaaaccctggttactcacgattct

SEQ ID NO: 30001 - DNA, 2300 bp, Homo sapien
ttgagattcatacatgtttttatttacatcaagagctaagacacaactgcttatacacatttaagaaatcagaggtctagggttttttccaaacaggactctatgtctaggacactcagtaatcaattagagagaagaggaatctgagaaactccttaggcaagcagaaaccaagaagatagggcaactgttatatcaaaagccagccaagcagaaatgaccagtacacaatatacttatacattttctctggaggaacaaatcatttatacttcactgaggaatgtgatcataagccaaaacattgaatggataactctgtaaaagagcttttggacaaactaataactgcatagtatggattaaagagtaaaaatattaatctaggtttataatgtagttatataatatcagtgatgagtgatatactagggtaaggagagttacaagaacattaaccccaaaacaaagaagtgaggcaataaatatgaaactacagtaaccaagtatattctttgaggcaagtttctagctcagatcaaagttgcttacagaaaaatttagagagaggaaataatctccaaatatctcaagtaaagtcaggtgattatagctgtctggcaagaggattagacagctttgctaggggaaacttagcaattaactctgctttggtaagtcatacaataaggacagctcaactcaaatagacaaaatagctatgtccagttaacctacagcaataatttagtaacctttttttcaatttgttattctgagtgtcacaaaaataactgttagaacttcattgaggtggacaaattactttttatatagtactaggtttgtttatctatttttgactgaatagtaaaactattgttaaaagattaagtctttccacttcccaactcgcaaatctaaaatttgtcaagtactgccaagtctattgtctattcctaccagagttatcttctaaattatttagatcattgtataatctattattaaaatctcagtggctcctcattacctgcattacttgccccagtttattttttaagttccccatcacattacattctggcaaaccccaacatccagccaaacaactactctccttataatagcctaaatatgtcattatatcatgggaatagatctatatctatctatctatctatcatctatctacctatctatgataaaattgatatataaataaatataccatgaaatttatgtatatacataccatcttactttgaaaatttggttatatggttatctctaaatagtattgttttattttccacttattggatattatctcatatctcaaaatgccacttcttccatataagcttgatcaattctccctggcaaaattaattaaccagtcacctgcatatatttttgtagctttgtgctgtcatttgttattatctcttaagaagttcccaaatattataagctttgtttttttacaaggacactagcttatgtttctctgccatattcagaatagaccacttggtaatttttaaaatctgtttgtgaattcacataattaaagtggcctcaaggtgtttatgcacctgggtgaagagcaagttttttgtttttttctgctatatcaccaaagcagcatagtgcttgactcattataaattgtttgtaaatatttgtttaatgaatgattaatttcagttttctaaatgtgatgagagtgttccaactaaattggtgggaaatcaaagcaaaaatcacttatctggcatcctctaaaaaatagagaaaaccaggaatcatttatgattaatatctaacttgaaaatgagttttcaaaattaataaataccacatttgtttgaaatgtgtatcatgaaatatatctatacaattcatattcattttagttatgtaataattttgtttcattatttcaaaaaatgacatttcaaatctatttgaactgcaatgtttcacaaaataattgtttctcagcatagctaaccattacaaaataatatttttttaatctccccagataacacattgtctgtcactggctggttgtaatgcaaggaagggacaaagatgaaatggaaacatgttccttttttggtcatgatatcactcctcagcttatccccaaatcacctgtttctggcccagcttattccaggtaagtgctgtgcatttgtttcatcaatacttaaccagtattccctctttgctttaaattcactttttattgtgtgtgttgcaaatcaagtttgttcattttctttggaact

SEQ ID NO: 30002 - DNA, 2300 bp, Homo sapien
atgcatgcccttcagtgtagcatgatgaaatcttgtgacgtcctcctgcatcccactccagatgtgaatcatcactttgcccagcatctctgcactatccactacctgctcattagtcacttaatggccatctcagttaccaaacggactgccatggtattgctgtgcttgtgttcaagtcacctttatgttattttgaatggctccaaagcacaagtagtgatactggcatactgttataatagttctatgttattatgcagtattgttgttaatctcttactctgcataatttataaattaaactttattatagttatatatgtaaaggaaaaaaaacagtgtatacatggttcagtacaacatgaagtttcaggcatccactgaagaacataccccagtggaaaagtagaaaccactgtacatgcacacacacacacaaactcacacacacacacacaaactcacacacacactaactcacacacactctcactttaaatacacacacctgtacacactcatattataggcaacagtcctgatgagaatattaaaaacaaaaaacaaacacctaactcccattcctcataactgtaccaggtttgtcaggggtgtctgaaccacagcaactccatcttgaagaggggctgggtaaaataaggatgagacctactgggctgcattcccagatgcttaggcattctaagtcacagaatgaaataggaggttggcacaagacacaggccataaagaccttgctgataaaacagattgcagtaaagaagccagctaaaacccaccaaaaccaacatggtaatgagagtgacctctggtctttctcactgctatactcccaccagtgccacaacagtttacaaatgccatggcaacatcaggaagttaccctctatggtctaaaagtgggaggcatgaataatccaccccttgtttagcatataatcaagaaaataaccataaaaatgaacaaccagcagcccttggggctgctctgtctatggagtagctattcgttcattcctctactttcttaataaacttgctttcactttactctatggactctccctgaattctttcttgcctgagatccaaaaaccctctcttagggtctggatcaggacccctttccggtaacatctttccggccaccatggaaggaacaatactaaggaaactcctgacccaaagactaactttgggtaagtgctggggtccagtaacatctttctggcagaccatggaagaaatgaaactaaagagacccccaacccaaaggaaaatcacctgcatgtaccaattggcgaactttcggcacgtggggtgcatatacccgagtgaagagtgggattgcattagacgcccaatttaagggaggcagagtctctcctaagacagatttaaaggctcctctcagaaaaaggcaaggacgcttgactgaacttgggttcgaggcccaacttaggaatgttagagtcctttataagatttagggggttagtggaccctcttagtaaagtcctcggataagaacgggttcagcactatgggatgttaactgctatgctctttggagtaatctgctttgcagtctttgctgacagttgcaggtgacagaattacacaagtaaaggaccatgggaaatggggagctttttcctccctcaaaggggaaattcgataattttcctctttgttgcagcttggcagccagggctttggtgcagccagccgggtcactggggccactcagggcaagggaacccagaagcccggcatgccagcaaaaggataagaatttcttactagtcaggcttctaggttcgtttgttctctctctctctctctctctctctctctctctctctctctctttctccctctgggcaaactggttgaatgaatggtaaaaatcactgtttatctcctctgtaaaggtttgattaatgggaaaaaaggatctgtgaggctaatcttaagctgtagcaaatctggtgtgctttgtgtgcctttctgtattgtttggtcataaagaggggtatcttaggatagaatgttggcctaggacaccataagcttgctgttcaaaatggcccagaaaactggtcggttacaaacttcgctgcaggtccctgaaacaaaactggatgaagttctcctcttctcttgttctatatccttgggagatgaccttttaaccacatggcagtactttctcttggtctctgctgtcacaatggctgctcaggttcagggttcaattcctggcttaggaaatg

SEQ ID NO: 30003 - DNA, 2300 bp, Homo sapien
ctataatcagaagtttctcaggtatgaggtgacatttttgctgaggctggaatgaaggcttggaaaaaattaagcaagtagagctcagctccctgaaaatttccaacagagagaacagcaagcaaataatcttagaggctattatacaacaaattcactgagttccaggaaagtcagtgtgactagagcatagtaaaactggaaaatgatgagaaaagtggctggaaaggtagtcagggtccagattatacaagccttgttagagaatgataagctgtttctattttaccctaagtgaaatactatgctatttaagttgctaaatgacatcgtctgatttactcagtgtagagtctcaccaaactgtgtccccaaccaccagcatcagaatcacttctgagcttgttaaaaatgcaatctgaagcaccacatcggaactcaattaagatccctaggtgattcatatgcacattaaagtgtgagaaacactggtacagagaatggagtagaggtgagaaagagtagaagaggggaagtcagttagagagctacattctggtccaagtgaaggaaaacagtggcctgcataagagtgacagcaggaaggatgagaagacggattctaggtcacgttttgcagacagtttgtttaggtctcctagccagctaaatggaaatctcagtagacaggcagtgatacaagcctgggtttctgaaaaaagtttaggcttggagatgtagatctgtgggtctgttattaatagttgtcctgcttcgggtttttatttttttttaattttcttccttttttagtgctttatattttacaaatgtctgcagcagttttttgtcatctttatggaaaacaaggcacgtcttaaagtcgttcaagtccttcactttttcacactgaggtctgtcttcatatccacttatctttcaagtctatgaaaccccttataaaaactttcctttgaaatattttaaaattcaaggcccacggctgattaatactgtttctcctccataacccctaggatcctccagttctgggttttaacaagaaaaatatcctcaatcctctctagtttctaggtgtaaagcagcttggaccctcctgggtttggtgggtccatctctcttggagtccaactctgtattcctaaaaagcaattattgaaatagaagctagtcagttaatggcaataaaagaagggaattccaagtgggagcttcccaagccaagaggaagagaggtttcttgccttatcactgtaagtggcagagtggagttccaattcaatgatatcatttgtgttatcaaaggtagtttaatcgttgaaaagcttgttaacaattataaacacaggcaaatgccttttcctttttggccttacggagaatgagaaaagttcttcccatggctaaaattcttagctgttggtaatgcagaaaagagtaccagaacagcagaattccaacggtattccaggattctgtgtcttggttaattttaaattcacgtgacctggcaaacttaggagagtcctggttgtaagaggtattaacattttcagcagtagtactctagctacacttgactgttcccctctctgtgaatttacatgatatgtttgaaatactgcccctcaaaagtctcagaactttgagaaatacggtcctttccaaaaaaaccccttatgtccaatttgaaggggtcgctgtcagtgggtgcttaagtgggtaaagaaaagccaagaatatgtcagggtgaggaaggccaaggctgagcgaggtcagcttgggacccacctcctagaatgacctccgccagcaggaaaaaaccgttaaggggaggaaagggcaggtccctgcggcctccaggtgccagccgcgtgagtgggcggagaggcctcggtgcctcctacccgctccggacgtgcgtcccggcatcaccccgggatccgctcctccccgctggcggggggagaaagggcaggaggccttccgtcccggctataaagggccccggaccgccgcggctcgcctcggcttgcctcgacacgcctaggcgccctccggctccgccctagccgccgcgtcccagctagagctccagcgcccgctcaggccccactcgacctctcgggcctcggctacttggactgcggcggaatatggcggctccgatgactcccgcggctcggcccgaggactacgaggcggcgctcaatgccgccctggctgacgtgcccgaactggccagactcctggagatcgacccgtacttgaagccctac

SEQ ID NO: 30004 - DNA, 2300 bp, Homo sapien
gcaccacaattcctgccactcctcattacacaccgggtatgctagatttttttttttttttaaaagaccaattcaattcctccattgcacgaactctgccattctggaatgctcttcctctcatggctcatttcttcttgtcatcacacttcagcttaaatgtcagttctgaacggcctttcttgacgaccggaactaacacagatatttgctcagttttaattctcgacaatgcacttaccactatctgacattgttttgtattattttatgtatttcactggtaattgtgtctcctctccctcctacccccaatagagtatgacaactgggacttgtcttatcatttatccacagtacgtgggaaaatggccggcacatgggacttcaataaatatgtgctcaatggtgaaccacctaggtaggcagatatgtacgctaggatcgtgctcgtggggagcttaggttctaaagggaaaggtcaataaataggagaaaaacaaacacctagattctgttaactgttgcatagaagagattgaagttatacagaagacactgaggagtctataatcagaagtttctcaggtatgaggtgacatttttgctgaggctggaatgaaggcttggaaaaaattaagcaagtagagctcagctccctgaaaatttccaacagagagaacagcaagcaaataatcttagaggctattatacaacaaattcactgagttccaggaaagtcagtgtgactagagcatagtaaaactggaaaatgatgagaaaagtggctggaaaggtagtcagggtccagattatacaagccttgttagagaatgataagctgtttctattttaccctaagtgaaatactatgctatttaagttgctaaatgacatcgtctgatttactcagtgtagagtctcaccaaactgtgtccccaaccaccagcatcagaatcacttctgagcttgttaaaaatgcaatctgaagcaccacatcggaactcaattaagatccctaggtgattcatatgcacattaaagtgtgagaaacactggtacagagaatggagtagaggtgagaaagagtagaagaggggaagtcagttagagagctacattctggtccaagtgaaggaaaacagtggcctgcataagagtgacagcaggaaggatgagaagacggattctaggtcacgttttgcagacagtttgtttaggtctcctagccagctaaatggaaatctcagtagacaggcagtgatacaagcctgggtttctgaaaaaagtttaggcttggagatgtagatctgtgggtctgttattaatagttgtcctgcttcgggtttttatttttttttaattttcttccttttttagtgctttatattttacaaatgtctgcagcagttttttgtcatctttatggaaaacaaggcacgtcttaaagtcgttcaagtccttcactttttcacactgaggtctgtcttcatatccacttatctttcaagtctatgaaaccccttataaaaactttcctttgaaatattttaaaattcaaggcccacggctgattaatactgtttctcctccataacccctaggatcctccagttctgggttttaacaagaaaaatatcctcaatcctctctagtttctaggtgtaaagcagcttggaccctcctgggtttggtgggtccatctctcttggagtccaactctgtattcctaaaaagcaattattgaaatagaagctagtcagttaatggcaataaaagaagggaattccaagtgggagcttcccaagccaagaggaagagaggtttcttgccttatcactgtaagtggcagagtggagttccaattcaatgatatcatttgtgttatcaaaggtagtttaatcgttgaaaagcttgttaacaattataaacacaggcaaatgccttttcctttttggccttacggagaatgagaaaagttcttcccatggctaaaattcttagctgttggtaatgcagaaaagagtaccagaacagcagaattccaacggtattccaggattctgtgtcttggttaattttaaattcacgtgacctggcaaacttaggagagtcctggttgtaagaggtattaacattttcagcagtagtactctagctacacttgactgttcccctctctgtgaatttacatgatatgtttgaaatactgcccctcaaaagtctcagaactttgagaaatacggtcctttccaaaaaaaccccttatgtccaatttgaaggggtcgctgtcagtgggt

SEQ ID NO: 30005 - DNA, 2300 bp, Homo sapien
ttatatttactgattattgtctgtctctcctgctgcactataaaccatatgagggcagggactttatctattttgttcctgctatatctgatgtttctggaacatgcctgacacatagtagaaattgagtacatgtttgtagaagaaaagcaggaaagaagaaagtaatggctacccttttgaaaaatcattgattatcatgatatgtaagatatagcaacataatgaagcaaatcaacaaaattagtaagaacccggaggtaactctttgctttcttctcttccatgaggattatattttccctaacaataagacttgattgagaacatgttggtgggaactgaaatccagtccacactccacttgtcaaatcctgagccctgatatcatttgtctttgtccagagagtaagtcttttcctaattaacatagaagcccaatgtagagcagctgtagcctttgcatttactcatcatttgctataatcatcatttttggactgatgttctgtcaattcaagaaataatttttcttattcaagcatttgacactgatgatttgccgtaaattgagcattttttttctattacagcaatttgcagattattattttttgagatggagtctcgctcttgtcacctaggctgaagtgcaatggtgtgaactcggctcactacaatctctgcctcctgggttcaagcgattctcctgcctcagcctcctgagtagctgagattacaggtgcctgccaccatgcccggctaatatttgtattttcagtagagacggggttttgccatgttgtattttcagtagagatggggtttcgccatgttggccaggctggtctcgaactcctgactgaggtgatctgcccacctcagcctcccaaagtgctgggatcacaggtgtgagccaccgtacccagccaattatttttttacttaaagtcttatttcagtctttaggagaaaaacattttagttacccctcactgtaaaattctgccatattaaatgactcaatgaatgaggacttcccctgcatactggatacaataaattctttttctgaaatagcgatgaattttgctgtagactgaataattggcttcaattctttacctctcccagtgaccacattttcactatggtttttcatgggcagaagtttttttctgccctttgagttggggcttagaatatggcttgctttagtcaacagcacattgtcgaaagtgatgttgtatttttaaaagatggaatgaatgattgagatcatacgatcatctcaatacatgctgaaaaagcacttaacaaaattcaacattcttttatgataaaaactctgcccaaattaggtatagaaagagagtacttcaatgtaataaaggccttctaggacaaacctatcgctaacatcatatttcactatgaaaagctaaaagcttttcatataaaatcacgaacaagataagagtaccctcccctcaagtcaatatagcgcttgaagtcctagctagaataattaggcaagaaggcataataaaaggcatacaattcaaaaaggaagtaaaattatctctatttgcagatgacatgatcctatttgcagaaaacttaaaagacttcaccaagaaactgttagaattaatgaatacattcaataaagttgcaggatataaaatcaacatacaaaaatcggatgcatttttatacactaaacaatgaactatctaaaaaaatttttaatcccatttacaatggcatcataaacaataaaatacttaggaataaatttagtcaaggaggtgaaagatctgtacactgaaaagcataaaccaatgatgaaaaaaatggaataaatcacaaataaatggaaagatatccattcgaagaattcttgagagaatcacttgaacctgagaagttgagactgcagaaagccaagatcacgccactcaactctagcctgggtgatgatgagacagtccggtgggagagggtctctggaaaacctccaactagcctgccccctagagtggagattcgggaagttcctgacatttgcagcggggaagagcctggcccctcctcttcctgtgtggaaactgggatttgaacggcgggcaggaagtactcgagtagggagtctggcctagtgaaagtctctgtttcctccttttcttacttttcactcaataaaaccctgctttacacacccttcaaaccatctgtgagcctgaatttttacggccatgggacagacaaggatcctgtctttatctaaactaaggaaa

SEQ ID NO: 30006 - DNA, 2300 bp, Homo sapien
ttataacatggagcagtgctcggaattttaccaagagaaaatctactgtggccaacatgtaccttattttccagtataaatgaacagaaatggtgtggggatattaatcaatcacatattaatgcaaataaatgtgtgcctgttgcttttttccccctaagagacataaaataatttagtcttaaaaaagagaaattgtaatttggtctgggtttacaattctttggaaggtggattacattggattatcagagttcctctttctcggtcccaaagtagagacctgaggaaatatattggacataggggaaggaaaacacgcacacacacacaaacacacttccattttctaaccactttctttgccagtagctgtagttgttttgagaaataatttcttaaagtgagtatctttctaaaacgggttaaaaatgaaggaatgatgctggaggggaatgacaaagatgaataattatttgagagggggggcttttggcattgtaagtagacacatgcaatgcagggaaggtaaaattttcaatgtccttttggaaagaaaatttttcattttatgatgtttccttcactgtgatccttatccttccctaaaggctaaacctataaatagattcacaggatggtagtttctgcaccagcatcaaactaagtttgggttctttgtaatcatttcagaaccattggttatgatcctctctatgtgtatgtgcatgtgtatctgtctgtgtgctagagagagagagaaagcaacagaaagagacagggagatggagatggaaagaatgagattgttttgtttataaacttggaagcagtgtgtctctgggccctaattttttagttgttttttttttctttgccatatcacattatttaattgcttcttttttgtctgtgatacctataatacatgccaacatatctattaacacttactcatttttaaaggtgacaaagttactaaatgtgcaaggcctcatagcttagatagcagctggcttgtactgcatccagcaaatggacctacacacctgtgagtacttaatagacttctttccccctagatttaaaagtcattccatactaaaatatttggtattggaaactcattttaaggtgaccactgaaaattatggaatctatatgcatcaccttctgaataaaataagccaggatgttttatcatttctgttaaagtggaaatccctaagaaataaaaattttaagatttctgtctgtaaaattgattcattgaaattctgaggctgagtttgcatgatttaatttctttatagatacacaaatagatatttataatgatcctcctctttcagcttccctatttaagggagaaaagtttccagacaagcgtgtaagcatattggtcaatctggcttgattgctttcctccagcaatgggcagttttaatttcctatcacatttatagtcattatgtttgagaaagggcaaaagaggttaatgaaatcattataatttcattcaaatgatatatattttaaaagctcaattaaagaaacagataccagggtaccacattttatttaccttatggagaccatcgctctgtagcacctgtaaagatactgaagaaacacatttcccaatgctaaaatgaatgtgaagtcattaccatcactgaacatatctataaagtaagtttattatgaagataaatgatgtttaattgaaaatgcattgtttccttatttatttaatgcatttttaatcaaattcctgacagttttaaggtaacataacaaattggttactaaggaatactgcaatttgactgaaatattacaagttacttggttttgaacaaactaataaacctctttaatcagtgctttcttcatctgtaaagtgaacataatgatattactagccccaacatgatggggcaaatgacataagtaacataaaatcacactgactgacatctataataagacgttaatacattttctctattatcattattactattgttactactattattatgtcatatcctttagaaatatggaacattctgggaggccgaggtgggcggatcacgaggtcaggagattgagaccatcctggctaacacggtgaaaccccgtctctactaaaaatacaaaaaaattagccgggcgtggcggcgggcgcctgtagtcccagctacttgggaggctgaggcaggagaatggtgcgaacccgggaggcagattttgcagagagccgagatcgtgccactgcactccagcctgggcgacag

SEQ ID NO: 30007 - DNA, 2300 bp, Homo sapien
ctgtcctgataaattcttaggtgttgctggtgctgctggtctgagaaccacatatttagtagtaacgctatagattatatgagggtacaaatccaaattgctgtcatggttatcaacaagactcagaagaagactctttttcagagtattggttacaaatgcctatatattcatgctcaaatggggtattttcttcaatataataatcttaaagtttttttttctattgctcaatgtagctttataagtaattaagtccagctccttcatattatagttgaggccactgagggtcaaggaagttgaatatatgcccaaggtcatacagctagaagcagcatgtgcattagaacccagaaactccgactaccatttcaataaacaaatcctaacttctttggcatttccatttgttatattctccctgacacaaaacctaagcgtgagtcaataatgattagaatttcaccttttgatcctcacaataggttaaatgatagcagtatctgtggactcactgactgactttcctaacagctaaaactcacagtaggcaactatctcctacaataacacaggtattcacacatctttcttcaagaatgtgcttgcagttttattatggacattttgttccttaattttgagaacctggggagaaaggtgggcagagaaatgaatgggtcattagttaaaaggcaagggttgaatttgcaaaaggttgtggcaaagtaagcaacaaatgggaaagagtgaagggcatcaatattgatcttgcctctcatctttccctctgtcttcttgcttgcaggtttctattgtgtagtctctcaaacaaagccgactttatttatggtgtgactgatttaacactactgaaccagtccatcatctgccaatttggtccaattaaaaactggtcatagggaaaacctgggaattaagctcatttagaaacacaacttctgattcatttatgtcttgctcatttatgtctcctcttctaaaggacacatttcagggtgttgatttatagaggtggctctttccagcttcctgagtttctgtgactccttttggttaggtccattaaaaaagtgcacttctgcctctctcccctcgtaaggctattgttaaaacattttaaagaggcttgcctaagatttcctgctatccagaattagaaaaatcccaataaacagctagagtcaccatttttaaagtatgtacgcattgcatggacttacgctaacatgattgctttctcacttaatccttacaactctttaagtactattatcctggttttgcagttgaggaggctttagacttaaacgttcaagtaaatcatcaaatattataaaacatgaagcgacagctatgctatttgaaccaaaggctgcctgatgccagtgccagcactgctactcaccaagctctactgagatttatacctagactaagtaaaacctctgaacaacaacaacaacaaaattatttcctccacttgtttttccttttttgcacaagttcttgtaggcaggtaggtgttccactccctatacttagcctctcccacgccctctgcaatctttcccttttgctgctggaatcgtcagagattgctactgcagctggtgagtgggcaggtgcagccaccatctgctctaggagtccaaatgcgcagaagaacctcgcacccaggacctggcccaggcaccacgaattccagaacatgctggggacacggctaaccccgccccctcgcggtggcgattggctgaacccttcctgagtgcaaagcgctgattaatgaaggcagttgtctcgcctgcaagttcgggcgagacatctctaaagaggtaagatccgccaggggtgctgaatgggggcttcagttcttcctgcccgaagggtccttgagaagcctgtttgtttttcccggcgcttgtctccacccatccccttctctcattggccagacctggtgggcgggggagtttccattggccggggggcggtgtctgtccctggccggggtgggggcggggcctccgccgctctgagcttgcccttgtgtctggtgcttcgtagagctgccgccgtcgccgctgccgctgccgccacagccgccgctgcagccggagcatccgggagccgccactgccgccgccgctgccgctgctaccgccactagcgctgcttccactgcttctacctcccctcccaggaccccgagacaccccgggcgcgagcggcagtgctgcttgcttgctcctcctctcccccagcccttcccc

SEQ ID NO: 30008 - DNA, 2300 bp, Homo sapien
ctggaaatttatgtcctgaagaaataaagcactacaacagtgcctaagagatatgccataaagatgcatgttgcaaaactgttgttagcaaaaaaaaaacagaatacagcaagatgctcccaaaccacaaacctgttgataatacaaaatagttccatacttcatataaactacataaaaatatgcaactattaaaatgaataagttagcactccgtgttttaacctggaaatgtgggaaaagcagactgcaaattaatgtgtatagtaaaatcttcttctggaaacaaaatgcacactttttttttaggtttttataagaactgcaaattttattttttatcgttaagaaattgctggcattgattatctcagttgctgacattggaaaggaagaggggatattgtttactttgctatattacctgtaatttttgatatatatcaattttgtacttaaacaattaagccaaaacattcattaaaggaatgtagatttttgatgaaattgaattttaaaacttaagttttgatattaaatattttagtgggctttaaattttatgaattattgcatcataagtagtaaatatatcaaagaacagataatagttacactttgaattttaagttactttaaaaaaaatcttcacaataatattgtaagtagtctaccactttgtctatgtccatttgagagctgtgaaataaaagagtttgaatgggtcaaggacttaatccagatttcctaaaataactttgtttttagttaagatgtttttgtctggtaaaaattttattattttaaaactaggatgttcattttaaaataaactagtagcatatatatgcaaatagtaaggcagtttttgttattgtagatgaaaacaaaaattatctgtaagtagcctggtatgtacacagactttctaaattttttttagctccaggcaacttgaaagaatgaagtcgaaattagaacttttcatgtgtagttcataattactagatctaaaatctatgttaaattttactaaaggtcagtccaccaaacaagactgcacatttcccaattaggagatggactatttcctccttaacatcatttagaaagccagaacccattcctgcttttgtctatcttcatttttcaatagtaagtcaaagtagactatatcacttcagaagtatttagaggtatctaattacgcattttgaacagaagttttcctttgagtaagggactgtcctgtaggactgttctaattttcttgttaacttgacttctgctttaaacaatgtttaccactagatataagcttatacttcagcttattaatggaaataatgccatttaaagtaatacagttttctagtctcatgtttatgtgtcaaccaagtaccaaaattgctggagtttagtgaatcatataatttttatttggctttgtagaactgatgcttgcaatttagtggatcaatcagttccttaaataccaatagcttaaggtaatattttacagcacagattctggagtcagatacacctagaatcaaatcccaaatctgctttccagatgtgtcatcttcagcaagtaatttgacctttctcattcccagtttccacatctatgaggaagggcaacaaaacttacttctcacagttgtcattattaagtggtagatgtatggaaagtcagtctctggcatttagaaagcactcaaatgatggaagtggcctgcttttctagttactcaaatatcatggggttacaatctgattgttaaatagtattaagtatatttaaactatatataattttaattgattattaaataaaatttagagttaagaagaacttaaagttatacattccattaaaggaatatggtgacttgtagtgtttggaatgtgtagtacatggctcctgtctgctcttactttgtcttactcaaggatcttactcataacactaactaaatgtaacaatagtcattttgtttcttaggctgttgatcatgaaatcacaaatgtactctttagactttaatagcaataacatctctgctttcttactagagaatctgtctaatatctaatatgtttgttctcttcttgtgcaacctttccttggtaccagcggctgcttcaaagaataaagttaaaggtgagctcctgtttattctgcatgagtcatcatcattcatttttctgctcaatcttctaagttctcttaaatgatagaaccaattcggttggtgataatactatttcagtgtatagatattgttcataaattc

SEQ ID NO: 30009 - DNA, 2300 bp, Homo sapien
ggagtcacagggatgaaagatatgaggaaaatactgacaatgaaagagaaagagaaaaagaaaaggaggagggcaggcacatatgaaatgatggcacaaaataccattttgttgaatttagaaaaatgcagttatatggtacacttgtttttgtgcttagaatatcgatgttacaatacaaattctccatatttttccttctaaagcctttgttttcaatgagtaggtggagaaaaacacacagggcttttccaaatatacatccatcagttctatttatgtaataagataacagtgctaatgatcaacaggtatgtttctagaaatcagaaatgagcaagaaggaatcttgcatagctgcaatgcttgttaaaagcccaagcaatttttacctcagtggcttttgatgttattactggattgccataaaataattgttcataatgaggttctagttgctctttggggaaattttaaattgaagttgttaaaattaaaaataaaaaactccatccttttaaaaagtactagtaaacattaaacgtttttattatgttggataatggtatttttctgactatgtatcttcttttatttcctggttgaccataagtgttgttgatcttttcattgtattggagtggggaaggctaaagttgggggtaggctttcattctgacacaaaaaataaatggaccatggagaaaacaagaaaaaaaacataggcaaaagagaaattaacaaggaaggaatctcagaaagaaaatattcaacacgattcagaagtaagatgtaacttcataatttcattcaacagctcaagccatcctgccacctcagcctcctgagtagctgggactacaggcatgcaccactatgcctgaataatttttaattttttgtagagatggggtatcgcaatgttgcataggctggtcttgaactcttggtctcaagtgattttcccaccttcacctcccaaagtgttgggattaccggcgtgagccaccacacccagcccacgtaacactctttatataaagttacatcttacttctgaatcgtgttgactgttttctttctgagactccttccttgttaatctctcttttgcctgttttttttattttctccatgatccatttatttgttgtgtcagaatcaaagtctacccccaactttagccttcccccttccaacacaatgaaaagttcaacaacacttatggtcaactaggaaataaaagaagacacacagtcaggaaaataccattatccaacaaaataaaaatgttgaatgattactagtactttttaaaagcatggagattttttatttttaacaacttcaatttaaaatttccccaaagagcaactagaacctcattatgaacaattattttatggcaatccagtaataacatcaaaagccactgaggtagaaattgcttgggcttttaacaatcagccaaagccttagagacacccttgactctttcctttctctgcattctgcctccaaacttccagaaaagtctcctggctataattttaaattaaatgcaatttcttctcaccaacgccacactagcacataataaaaaccaccattaactcttccctatagtattacaataacatcttgaaccctcaccaacaaagcaaccataatttccatttaaattcataaggcagagcatgccattcttccgctgccctgccaatgctttgccattgcactcagagtaaaagttgagcccttgagctggcctacttgtccccatgcaaccaggtcctgttaccccaccaatttcatccactcttctctcctcctgacttccttttgatcctggcctccatcttcttcacccattccagaccccttgctccttaagcatggcaagcatactcctgccttggggcccttgctctgatcttatacttaactcatagtgctcatcccccaatagcctcatggctgctccctccccaccttcattctgtccaaacatcgtcttctcattaagaccttaccccgagtatttcatttacttatttatttatttatttattatttatctttatatttttttattttttgtgggtacatggcagatgtatatgtttatgggttatatgagatattttgatacagatacacaatgtgtaataattacttcagagtaaatgcgatctccttcacctcaagcatttatccatagtgttacaaagaatccaagtatactcttgattatttaaaaatgtacaattaaatttattattgaatttagttaccccatt

SEQ ID NO: 30010 - DNA, 2300 bp, Homo sapien
ttttcaagcttcattcattaaacctctctatactaatttccttcttttttaaagatcccccttccttaacctacacatttctgccttacttgaaatcacttttgatcattcagattaaattgtttgtgtttgtttctcctctgcttgctttcagaaagcacctgttcctcaagggctccacaccaaactgcttctcttttagtactcatccctttgacaattttatccttgactgtggattccatcttgatgactcatataacaattttgatgactcatataacaatttacctctcccaagttcaaaataccagtcttaaatatcaggagaaggctgggcatttccctctgaggtgttccctgtcctgtcaacatccaagtcagagtagtgaatacagttgtaatgtaggagccagaaatttaaagtctgttattagctgagggatggtgagtaagtcacttatcttcttagcttttatgcactccgatacattgagacaatgatctttccttgatattattatcctaggcccaggaaaagacacgaaaatactcagaaaaaaaaatgcaaatcactgtttaaatatggagtcccaaatcctgttattttctaacccaaactctctcctacttctcaccttttccccccaaaaccattccttttttttgttccccacaaataacgatctattaaatccttctaatcattcatgtactatcaacttcctatttttctctgatatttccccagtctaagacagattcttattaactttgacttgagtaatcatctcctaaattgcctctcagcctccagcctctctccattctctttcattcataggctaacccaattttaatcttaaaggacaattatgatcatgttactcctgtgtctgaaaatgttcaatagctttcaattgcccagcaaggtaagtgtcacttctcagcctggcatttaaggcccatcacaagaatgttccaaactatgccctccaggcttatttccctcacttgaaagcacagcttttcttttccaatcaaactagagcagggagatttcactttatggctcttttctcacgcttttcaccatggcacttacaattcattgtatccctatccagccatatctagtccaattgtacttataattactttattaatccctttttaatgtcccacttgaaaatcatgctataaaagggcagccattaaagtgctgggacattttactaggtgctataagtgcactgcataatttaatccagggtaaaccaggtattatcacctcattttacagatgtgaatactgaggattaagaaagttatgtaattggctcactcatctagaaaataaaagtgaagattgtaatccagccatgtcaggcttcaaaggtgatggcctttcctttaaagcagttgttttcaatctgtttaacagacttgaaagtaacaggaggtaatttagtgcacaaaagatagaaagaagtgaaatatacaggttgtaaaatccactgctctggcttcaaagagaagattttctctaaaagagaggagtgtaaaagaagaaaatatattttggggaaacatttttgaaaaaacatttttgaaactctctcatatgatctattcattttgcaaacactttttttatggttcttggtatgttaaaacactattttatagcaactgttagccattgttatttattagagtggaagcattgaaaataattaatagccccttaacccatttttgtgttttcatttactggaaacccaaatatttgttaagtgtataaatgaatttacctttgcaataggaattgcaatttctttgcctgaagaatggtgaaatgagaattttcttttttttttttttgacttcttttttttatttatttattatactttaagttctagggtacacgtgcacaacgtgcaggttagttacatatgtatacatgtgccatgttggtgtgctgcacccattaactcatcatttaacattaggtatacctcctaatactatccctcccccctccccccaccccacaacaggccccggtgtgtgatgttccccttcctgtgtccatgtgttctcattgttcttaaataagttagaagagagtacctgtatcctggatcttttgaacttctgtgaagtaatgtgacaatacagatacttactgatctgattcgggatgttcctgagaaaacaggtaagttttcatttatttgtatatttctaaagcccagtccaatatttagttcatggaggctctcccagtgttgttt

SEQ ID NO: 30011 - DNA, 2300 bp, Homo sapien
tgttgaaagcatcattctttaattactgtaccatccataatgcaggacatttcttactgcctaaatttcacaccattgctcttttaacatacagtgcttgaatatacagccttaacaatgttaatcatctccttggatcattatattgagtggtttttatacattaaaaaatgtatgcagagtttttttcccccattttttcccctttaagtcatagaccttatcagtttgccattggacagctttcacaagtaacaggattagggaaggacataatgtatttaagaataagtgaaggttagaggtttacaattaatgttttctacatgtctgtcttcaaagacaacatgctttggaaacatatgtcctagaaaacataaaattaaaaaaaaacactatagtgtagtttttggaatgttggagattatactggtaaagctgtatcgatttgctattgaaatatagtatttgatacaggagccatgtgtacgaattgcaatcatgacatggtattttctataattatagagatcttactattaggatattgtagcttcatttaccaataaattattccaaatgatttactgcttttggaatcacaaatatttaattcatttctctaatttgattctataatttatttgcttcataaagattcacctgcctaaacaatattgaagtatccatagggcacaattttcagacattttagtatctgtatatagtgcatataataaatccaattaaacattatttgatacatatttaacttttttggctgtatgtaattcagtcataagtaagcattttctaacgtccattatatccctttaggtattacttaaaccaatattataagtagataacatgtattagtatttttgtctgtatgtcctagcactgttcaacaacaaatttttctagttcttgttaatttttatttgttatacaatggaagcacaatgttataaggaaaggtaattttaagctaacaaccagtgcacagcctcaggttttaaattacaaccacagttgaataataacctaaaaataaattttagtttgctaaaaatttacaaattttcattttgcagttccagagctgcttacctatgttggtttgccaaaaagaagtgtttaagatatgttttctgtataaatgaactaattctttatattaaattcctgtctatgcattttgtgaggtacaaactgatgaaacagtgagtgatagagaatttctgccatgcttttaactccaaagtgaaagtctctttctctggattattttaaaattttggcgtgtttaaccattaagaaatgctgtattcttaaatatgaaacagttaatctaaagtcttattatttcttctagtaaaataaaatattgttagattagttctcattaaatttattatatgctaaagaataaaactccagttagatttaaaaaaatcccatttacaagcattgcacctttaagaagaaaacaaatatgacagtatggtagctatacttgtgatgtctgacgcatgatggcctatggttttaaaaatagtattgtggaatatatttttgggtaataagaatggttgagtgcaacatcatgtattaatatcaaatgaaagacaagggtgctgtatctttgattatttatcaaaaaagtataaatcttttaaggaaaatgttagaattttaaagtttttttttgattgttgaagcatttatcttgttgatttcttacaaaagaaaaaggacgatgtcagtcaagcagcactttttcagaatatacagaacataaataatatgatgtggttgagtgttaacataataaatcatatacagtatgacattttaaggaaataagtctgcattgatgtgattgcatgcttgtttttacagttcactccataccatctgtggaaaaatgcaataatatgttaatatagtatggtagtttgagagaatcaggtaggtgctactagacacattgaaactagaataggtttataaactgttcatatctttcaatgcataatctttagaaagactccacaaagcaaaattcatcctgttagtacaaaatggaaaggttcttattacagaagtaagttgtacaaactgcatcatcaattactatgtaaagcctaatttcaggatgcacttacaaaattgctactcttcatcgatgccgtatttacatccctcttcatttcatctatattctacttggctccaacaactaaattgttgcctaaataactcaatcattatttatagcactgtaaaattagaaa

SEQ ID NO: 30012 - DNA, 2300 bp, Homo sapien
ttgcttttctagttctttaagatgcattattagattttttttttaaagtttttcttcttttttgatgaaggtacttataaccttctctcttagtattgctttgactgtatcctataggtttcagtatgttctgtttatcatttgtttccagaaatttttcaatgttcttcttaatttcttcttgttttgtgacctaacatatagattggttactgctttcttatttggtgaggtcaggttttctttgatggtcttaatacttgcagatatttatctgtgtctgggagttgaagagctaggcatttaaattagtctttgtagactgggcttgtttgtacctattgttcttgggaaggctttccagatatttgaaaaaaattgagttttgtggtctaagctgtatctgctttaggggccatcccaagcccagtaacgctatggttcttgcagactcatagaggtaccagcttgatggtcttgaacaatatccagaacaattttctagatgaccaggcagagactcttgttcttgtcctctactttctcccaaacaaacagggtctctatttcttttctaatccacctgtagctgggggtagagtgacataagcatgactatggtcaccaccacaaggactgcactaggtcagacattaagccagcacagcactgggtctcacacaaggcctgctataaccactccctggctactgcccatgtttgctcaagatctggggactctacaatcagtagaggacaaacacaaccaggcttatgtccttcactttatggcagtgagtttcccaggccttgggtgggtccgaagttgccttcaggagttaaggcatcttagcagtaggagtagttaaaaaaaatcttagaagtctacatagtattccattgtactgtggcagagctagcactcacatcaaaagatgcagttacttgcatttttcatattccagaatttctgcttaacacagagaatcacagagaactgcatttccactcttctctcccctttcaaaaggcagaagagtcttactctatggtcctgatcattacaggcccatgggcagtaccagcagattaccactgatgttcccttaaggcccaagggctcttcagtcagcttgtggtgaatgctgcctggcctgagactccacaggacagcggattcccctctgggcctgattaggtttagaaatgtcatttaagagccaagtcctgcaatccagattctaagagactcctagttgctttaccctgctgtgggtgagctgtgaactaaggtgcaagcaaactttccccctgcctttcttaagcataagtagtcttgccttaacaccaccataactggtaatgtgctgagtcacacctgaagccagtaagtatcagaggctcaccagaggccctttatgtaagacctggatatcactgctggttgttcagggccccagggctcttcagttagcaggttataaattctgctagggctgggtctttcctttcaatgcagcaggttcccttctggcccaaggtgtgtctagaaatgtcatccagtagctggggcttggaaaggaggcctcatgactctgactggtgctctatcctgcagtggctgagctgttattcaagatgtaagacaatgtctttcctgctcttctcactcccctcctcagtagaagctccttttgaagctgtgggctgtgcagctgggggttaagtagtggggtgatgccaggactcccttggctgccctagctggtgcctcagtatgtcacatgcccccatgtcactggttgtcagccaagttcagcagtaggacttgtctaggagctgcggtcttcatggtctagatggcctttaacattaggtagggcacctgagcactttagcccatggtggcaaggtttgtgggaactcaagttcagactgctggaatcagggattcccccctggcaagggttggtttaagtgctcccttgtaggttggagtcagttgaatttggtccagttttgccatctgctataacagagcaacactgaattcaatgccttacaaatgttgtactccccctctcctgagttcacagaatcactctctgcatcatgctgctgctgctacaggatgggagaatggtggtatcagtgattcaagactgtttttcctacatcttcagtgcctttttcaatgctgtggagttaaaaccaggtactgtaagtgctcaccttatttttggttcttatgatagtactattttgtgtagatagttgttaaattggtaattgattttctt

SEQ ID NO: 30013 - DNA, 2300 bp, Homo sapien
aagtttttctgaatctcctttttaagttccaagaaattctattataaataagtgtacttttaccaattccattgtataagcaaacagacaccttttagaaaaggataagtaatcatcaatttgtttttttaaaaaaaaaaacaatttctagactactaaatttggcataagaataattcttttaaaatgcaacatactttaattagtttttttggtatatgcataagatgtgaactttcctattgatatcactttatattaatagagatgtacatttctttctatgccgtggctagagcaaaagttaataatgattatttacacaattgatttaatttcttaggatatgtataatattggatattatatctgatttaaaaatactattccatacattttttttttcaggagataaaacatagggaaaggttttcatgtgaattctttgtatcactttgaagtacatatatttaaagggaagatggatacaatttgtttttattatataaatctaggtaaggtgaaatgcttttgtcaacaaaaatacagtgtagtgaattttatatttgtcacttgattaggtaaactgaaaactaacaatagaaatattattttactgcattgaaataccatgaactttcagacttgttagttctacaagaagttgtgctaccttaattttgtgtttccagaaataaaaattaaccttagttatgctgtcatttttaactaataaaaaaagtataattcataaaacttttggctttataagataattataaaattatatatttttttctgtttttgtggggttgggaaaacattttcttatttctattcactcttcaaatgcaggtctcataatatgtgtcaatgatataagatgatggaagactttgtaataaaaacatatgtcattatcttcaatttgttcaataaataatttaatgtgaattgaatgtttgtattttaacatagcatttggatttggtctgcatttcttgagaatttaaagctctttttgtttcctccttattcaattaagcatcttataaatattttggaaattacaacatcttaggtgttattaattaagaagttaatttctagggccaagaagtctatatgttacagcaaggaatagattataaaatacatgtttataatggaaaagaaaatgaaatggggtatattaattacataacagcaagagtcttgagaattttataatacaatgcttctaaggatattggttgaccaaggtgtattttattgtttttacatttgttgacagggactctgccataagtagtatgaaaaaacaaacaaaaacttttctacgattcattaacattgaaaagagaattccaagaccttgtattctgaagaaagctagagtttctctaagtgggccttcaattttcttattacacgtatctttaatgtgaaagtactaaagtctgaaaatcagcatttaaataatagactttccagcattacagatgaaataatttggcgcaggctttttaactgtctaccatatttagaatgtggtgtcaaaatgagatttttagaactgctgtaaaatattactacattactacaacgataacggcctaaaacaacacaaatttattatcttacagctctgtcagtcagacattcagcaaagatcttagtcttggtgggctacagaatgtaggaggcatttcctggatgcttccaagagagaatcttgctgttccctgcttctagagtcctttgcttagtttccttccatcttcaaatccagcaacctggtcaagaccttctcacatgacatcactgacttcctcttcttcctctcccttacatatttaaggactcatgtgattacaatagctgcatctgtgtaatccagaataatctcttcatctcaaggtttttgttctgttttgtttttttgttttgttttgttttgttttgttttgatggagtcttgctctgtcgtcaggctggagtgcagtggcgcgatctcggctcactccaacctccacctcccgggttcaaaggattcccctgcctcagcctctcgagtagctgggactacagatgcgtgctaccacacaaggctaatattttgtattttagtagagacgggatttcaccatgttggccaggatggtctccgtctcctgacctcgtgatctgcctgccttggcctcccaaagtgttgggattacaggcataagccattgcgccatgctcaaggttcttaattacatctttaaaggccctttttccatgtacagtaacatatt

SEQ ID NO: 30014 - DNA, 2300 bp, Homo sapien
tagtgtcagtgtgtgtgtgtatgcctgtgtgtttatacatgtgtatgtatctgtgtacctagacatacacacagacacttatgtaaacattaacgatatatgataactgtatatctgcattagtgtgctagggctgtcataaataccacaaactaggtggcctaaaaaaacaaattaagctgggcataccgtggctcacgcctgtaatcccagtactttgggaggccgaggtgggcggatcacctgaagtcaggagttcaagatcatcctggccaacatggtgaaaccctgtctctacaaaagtacaaaaattagccgggcatgatggcgggtgcctgtaatcccagctactcgggaggctggggcggaagaatcacttgaaccgggaggaggttgcagtgagccgagatcgtgacattgcactccagcctgggcaacagagcgatactccgtctcaaaaaaaaaaaaaaaaaaaaaaagttaattttttcatagttctggaggatagaagcacaagataaggtgtggtcagtgttggtttcaaggtgagacctttcttcttggcttgtaggtaactcactatgacttcagatggtctttcctctttgacagagcagagagacagggagtggggtttgggggagacatagatatctctggcgtgttttctcttcttataaggaacctagtcctattagattagggcccaaccttttaaatctcatttaaccttatcacctccttatatgtcctgtcttcaaatacagccatattgtgggttagggcttcaatatatacatttttgggaagacataattcaaactataaaaacattagtgcatttgactttcaaactgactttttctctgagaaaagatagactgtaaaaatgagagattgctgtgagtcataaaagaggatgcctacgtataaggagagatatgtttgctgaatctcagagctagagtttgctcatttataaaatgaggcccagtgcggtgcctcatgcctgttatcccagcactttgggagaccgaggcagaaggatcacttgaggccaggagttggagaccagcctaggtaacatagcaagaccccttctctataaaaaaaaaaattaaaaaaattacctgggcgtggtaatgcacgcctgtagtcccagctactccagaggctgagatgggaggatctcttgagcgtgggggtggtagctgcagtgagctgtgctcatgtcactgtactctagcttgggcggcagaaggaaaccctatctcaaaataaataaaataatgtgagtataattatttctactgattatgtcagaatacaagtatattctcacagacgtttttttccccattttggagagggtcagatccaattgcaaagagataaacctttattagcgaatgggcttaatcaactaccctttattgctctgtgaaaaccaggctgtaaaagccagaaatggtggacgtctcacagcagtgtcataccatgaagatgtaaacttaaagcagagattgcttgtggaaaactgtgttgcattcttggcatgtgggcacttgcagagatgttaactttcacttatgattattttaatgtaggagctaatccccgtgtattctgcgcctgctctgttttacccctttgtacactcggcttttgtttggtcccagcctctgagttggtgttccctgtaaaatctccttggagtagggaagccctcgccctggcggccaggtgacagagacagggtgggaacctgccgagccttgagggcgcggagcctctgcataccattcccctcccaccaccatcccatgctgggaggcggagagggctgcaaacttcgctccaatccgcagccagccttccccggggtccccctgcagggtgacccgcccgctgcaaagcgagttggagaaactttgcaaagttccgcgtcagagcctggggaggcaaagtgctcccccttctccccggcgttccccctccctctgcccccgcctccctgtcctcgcacagccgggagcacccgtgataggacgagccccgggcgtgcattgtgtatatgcaaaccggagctgggctccccacggctgcccgacccgggcctgggctgtggctgtgactggcgctgccgtgggcgccgcagccctcgcgggagccggacgcggtaatgccccagcggcgcagcgggcggctgcgtccctgagccgctatataagcgcggcagggaacatccggaggggctgaagatgaaggtgcccgcgcatgggcccccgctgattgccagt

SEQ ID NO: 30015 - DNA, 2300 bp, Homo sapien
gacaatttgtaattatataactatgtatgcgattatgtgttggatgtacatatccatcccacatctccacatagtcagggactgtagcttttttcttcattcactttttccagtgtttttagggcaggggatgaagggggcgcagggcatttggataggacagttctaccttgtgcatgcgtattaagtaggttttgtgcaatacccatgcataacaagtgaccttcaaaacttaggggctacgatgacaaagatttactttttaattgcagttctgttgatcagcacttgttcctctgggctttgctaggtctgagtttcaagtttgctgtcatcagtctggtttgttttttattcaagggcccaggctaaaattttgaacaatagctacagaatcatcttcttctcacgaggggtaccctaagcacactagagcaagcagaagacagcacacttcttaaagcctcaacttgaattgacatattctcatgtctgctcactcccactaatcaaatcaagtcatgtgaaggagggagctaaaccacccacttgtcaataccctacattcatataattccctacggggctgatagcaaaacccttctccccttaccctgctcctatagagaaaccttcctagtgcctgctagacaataatgactaactaggtattgtgaataaacttactttgacaaattgtcgtccagaatggttttaataatgtacacaatatttgggagtgttattagcattgataaaagggctttctatattaacaatctaagtacaaatacctaatttacttttcttggaggctgtgttttttttatttttccttttatgttttatttttaaatctgtgatactcttgccatacataatttcaccatttaccagcttgtttttaaatggtttgaatattttgacaagcagaggttttgttgttgtttgtttcttgtttttttgtttttgtggttgtttttgtttctgtttttacatgttttttatttcttgtactttgacagcatcagtcaatctttttaatgacaacttatagtctataagatgaacatatcataacttatctaatgtttcttgttgtggataaagttgttttcatttttttcttttacaaataataatgtgatgaagatctttgtaggttatcaagacttcatataattttttgaaagatcctagaaaaagatggatcaagttcaaaagtatttttaaagttatttacatattttgtcaaattattctccagagaagttgtactacttttccctcccttgtacacaagactgtgcaagagccatcaacgcttctcgacctaaatattaacattaaagatattttggaccaatttaatggtgaatgttatcttattttaatagtaccaaaggataagtacaagattctgcattgtggggagattgcgagacaaatgaacttttaaaagatatttgggaacagacgaaatggcctgctctgctgagaaactgaaagggcttgagacccagagtgaagcgaaaggaaaataaaatagcactttgggatggaaaggggacgccagcacaccccaggtctgtacccctggcctcgcagtcttcggggtccctgacaggcagtagggctcaaaaggaagccaagtgcagctgcagggggcttctctccgagggtcgccccgcagtctctgggttatgatccccacgcgagtacctgggagttcccagccattcggcccctacagaaggaccaggcagaggaatttctgattcatgtgtttttccgtgggatgccagaaagggagttttgagagctcctacaccagcttagcttgggagcccctacgcaacaaccatccaggtcccggaagatgccagctctgcctggcgcccgcagcccagatctcctgcccggagtacgggggcgcgggcgcagccaccaaagctgaaatgtgaccgcgtcccggtcccttcctgctctggggcgcgaagctgccaagaaaccggctgcggtctccaggaggggccaggaggcaaaatggaaggaagcgctggatctccgcggcggaagtcattcttatgccctgccaaagggtagagggcagcaaccgacttgtgcgaaaggagggaacgtgtgggtctgccagggtcctgcaggggggatgagaccctcgctccgctccggcgatcccttcgctctccaccctcggccagcccctcctgtcctccatcaggcctcgctgaggatacctcctgggttccaaagcgcgagttgaacctgagcttgacatt

SEQ ID NO: 30016 - DNA, 2300 bp, Homo sapien
acggagagcttcagtgaactggcctaggtcttaaaacttaaaagtcacagaattggtcacagaactgggcagtctgtgtccagaatcagcactctccaatgttatgctatctttcttcaaaagctgaacaaggagaagaatgcacccattcaaattataacccgaggtacccaaagatgaaaaaatggcaaatatttcagtttcagaggaggaaactatgttatgaaatactccagaaaacaacatatatttaagtgtatcatgccctttaaataaggagcgatataataatacaaaatgtgtacaggagaaatgtggccaccaactaatcagaatggactctagctagactggtgcaatcagctgaatatcagccttcttcaaactatgggagaacaagctattagagtactgagtttaaatagtaaatatttctattttgtctttattgtaatgaacaagccctgtctttagctcctgctgtgcacttttggagggtcttccatatggttgctcctaagtattttggcattttcccaactgttacaattgggtcagtgggggggattgtataggagtaataaaacaagggtgactgcagcagggaggagtacgattactacacacataacagcttattgcctctcatgcgttcaagcacagctctatgccattcattacaacagacagccagggcaaactgccatagagctcactccagaaaaggcccggtcttgagtgcagagactaaatcttctcacttacatgtcttcctaatgtttccttacttcatcttcccatatcgagaataacttgaggagaagcaaaacaattatatcttgcatattactacgtcattcttaagaaagttttcttgaacagactctcagctaacttttagcagcagcagcagcattatcagtggctatgagggcttggatatctcaggaggggaaaaatgggaaaggctggcctgattatcataaataataatccttgagacatgattcataaatccagaagtggctaataatattgacattattgttatagtgtcaatattattagccacttctggatttcttccatatcagagataatatttatgaaaaaaaaaatgctaccattatttttatcctgtggaaggcagtgttgctttaaacagtagagactatatacaggtacgcacgcataggttgtattttccattttatacatgcaaggattctttaaataattcattacattttttctttaacatgatatgcagtttttcacaaaaagcccaaataaacggctgtgaggaattctaataggatcaccgtatagccatgacactttatgattcatgatttacaagaaattaagaaatagagctggagacatttagaccagcctacaaatttgtgtgtgtgtgtgtgtgtgtgtgtgtgtgtgtgtgttttaatgtttccaggcaagaaccttaaacaaaaagtgtagcattaaaaaacttcccttcgtcctcgagacccccccaactctagacactggatccccggagacccacgctgggtcgtcggagtctggagccgggggcggcaggtgagcggctagggtcctgcaggggtctgcgcggtgcgggggaggtcgccgagtcagtcagtgccgaaaggaccgcgaactccaggggccaacaatcaccgggtacggaactcaacgtttccgccagttcctggattactcgagtaaaaacaaacaaacaacaacaacaacaacaacaaaaatactaacagcaatgggaccgtaataaatcaactcggagtgggtacaggcggttccgggacaacccacacttagtctaggagcccggagatccctcatccagctttccccggggcaaggggtgaagcgctaagcaaggctgatcactgtcctcaatcatcacccaacccgcgcacagaagccgtggccccacgctctcctatccccgccagctccagactcgccccgctgccaactcccggtgcaggaggaactggcagccgcagacgtgaggaaagcggccgcggcttcaaactccgtagtgcgcaggcgccacacaacgcgcaggcgccgcctagaagtgacttctccaaaaagtgtgttagttcccggtcacctgagctccgggtgacgcggctgcggtagctgcggatacaagccttccgcgggtcctgcctggcgaccccgacctcctcctgctgtctctccgctccgccaccccgaacccgccaaggtcctgtccttttcctcctgtcctttgccagcgttgggccgga

SEQ ID NO: 30017 - DNA, 2300 bp, Homo sapien
tcagtctgtctctatggcctgacttccttcttttctgtgagtgccaagaaactcctgtgtctcctgataataaacaattctttttgcttgacttactcctgatattttacatcaaaatcataatataattaattatttgaaaatgcaagttagtaatgttttcaagatgttaaaagtttgtaagacttaagcttagtaattctacttctaagaatctatcttaaaggggtacattccagataatcctatagatatattgtatcgtagaagactgtaatggaaacatttatttcctggctttacctcattttaacagaacaggtgtttaatttttaaaaatgattatggaagaaattctacgattgcaatttaaaactttttagatatcatggtaaataactgggaaaattttatattgtttgctaggcaggttttatggtacttcataaagtatcttcagtatacttcataaagtatatttttcacatactttaccaacatattccaatgactttatataacaatagtaaaattattaagggacattttcaaattacattttctataaatatcatttagcttaatttttaacatacatgatacccaataaacacacttttatttaattttcttaacagaaactccaaatagacatactgaaaatcacctttttgtatatgtgaagtctgaaaatgatcagaattctgcaagggtataataatgcttttgattacttgaaactttctctcattagaaaagactaataaagcttcaaagatatagaattcagaatgaaaaaatatgtcatttttagaataaatattttcattccatatctaatgatttaggcaagcttttacatattttccttcaaaatatcagctgcttactgacaaagtgttcaagtttttgaaaatgtcttatcaatattaacatgaaatttgatacaaagcaaccaattccaaattatcttaaaacattccgtagtacaaaattagtgtctactcacatcaataatatctattcctgttcgcttacttctatttgctatattaccttaatatacaatacataaatagtattttatttactcattacatactcataaatcatgatcattgtaaagttttgatgctgttatttatctttgaaatagttggctgtagcatattatttttttcattctcatataaagtcaatatattttgtgtgagaagtttgcatctagttagcaactaccatggttatctcaggctttgtggcacagagtctagcttagtgagaatggcaaggtacataactcacatagatgttgtgagatttgcatgacgtaactgtataaatacctagaatactgtcagcatctagtaacagcttactaaatattgggttcttgagtgaattgaaatcgaggtaaagataacaattacccatatcttagttgtatttaactttggtgcagtagtggttgcggttcttgccattaatgcaatcacttttgcaccaacctatcattactacattttatccaatttttttccatttttcacttataatatagtaaaacttatattggttgtcatcgtttttaaaagctgtgcatttttgagtatgaatcattaattgacaacatattttctcatgtttagtattatatgcttctctcataatcttaaatattgtttcttaaaattatgtataatactatgcacttcttttgtttcatgttttatcgcagatttaatgagaagttgtttaaaaaaatctcatatttatacatttgcaattgtgttagtagcaaaaagatacctactatttttcaattgattgtggcattatttttttgagggacgtgttttcaaaattgttgattcctctctaaaaggtctgaactactgaagttgtcaaataaggtttcagatttctcccttcccctccatctataccccagaatcagcttccttctctgccatggattatgtttggggtaaaaaaggaagacggttcagattgataaagcaatactcctgggaaaagactattaacatgtataaagggatttccttgcagtataaatactagcgcgcaccctcctggtgcctcagagccttcctgatgtatatatgcaggtagtgagaattgaatcggccctttgagacagtaatataataaaactctgatttggggagcagcggttctccttatttttctactctcttgtgggaatgagttgccaagcttttacttcggctgatacctttatacctctgaattctgacgcctctgcaactctgcctctg

SEQ ID NO: 30018 - DNA, 2300 bp, Homo sapien
ggtccatgagcagccatgggtgggcctggaaaaagcaccataagttttcatgcctggctatggaacaggcagcccaggctccaggcttcagaccatccctggcttgaacatggggtttcactgggggcttgctcctttccacccaggagcctgtctgcctcctgccaccatcaattacatcatccatggtgctcaggctgtactgaggggcatctgcaggcctgcacctagctgccctcagtcccccctcggcctctctcccattcttgtcagtgcccaaagtccagaggatgccaaggcggcagggggctgtcatatcatcactgcttcaagcacacacacaacactcgggctcggcttcaactttgctcctaaatgagagtgggtgctgggagtggggagagatcaggcagcaagagtaggcacttctgaacctgcaggggcagggagggttcccatgaccctgagagcataggaatgtccaggtccacagctgtagctggggggctgctgctgcacctgggggggtggggctcccaccccaccaactcagaagggtgcagggttctcacctgttcccagctcccgccagctccctgaagtgcacagcccagccttcacctcacctgccacagctggtctgtttgcagcaacctctccagatgggccaccactaccatcactagcacttacgggtttgttttatgttttgggtttttttgtttgtttgttttttggagatggagtcttactctgtcacccaggctggagtgcagtggtgcaatctcagcttactgcaacctccacctcccaggttcaagcaattcacctgcctcagcctcctgagtagctgggactacagccacacactgccatacccggctaattttttgtattttagtaaagacagggtttcaccgtgttgcccacgctagtctcgaactcttgagctcaagcaatctgcccacctcagcctcccaaagtgctaggattacaggtgtgagccaccatgcctggccgcaattgtgggttttattcacagtagttggtagtctcttaattaattgaagtcataatctcaggaataaacatcagtttctattaccttcacaactccacttctgccatatctccccacccttcctttacattccaccccacacactcaacttcttttctctttaggtttcagcaacagtcaaacaaagcaaatagtacaacctactgagtctgtacatgtgtatttcctctcttttccatagcaggtgctcctgtagctggtttcagtgtgttcattgaatgtggtgtcattttctctaagattgtcattgttgcaatttaattattttctcaagtgtggcagactaacaagcagatgtctcttgaaaacaataaccagatccatttaagcaatgaggtgtgcgtatatgtaaattccatttaaaataagaatgccttcttctttcttttttttttatgtctcactctggcctgtcacccaggctagagttcagtggcagatctcagctcactgcaactccacctcaagcagttctcatgtccaagctttccgagtagctgggattacaggcaactgccaccacacctggctaatttttgtatttttaatagagatggggtttcacctttttgaccagacgggtctcaaattcctgacctcaagtgatccacccaccttggcctcccaaaatactgggattacaggcataagccactgtgccctgccctttctaaatatttttaaatatcgagatatttttaaatatctcagatattttctacatatctaagctagagaaagggacttctaaaaatcttaagggtgttgccccacagccctaatagtctaagaatagtctgaaatagtctgaaaaagaagaaagtctgtcttggaaagaattatgcatatgacatttggggcacgtagtgactgtcaatccgattcatagggagacacaaagttttgaagaaaactatactaacttggactaaaagggaaagagctcaaaatgaaaagactttctgtaggcagaaagcaggctaagaaggctacttagctataatccagactactttccagagaccagacaggatctcttcaagagcagagtcaagagcctggagggcgtttcaagagccgtggagtgcagtgaattagagaaccaaatcagaagcagaagtgggccctagtgaaggtaaatttctaaccctcagaggagagcactctgataacatttgtctgggtgaatttcaggtcagtggccactatgtgtttccca

SEQ ID NO: 30019 - DNA, 2300 bp, Homo sapien
agtgctctgaaaacaagacactgaacctctaaattcagtgaatgccaattatcaaaataaaagtgaatgccaattatcaaaataaaaatacattttcaagaaagtcattaaatagcaatgccaaagaaactgacatactcttcaaaccaacttctttatgacactgggggaaaacattaaatcaaaaggcaatttaaattaaagcattaaaaacttacctgaaaaatgtcaactccatcctttttctttcaatgcttgtaagggaattcttacaagctttcccttacaagcattgaaagaaattccttacaagcattgaaaaaatcccttacaagcattgaaagaaatgtcagcaaacatgatgtccatttctcattaactttatttcctacttgttatcagaacgaaattaatagctacctgattcaaacccttcacatatttatttaactattactcctctttgacagaaggggaaactgagacacagagtaacttgtccaaggtaataatttctgccaggagatggtggagccagaatctgaaccctatacacccaaattaatggacgcattttaaaagggatgggatggaaaaggagcagttaatttttttccccaaaatagcttgcaaaaaaagattgttgtgaatgggaacaaaccgtttaaattacaaatgcaggtagatgagaatgcagagtacacaaactttacccctaaaaaagtaggggtatatttgttatatttgattacaaacactttgaacaacatcaaacccctgtgacggtcgactgagtaaataatttaatgtcaccgttcagacactgtattttacaggctaaataaaatacattatatattgaaggatgaggggggttggtgatgttaaccggagcaagagtttaaggaaaattactttcattatgagcagttaattagaaaagagtgcgtgtgtcaaccgaaggaggttaaaaaaaaagacaatcacattgccttaacgcactctctgtccgaaaaaagtaactaaatcaccgtgggtcagcgtctacgccaactggagaaccggcccagcgggatcttgtgaggggatgacaggagaccctagaagagggggaacagtggcagtgacaggaaagatggcatgtctcccatcccggaaaaaaaggggagaacacggggggcaatcggcggagaggggaaggcagaaaatgttaccagaggtgccaaatgaggtgagaaagaccagggtaggaaacataagaaaggcgggactctcgggcaggaaggtctgtttggggtagggaaggcatgtcaggacagagctttccggacagccgaccttccttctttccagcccctccatccccgacaaactcactttctcagcaaccctaagcccgtgggtcaccctcgccttgctccccgccccccaccccaagccggataagtggaggagggagcttcagcctcaccctccttgttggggaggagcgggcactggacatagaccagattcatggacgagaagaccaggagacgcagagaggcccaggacccgggtgacaagtcggggcggccaacggacgcctcacctgacagaagcgtcggcagtaatcccgactgctgattccgacgccgccgccgcagttgccgctgccagcgccgcctctgccgtcgcccgcagctctaagccccacagggcccagcggggactccacaatggccacaagctcttctccgaggcgttcggcctcttggtcgctctcttcctccgccatgaggctctcgccgcccagcgcgtaccagcccctgcgccgccgccgccgccgtagatgcctaggctaacctcctcctcctctctagttccctcccccttccctcctccctagccggacaggggcctctcggctgggctctacttccggctccgcccacccacgcccccagtttttattggaagacgcaagctgccaatcatgttcatgcccgcctttccactactattggtgaaatcgacagtctgtttgataaaccggccgtctgttggtcaatgctgctcggcggttgctggggaccgcctacgggctctgccataggcggtgcaggcggacggggcgcggcgggggacacggcggccgccgcggggctcgatcgggcaacggcggcgacggcggcagcgacggatcctcctcctcccttattcccttgctcctctttcttccttttcttttcctttccggccgggcctcgtccactttccctaacggcggcctcgatcctacggtaccaaggagctaggga

SEQ ID NO: 30020 - DNA, 2300 bp, Homo sapien
tggtgaaaccccatctctactaaaaatacaaaaattagccaagtgtggtggctcacgcctgtagtcccagctactggggaggctgaggcaggagaattgcttgaacccgggaggcagaggttgcagtgagctgagatcatgccattctactccagcctgggtgacagtgcgagactctgtctcaaaaaaaaaaaaaaaaaaaaaaaaggatgtagatagaagtatggagaaagaaaacgaattctgttttgaatgaatggattttgatttgctgtatctgaaaaatctaggtagtaaagtctaattataattgacatttagaaatcagtagttggaattcagaaaggattccaagttgtaaatgatggatttataggagcaaactaagtaaatggaataggtctgattttcactcattctgcaaacatttattcagaggttactatgtaccaacttttatgctaaccatagggagacataaaaaatgagacactgtcacctgtaatttaggaattcacagttggggggtgaggacatacacatacacagatatttataaaacaaaattgaaatgtttttaaagataagttattcttggtggaaagaatggggaattttaactgtacctcagggcagagaccaggataagtggggagaaaaaccttcagattagaactgattctcaaagaatgaataggaggatcagtaggaatttactagctggataaagtgaaaatcggatgtgccaagttaaagtctgcctgtgggaactgtaagtagttcttcagggttacacagcatgtaaaggactaagaaaacgtgaggctggcaaggtagtattcctccctgtaatctatactataccatatgtaggcagtatgatatatatacatatatatgatgttaaagacattattatggtgtctcctccaatcaaaataagcctttagattattccaaaccactagagacactattataactaagatgggtcgacaatagattcccaagtaaaagctgatgcaattatccttgagtcatcagtgaatgtttcaaagcttgagtactgttcagataacttccagggggctcattattctgaggcttatataccttattagatttggaaagattataactgccttctttatgtgtgccacatttccccccttatttggataaataacattacttaataagcaaaataagtaatattttttcatatagcactataataaaagttcccataagcagtttttttaagcctagtttatttcttgatgtggaaaattgataaatctgttaaaatacacataattttgacccttctctcaaagaatatgagatttgtacctacaataataaatgggggtctagaagaaatcttaatcaccataagtttatgaatcaccataagtccattttgtattatggatagtgggcttgtcaaatgtgaaaattaaataaattagaagctaaaatgctatctattccagattattttcaagtttaagaaaaagagaaaggtatatatttaaaagagttaaacaaggctactaaatatggaaaattggacattggaatactatgtttattcagctttcattttaagagttgtgttttttaaagatagactagtataaccatttttttggaaaaaaagtatttagcactaatatttttctttttacaggttgaagaagaaggcttgcaaatttgtgttgaaatatgtggttgtgctctacaactcgaccttcatgatgatcccaaaactaaatgtctaatttataaaacaattgcacattttttgccaaatgatttggagatcctcaggatttgtgcactctcaatattttttctggagcgctccttagaagcgtatcgtactgttgaagagctttacaaacgtccagatgaagaatataatgaaggcacaagtagtgttcaaaatcgtgttcgttttgaattgcttccaattttgaaaaagggattgttttttgaccctgaattttggaacttcgtaatgattaagaaaaactgtgtagcattattgagtgataaatcagcagttagatttctaaatgaaagcacactggaaaataatgcaggtaatctaaaaaggacggaggaacagcaaggtttggatgaagggtttgactctcttacagatcagagcactggagagactgatcctgatgatgtatctggagtgcagcctaaaggtcatattaatacgaagaaaaatcttacagctctcagtacttccaaagtagatcacaatgtcccaaggcatcgttgta

SEQ ID NO: 30021 - DNA, 2300 bp, Homo sapien
aatatgagatttgtacctacaataataaatgggggtctagaagaaatcttaatcaccataagtttatgaatcaccataagtccattttgtattatggatagtgggcttgtcaaatgtgaaaattaaataaattagaagctaaaatgctatctattccagattattttcaagtttaagaaaaagagaaaggtatatatttaaaagagttaaacaaggctactaaatatggaaaattggacattggaatactatgtttattcagctttcattttaagagttgtgttttttaaagatagactagtataaccatttttttggaaaaaaagtatttagcactaatatttttctttttacaggttgaagaagaaggcttgcaaatttgtgttgaaatatgtggttgtgctctacaactcgaccttcatgatgatcccaaaactaaatgtctaatttataaaacaattgcacattttttgccaaatgatttggagatcctcaggatttgtgcactctcaatattttttctggagcgctccttagaagcgtatcgtactgttgaagagctttacaaacgtccagatgaagaatataatgaaggcacaagtagtgttcaaaatcgtgttcgttttgaattgcttccaattttgaaaaagggattgttttttgaccctgaattttggaacttcgtaatgattaagaaaaactgtgtagcattattgagtgataaatcagcagttagatttctaaatgaaagcacactggaaaataatgcaggtaatctaaaaaggacggaggaacagcaaggtttggatgaagggtttgactctcttacagatcagagcactggagagactgatcctgatgatgtatctggagtgcagcctaaaggtcatattaatacgaagaaaaatcttacagctctcagtacttccaaagtagatcacaatgtcccaaggcatcgttgtatgttatgtaacaaggaatttttaggtggtcacattgtaaggcatgcccaggctcatcagaaaaaaggcagttttgcatgtgtaatatgtggtaggaaatttagaaacagaggacttatgcagaagcatttgaagaatcatgttaagaagatacagaggcagcaaattgctgcagctcaacaggatgatcaggaagtcactgctttggaagaaataaattgttctagttcttccatttcatttgaaaatgggaattctgatagtaaggatttggaagtggagacacttactgcttctagtgaaggaaacaaagaagtcatccctgagcatgtggctgaattcattgaaattcccataagtgtaccagaagatgttattgaaaatgttattgaaaatggcagtcctaataattctttaaataatgttttcaagcctttaactgaatgtggggatgattatgaggaggaagaggatgaagaaggtgattatgaagaagatgattatgacctgaatcaagaaacttcagtaattcataaaatcaatggaactgtgtgccatccaaaagacatatatgccacagatcaagaaggaaactttaagtgtcctgctcttggttgtgtccggatatttaaaagaattgggtttctaaataaacatgcaatgaccgtacatccaaccgatttaaatgtgcgacaaacagtaatgaagtggagcaaaggaaaatgcaaattttgtcaaaggcaatttgaagattctcaacattttatagaccaccttaatagacatagctatccaaatgtgtatttttgtttgcattttaattgcaacgagtcgtttaagctgccgttccagcttgcccagcacacaaaaagtcacaggatatttcaggctcagtgtagttttccagaatgccatgagctttttgaagatcttcctctgctgtatgaacatgaagctcaacactatttaagtaaaacaccagagtcatctgcacaaccaagtgaaacaattctttgggatgttcagacagactcaaatcctaatcaggaaaaagactcatctagtaatgagaaacaaactattagtctgccagtttctactagcaaatcaaggaaagagtctacagaaccaaagacatgtatagaaagtatggaaaagaaaacagacagtttagttcagaatggaaacgaacgttctgatgacactgtttcaaatataagcttgatagaccaaaagatgcctgacatagagccaaattctgaaaataattgtagtagtagtgatatagtcaatggacacagtgaaatagagcaaacacctttagtttcatcagatcct

SEQ ID NO: 30022 - DNA, 2300 bp, Homo sapien
actaaacagtacaagaagctcaagaaccacatgtgtctgatagttactgtattggacagcaaaaaacattttcaccatctcgaaaagcatcttgacaggttttacatccatggctcttaattgtgggtgattttgccctgcaggggacatgtaacaatgtctggaggtaattttggttggcacagtgagggaaggaggtgctactggcacccagtgggtagaggatggggatgcgttaagcatcccacaatgcacaggacaatcccctcgacaaaagattatcctgcccaaaatgtcaacagttctatgattaagaaaccctgcgttagatcagtcttgactgcaactctaacacattgctcattgcctcctccttgctcaaacgggctccagtctcctggactccttcctcaaaatctctactgttgcttcttcctaccatgcttctcctgcggctcactcactttcttctgatcttcagtcacttaaagaagctttcctttcaacctgtataaagtactaacatcctctcccatccttgtcttctggatttatttttttccatagcatctcctggccgactatatagtttcttacatgtttactgtctatttcctcccaacaaaatgcaagcattgttttttgtccccagtacaaagaacaataactggcaagtaggtgctcaattataatacatttttaatgaacgaatgaaataagttggacatgccctccacgtggtcccataccaacatattttagcacttatcttgtcatctctttactaacaacactcccaaaagctccttgaagaaaggtcagggtcatgtcgctgaaccttcaatagctaacatagcaggcattcattaatacttaatttaaaatacgaagaattcctgtgttgagtaaatggtaccccaataacatccactgacaatttcaccatattttgaatgctttaaggactacatgtacaatatatgactgatatttagctattatttatttttgagacagggtctcgctctgtcacccaggttggggtgcagtgagtgtggcgcgatctcggctaactataacctctgcctccagagttcaagcgattctcctgcctcagcctccgagtagctgggattacaggcgtccgccaccatgccaggctaattttttgtatttttagtggagacggggcttctttatgttggccgggctggtctcgaactcctggcctcttgtgatctgcccgcctcagcatcccgaagtgctgagattacaggcgtgagccaccgcgcccggccaagctatattttaaacaaagttaaatttgctcaccaggatctgcagatgtgtacatttcagctactaaatggcaataccccaattaaatgtcaactgatcaaaaataggacttaaaaatggaaaaaggcaagtgacaatgcatttagtctgattcctgtttaacagagcatgactatttctctcgtaaatgtgtgttgctaccatgccaatagtaataacagctaaagtttagtaagagctctttagtaagagccccatgcactgttcaccccgcccccacagccccaagaggtaggcatctccactagatccacttccattggaaactgaaggggaaaaggctaaggagcttgcttacagtcagggtaaatggcggagtaaaaccctggcaatctggcgtccagaacccccaaccttaaattgcgcgcgacatcgcctcttctaaggccgagccggcaacgagggaaatggaggcaagagacggtcccggcgtgtttgagaggaaagtccgctggaaggcggccaggcacagtggattatctatttttaacttttcatactataatgttaaacaaaactaaattattttaatttacttaatttaaggaaccaaactaccggctcacccaactcagaagtggccgcagaagacattcaagcgctcccgggggcccggccagcgggcggggaggagccgcctccattggccggccccgcggcatcacgggagctcgcggtgcgcccgggtggcgggctgctttccacgcacctgcacctgcgcagccctccaaggcgctcttttggaggagggacttctctttcggtaaccagctcccttgcggatagtctatgttctccatataaacccagcacttcccttaattgagatacgtgggacttcactccgtccccagcccggaaccacaagtgagggcactgcgtttcctgattgacctctttggcgattacttccgcccaggggcctggaatactggaggccc

SEQ ID NO: 30023 - DNA, 2300 bp, Homo sapien
taatgctattcctctttattcgcatccacctcagagtagctactatcctaaatgttgctttaaaatttcccttcttttatagttgtacagcataagtatgtatccctgaactatatttagtttggtatgttttaaattgtgctataaattcaatccatccatatacagtatatagttttctgtaatcagcttttcattcaatattttctggattaatttgatatacatagctaactcattttcactgctatatcataattagttatatgactgcacacaaggtatccaactattcttctgtttacagacttctattctgcgtccaattacaaacgctgttactttgaacattctcatacacatctcccagtgctcaaaaaggggcaagcagtatgagcatcaacctggagcttgttagaagcagaatttctgggcctcccctaaaactaatgagtcagaacctgcattttaacaagatccctgagagattcaaaagcatattcaagtttgagaagactaggtctcgagtatgtgtctaatctgccattttaggagatgtcaaatttgttttttcaaagtggcagttttaacttaaactccttcactagttgtcaacgagttgcttcacctgatcatgaacacttgaagtttatagtttatatatatatatatattttttccaatctggtacacagaaaagacaacttctgtttctggttttcatttcattagtttccaaagatgctgagtatactttcatatgcttaagggtgattccccaccccctgccccaggaatgtttcttcaagtcatttaaacgtttttgaactgggaatttttttcttatttgcttttagataccctataattaaatgcagcattttatccattataattttaaattcacactcaccatgattataagaaggtgaaagccatgtaaaataaacgctgaagaaccatataagtctaaagctattttcggtcttaattctttggaacttcctcttttagtgtccatggttcggagtgacaaatgactttcttcaatgccaaaaatgaaatccgacttaagcagaaaaacccagttttataagggcagaatcttttaaagataatcatatactaatatgggaatctggaatttttcacgttttgaagtaaaattcagcaaatttaaaataaaactagctacccgacacacaaaatgaacaaacgctttacatttttatatggactagtcacaatcagacttagcactaataccccttaaaaatccaccggtatatgtatttagctcgcttgtgtgtattcctagtacgaaaatcatctcagaaaaattttgcctccaaaaggagacatggattcaaggtgcctgccatttaattacagtagttgctttttaccagagacatacaaaatgtttgccatcctcctcccactcaaacttgaagaaaaaagcccgagcagcagctgactcttcagctgatcgaaactgaaaatgcaaaacattctggctccccagaaaattttttaaaatttttaaaaatttaaatgacttattccgaatccttgaatcaacaagcgctgcccataatattcaatggataaaacctggaagccgtgccattatcaccgccaccacctccccgccttgacccggcagcccaagtcggcgtagtggttccagagctgtggatctgcggctgcggccaacattcccgaggattctgcctaagcggggtaggcgtgaggccggggaaggggcggcagccttctaggtgaagggtccgcccttaccttggcggtcctgaggctgcaccaggcggttggtgacagtgtcgcatagggccatgatctcgtcgttgtccagtaggccaagtaggttacggcagccctccatctctgaaaagctgagtcccgacatctccatccccgggactgggggggaaagacaacggcaacaatgtcgcccctacggcccactgggcccgcgcctggcaacagacaccggaagtgcctttcttgttgttctccgtcgaagggcctccagtattccaggcccctgggcggaagtaatcgccaaagaggtcaatcaggaaacgcagtgccctcacttgtggttccgggctggggacggagtgaagtcccacgtatctcaattaagggaagtgctgggtttatatggagaacatagactatccgcaagggagctggttaccgaaagagaagtccctcctccaaaagagcgccttggagggctgcgcaggtgcaggtgcgtggaaagcagcccgccaccc

SEQ ID NO: 30024 - DNA, 2300 bp, Homo sapien
tttacctaccacaaatactctaatatactctgtattccatatgtgccaaatgctttcatttttggctcacttggacactctctggacttgcctgcctgcagttccttctgaatcattttcttactagtgaactcctacccatccttcaagctgcaactcaactaccactttcttaataagggcttccctgcatctgctgcccccacctcatcctttccactcctgctatggttgctcttctctgcttattggcatcactcccttttccccatctgtccagaatggcgcctacataatggaaaccttttacttttcactagagagttgacaatttagagattctatatcatttacattctattttcaggccaggtattgctttgtactcattttgccactcctgtagctttctgcaaacatgaatgccttttttcccagtgacaagcagtttttaagttttcaagtgtgaaaagagaaatagcatgaggggcgccaatggatctgcgtgtcagcacattggcagattctccaaaatgttttcaaattgtcaattccaaataagattttagtttctttcaagtttcagaaaacgtgtatctaactttggaacaatgtaagtgttgtgctggaactttgaaaaaacaccagagtcaccactgtctaagttctctgggcagtatctgctattattttcaattctgacagacttggcacttgaggattgcgcagcctctggtgacacaatgtggaaagaagttagagacacaaagtaacatggcatacacagaaaagtgagaaggatctctcttttcccctggctgcttctatccaccccaattccccaccccagtcatcaaactattatctggcaccattaacttaaattcaagtgaaaattgtgttctctaactaaaaacattgagtttgtggactgaatacattattagcaagggcttttcaaactttcatttaagtttcattatcaagagctctaaaattgatcactgatcttaagattatcaacatacctttattttctgaagttgtgagaggaatataataatcttgttttctttttagtataagaagagatagatgggcggaaggatatctgagtaaccattttctgggagatattttaaagataagtgatgctggttattaaaatataaattacaaaattgtttggctgaactagattgcaataggttgttcagcaatgggattggaaataacagagaccattgatagtcatggtgtaaaataagtgagaaagtacgaggacattattatttagcttttggatttggaatgttaaagaataagaataccccaatattattagactatcagtggttgaaagttgaatggaggagctgtgaattatgcattgtttctcttgcagaacccagagatcctaatgtgagatggtgagggagggggatatgtattattaagaaatttaggtttgatctgtattacttttacaacacagaacgagaaaagaatgtagacctccggctggggttagacttgctcccttccgtaagatgatgaaggtcaacttccctgtttgaaaaaaaacaaagtatgctctatgtgcgcggaaaatcactgtgccagatctagtaaaaagccacgataccattgggtgtggaaatgcagagaccctctgattcaggctgtgtattagtgtctttctgaatcacaaagaactcatggagagttatgatcacattgaacacagtaaaggaataactataatcatttttttcaattatacaaacatgattgactttttaacgaaagactgctattctttcaaaacacacgtttctctcgcatttcagttccttttgcactcacattgccatatgatactcctatcaaggctgtgatttcttcggtgaattaagcaacagagcatggatagcaaacaataaaacagctacttttcatgcaacacaaaagagggagcatttttctcagcaccgcggcctcatcacatcttctgtgtttcctgtcccatgggcgacgcccccactcccacccggtctccttcccgagcagctctgggctgcagagccagctgcgtgccatcccgctctgcttcagcgcacgctgaagacggcactaggacccagggaagtccccgagcggggttcgcggaaaggcagccagactcctccttatctccagtgtcaaacttgacatcagcctgcgagcggagcatggtaacttctccagcaatcagagcgctccccctcacatcagtggcatgcttcatggagatatgctcc

SEQ ID NO: 30025 - DNA, 2300 bp, Homo sapien
tctgatttttattattaacaaagaaacaagcacattattgaataacctctgttacaggtattagtttaaatgtttcatacctttatattagttaagataagatggtctatgaagtgataacacattaatcctcaaatctccaaattgattttcaaatttctaaatcttgatggcttggcaaaataagagattatttcttaaccatataaagttcagtgtggtttgcataaatctctttcatctttagttataccatctggaacacatagcatccaaagttcctgcaaaaaaaaaaaaaaaaaaaaaaaaaaaaaagagcaatggaggtggtgtacttgtttttaactgcctcagcttaaaagtgacaaacgcagccagacgcggtggctcacggctgtaatcccagcactttgggaggccgaggcgggcggatctcagggtcaggagattgagaccatcctagctaacacagtgaaactcatctctactaaaaatacaaaaaaattagctgggcatggtggtgggcacctgtagtcccagctactcaggaggctgaggcaggagaatggcgtgaacccaggaggctgagcttgcagtgagctaagatcgtgccactgcactccagcctgggcgacagagcgagactccatctccaaaaaaaaaaaaaaaaagtgacaaacgcacttctgcttatagttcaaatagttaaaactcaatgaagcacatggaatatttcttcggcactatgtctgttagaaacattttctcttaaggttgaaattaatgtattttcctctaagagaagtataaatacttattgcctatttaacctttggtaatatatattacaaagtgtgtggttgttttaattatctgaataaactttgtgatagagggagggcataatttactatgcctgctaacacaccagctggtagttacttagtattattacactgagttggctattaatgtagcagaacgaaaaaatatggtaacagctgatattgaaattactcctatggtgagaactgttgttacattagaaattaccttgaaaagaagcttgagttttggaaagtgaagtccctgaaacatggtctataactttgctattccagtatggtccgtggaacatcagcatcaggtttacctggggacttaactaaaaatgaaatatatctggccctaccctggatgtactcatccagaatatgcatttaaacaagactttcaggtaatttctatccacatttaaagtttgagacaatctagtttttaatgagatagagaagatagataagtgaacaaatttttgcagaatggccagaggtggcaattagggcaagagaagaggaaatgtcagagaagggagaaagaaagctgagcaccatggcaagagaatgcagcttgtggagaaggtctccagtgagaaattactagatgtgaggtgggtaaagacttttaggaatgggcatttcttttttctttcttttattatttttaaattcctttttttggttgttgttattttgagaaagagtcttgctctgtcccccaggttggagtgcagtggtgtgatcacagctcatcgcagcctcgaccttctgggctcaagcaatcctcctgcctcagctcctgaatagctgtgactacaggcttgagctaccatgcccagctaattttggccatgttgcctaggctggtctccaactcctgagctcaacggatccttctacctcagcctcccaaagtgctgagattacagatgtgagccactgcacccagtaaaagtggcatttctaagtttcaactttaaattacaaaagttgcttaaatataaacaactgaaccctgaattcctctgcctctagtgttttcaaaaagtgtcaattttcacatctaaattgattacgtactccattagtctgttttcatgctgctgataaagacgtacccgagtctgggcagtttaccaaagaaagaggtataactggactttcagttccatgtggctggggaagcctcacaatcacagtggaaggcaaggaagagcaagtcccatcttatatgaatggcagcaggcaaagagagaatgaggaagacgcaaaagcagaaacccctgataaaaccatcagacttcatgagacttattcaccaccatgagaacagtatgggggaaaccaccccagtgattcaattttctcccaccagttgcctcccacaacatgtggcaattatgggagttcaattaaagatgagatttggatggggacacagagccaaaccatatcaagtac

SEQ ID NO: 30026 - DNA, 2300 bp, Homo sapien
cagtcccttagcaaagctgactcttagtttttgaatatcttaagtggtttggtagccataagtgctgctcaccatgtctagttctctttccttacaggcacatgaaataacagttattcccaccctcttcaagtcaggcatacctcgtgccttgctttgtctaatgaaatgtaagtggtatgtcacttcttggtaaaagtatttaagagctggggcacaattctcaatgttctctcttctcttgcaatggtaattgtagaagactatgttgactttgagggattgtaaaatcaaagcagcatgaattgctgagttcacacatggaagatagttacttggaaagtcatgcagacttgtagtagacttccaatgagcaagaaataaacacttcttatctaaaacactgtaattttctggctttttagtgtgtaatctggtttattctgaatgatgaaaagagtcatgctgctatgattctagttaacactgtcatttcaggataattgttgatattttggcataaatattcccaggcacacactgttgacttaaatagaatgaaacgtttatgtaccagtcactgttttaagcactagtaatatagttgtgaacaaaacctttaaaaattcctgctctcatgaatcttacattttactggtgaagacagatgaagaagtggataagtagacactatgttggtagaagatgatatggagaagtgtaacactggaaaaatgatgggattaagattatgaatgagactagattaagagttaaattttggacaggttttaattgtatattaaggtctgtatcaaaaccaaactttggctaaatgagattaccaagtgtcaattcatattgagctaaagccagatatcactttcacaaagttaacttctgagattaattaaaaacccagaattttattgaaagatgtattgtcaaattgtatattaatagattccagatggttttacaaagtttgacgttacagtgtaggacacataaattttcagtgttgacaattattactggcaatgtgatgcaaatttgtggtattaaaaagatattcaggccaggagaagtggctcacacctgtaatcccaaagctttgggaggccaaggcaagaggatcacttgaggtcaggagttccagaccagtctgggcaacacagcgataccatctctaccaaaaaaaaaaaaaaaaaaaaaaaacaaattaaaaaattagcctggcatagtggtgtgtgactgtagtcctaggtactcaggagactgaggcaggaggattgcttgagctcagaagttcgaggctgcagtgagctatgattgcaccactgcactccagtctgggcaacctagtgagaccctgtctcggataaataaataaataaataaataaggctaggtgtggtggctcacacctgtaatcccagcactttgggagaccgaggcaggcagatcactcacgatcaggagttcagaaccagcctggccaacatggtgaaaccctgtctctactaaaaatacaaaaaaactagccaggcatggtgtcaggcgcctgtaatcccacctactcaggaggctgagacaggagaatcacttgaacccgggaggtggaggttgcagtgagccgaaattgcgccactgttctccagcctgggcgacagagtgagactctgtctcaaaaaaaaaaaaaatttttttaaattaataaataggtagatgtatagatagatattcactttcaactgaagtctttatcggagcaagattttttttaaggtagattattctaatattcccttcttttcttcatgttctttacattatttttatgcctgtatggcatacaagaccgaaaaaacatgtggatgatcaaaatgaccccatttgcttttactatcaccatagttcttcctaaagtcctcattgacttccaggttttggttaatatcttcagggacaactcagtgtctcactgtttctgcttctgaacctagggatcctgtcctcttgaaccctggaagttgtcttgaccagtcagagaactgcgttccccaccccttcccctttggaaacgtcacactgtggaggaaaagcagcaactagggagctggtgaagaaggatgtctcagcagtgtttactaggcctccaacactagagcccatcccccagctccgaaaagcttcctggaaatgtccttgttatcacttcccctctcgggctgggcgctgggagcgggcggtctcctccgcccccggctgttccgccgaggctcgctgggtcgctggcg

SEQ ID NO: 30027 - DNA, 2300 bp, Homo sapien
aggtcaagaggaatctgaacagacaggccttgctgagtttctccacacagtctgctctcattaggtcatatcctttttgaccaatgagagttcttcagggtttttcattcttcatcgaacccaagtataaaaatgggtagtcttccctgcatctttgcatctccatttgcaaggttcccatgtcacataaaacttggattaaataaatttgttatgcttttctcttgctattctttttgttatatgagtgttggctgtgactgttatgatgagaagaaaaggtatcaccccctttgttccccataaggcacagtattttggagatagcaagctgtatgagatgtatataaatttgaattaaaattacatgaggctgggtgccatggctcatgtctataatcccagcacttttgggaggccgaggcaggcggatcatttgaggccaggagtttgagaccagcctgggcaacatgatgaaaccctgtctctacaaaaaatacaaaaatcagctgggcgtgatggtgcacgtctctagtcccagctacttgggagactgaggaaggaggatcacttgaccccaggaagcggaggttgcagtgaatcgagatcatgccactgtactccaacctgggtgatagagggagactctgtctcaaacaaaacaaaacaaaaccaaaaaaagttacatgatttagtaaaggacagagactaatttaaaacctatatgtatcttagtctcaaatcattatattccccgcgaatacactgggattctcagtgccttctatcctttcatcaggatttgaaaatatttatttaagtagaaaatgaatggacacacagatccctacatattgtgcataattttttccctacaggaatgtccttgtcatttctttttctccaaagtatataaaagaaatgcaaatattacatacctctttaaaaaataaactattacaaaacagtcaagagataacaatcttcatcttgcagataccaaatagccagcaatttatgtacctaaaaatcctgaaacaaacatacatcaaaatggttatttatttatttttgagacggagtcttgctctgttgcccagactggagtgcagtggcgcgatctcggctcactgcaacctccgcctcccgggttcaagcaattcccctgcctcagtctccagcgtagctgggactacaggcgcgtgccaccacacccgtttttgtttttttttgtttttttttttttgtatttttactagagacggggtttcaccatgttagccaggatggtctagatcacctggcctcgtgatccgcccgcctcggcctcacaaagtgctgggattacaggcgtgagccaccgcgcccggccccaaatggttatctttgagagctcctgtgagatctcattttcttcatcttgtttctttttagtatttttcacattttctacaagaaatgcatttttcttttgtaatcacaatcccccctacaacaaatatcatacaattccgtttcacatatgtaacagtaataaacgttttagagattaaggcttcactctcatctgaactactgagaaaatttagcaagcgaatttcccccttgtctttaacttacaagaattgccccagtgtattgttcctgtagtcatgctgcctaagtcggccagaattctagagggtccccatccctgagcaaaaaacaaacaaacaaaaaacaagaaaaaagaaagaaagaaaaagaaaaacccatgcacaagacctgagatctctgaatctcagttggggacactggagaaaggaaaggaacagcaccgtggattggcaacacattttatgtaggtataaagataggccttgctggagatttgtcccggatcctccagcttatctccggacgctccggttgcctagttacgagaacgagctacctcgagctccgcctccttcttatagagtactcccctttctcttttcctagtctcgcgcaggggcgggtagccaggactcttcagccactcagaggcctctacctcaggacctcaaccgatgattgggcgagcgcagtacgggcgttgcctggggaacgccttccgcgcctcgaagtaacgtcagcacgtcgacgcggggcttttctttagccgggtcccgctaactcggctacggtgtatctgcgtctttggtcaggttgttccttggctaagagggcagtcgtcgcggacccacgcggttagcaaggcttagtgctcgggccggccgccttcacttccctcccggcttttcctcccgacttatcca

SEQ ID NO: 30028 - DNA, 2300 bp, Homo sapien
atcccactagagatgcagagtcaataatactgttttaaaattacttaaaatagtacttctctgtgtggttttgccatcacctagatatatacctaggttcatttctttctaggtgcttttgcattttagagatcgtttgtgtatttgttttaagatttaatttctaaaatatttatatcggctggacgtggtggctcacacctgtaatctcagcactctgggaggccaatgtgggtggatcatttgtcaggggttcaagaccagctttgccaacatggtgaaaccctgtctttactaaaaaaaaaaaaaaaaaaaaatgagccaggcgtggtggcgtgcacctgtaataccagctactcgggaggctgaggcatgagaatcgcttgaacccaggaggcagaggttgcagtgagccgagatcgcgccactgcactccaggctgggtgacagagtgagaccctgtctcaaaaaataaaaataaaaaaatatttatatggttctaaattcagaactataaaaacaaggtacaatcagaaaggaactatttgctatctctctgccttttccttcccttcccttataggtaaccattttcattcgtgtttagttcatcctcccattatttctttttgaaaatataaacaagcgtatggagaaaatggtatttcaaggaccataatttgggcactgtgaatattcaatgctattgactggtttatgtatttgtgtatatatacaatatttatatctacccttcctttcttcctaaaacttagcatattatatatattcttctgcagcatgcttgttttaactgaacagtaaattttgaagtaccctgaagcagtataataaaatcttcactattttctataattgcaaaatgctcccctttgaatgttccatcatttattcagccagttctacgctgaaggacttttgtgtttccagtgttttgtttttacaaagagtgctataaaaagtaggtgtgtaaaggagtcatttcttattttgagtacagattccaggaagtagaactgttaaaacaaagaataaatataaatgtgattggccgggcatggtggttcacatctgtaatcccagaactttgggaggctgaggcaggtggatcacctgaggtcaggagttcgagaccagcctggcaaacatggtgaaaccccatttctacaaaaaaattagctgggcgtggtggcaggcaactgtaatcccagctacttatggggctcaggcagcagaattgcttgaacccgggagacggaggttgcagtgagccaagatcgtgccactgcactccagcctgggctacaagagcaagactccttctcaaaaaaaaaaaaaaataaaaaaaaaataaatatatatatatatatatatatatatatatatatgattttgatagatacagcaatttccttcttcttgccctcaaatagtaacaagtcaggtagaaaaaatgggtctgaaatttggtagtacaagagaaattttcatttttaattcttcctataaacatttccctctggtataaattaattttgagttgttatattgacaaaataaatgatttaacatatattgctggataactttagttctatataaaatttattttaaaataaaaacagcaggcataataaaaagtaaaaaaaattaaaagtaacgtgggatgaatggtttacagacatgagctctttcctggatgttctccttctgaaattctatgattttgtgagctaagctcttttgggatttcctaaaataggacagatttcaaccattttaaagtaaatggaacaaaaaaagcttttacaccaagcttcttttcattcctatttaattccatatttttagtaagttttgatatctatagaaaagaaagtaacctttgtttaaatacaaacccattttcttggaataatatattacatatacaatgtaggactaaatttgcagatccagtgccaaatactctacgtaggcagtttaacgaggacttcctgttaccgactagctccaatgaaaatgatcttcctttaatctaaagaataggcgtctaacaggcagaaccagattctccaggtgtgaagtaagcaatctattttcacttgctattaacagcaaacgtacaactttatctcttatttgacttcattatttggctttcaaattaacaacatgaaaactatacagaaattagtctgtgccctataagacagagatttagataatttgttcaaaacatgagatgatattcagatattctctcaaaggcaggactc

SEQ ID NO: 30029 - DNA, 2300 bp, Homo sapien
aaatgcatacttttctcagagggagggggaacaacttaaaccagaaaacaccttcatattaatcatccttctcacatacttcaaatttgtacttgatgtgtttcccctcctggacatcagagagaacacctgggtattcaggcagaagtttatatttctccaagtcaatttctgaaaaaaacgtgtcactttcaaagtcctgcatgatccttgtcacaaatagtttaagatggcctaggtgattcatggcttccttataaacagaactgccaccaactatccaaatcatgtctactttatttgctaattctggtcgttcagtaagttttaaggcatcatccaaacttctggcaagaaaatgagctccttgtggaggttccttgagttctctgctgagaactaaattaattctatcctttaaaggtcgattcttctcaggaatggagaaccaggtcttcctacccataatcaccagattctgtttaccctctactgaagaagttgtggtcattctctggaaatacctgaattcattcctgagcggcggcctgggcaggtccccgttcttgccgatgcccatgttttgggacacagcgacgatgcagtttagcaaaagaaacatgacagcagcggttaacacctccgaacttgctggctacgccaggaagccaggccaagaatgccgcgaaattcccttcttcaaatttttttacgtgcctacattgcaaatacaataccactgtattaattaattgcaacattctggaatgaacatagaaaaataaattatataaaatatatttataaagtataaatttataaaatatttataaaatataaatttataaaattataaaaaatacagaggctgaaaggttagaccgacttttccacaaacattaaacagacggcatccaagagatggcatcatttcattcctgattatcatagtcttttgtaccaaatctaaattctaataagatgcattttttaggtgacttggaaacttgtttaaataaataaatatattaagcttcaaatcagattagaaggaaagacatgtttttacatgaatataagacttgtacctatagcatgtacgtatattgatatgagcatcaaggaacaactcaaaatgatgattattaactatcagggaccatatcaaaccggttttttctaattgctgattgctgctacaaatgatagttactgaagcatgacaccaaaagagcaaataaacttctattcgtgtcaaaataggtgtaataaacatcttccttggagaaccattaaacattgctcccttgtaaaggtgaattggggaggctagagtggagggtccttttggtcttcacgcatttggtatcaacgcgacaaaaatcacaatgatcacaatagtgaaaataatagcagctaacatttgggcatttactgtttcctaatcactgttgtaaccgctttacatgcctacttcagtttaacactctccattaaaaggagagattatccccatgggccaggtctggggaaaagcatgacttaatttctttttcattatattccacccttttatccttgggtactgaatgtctaggttaacaggggtcactagatttggtagattaagtcagtaactagcttcgctttgagaatattttaaatcagtcatcatacaacataaccccaaaactcattcctttattgagccccatgcatatacacactgttcagcacaatatgcgactttttatttatttttgagacaaagcctcgctctgtcgcccacgctgcagtgcagtggcgcgatcacgggtcactgcaacctcaaacttctgcccaagcgatcctcccacctcagcatccgcagaagcaggggccgcacaggcgcgcagatgtgtgactttctaaggtccggccgcccaaagctacgccgaccaatccaagtagcgaaagtcgctttggccctggcccgttacctccgcgtcctgggaagtatcagcctttaccagctaccggaagtaactgcgcacgaaatctcccgcgggagctaagcctcttcgacaagaattctatagcgcgagcaaatcagtatctcgcgagaaattgaagaggaaacgtgagaatgaaagtggatgcccgcgaatcccggaagtcagactgtttttttcagttccctggaggctttttgatactgattcgcgtacacctgttgtttgaaagctctcagcgggacaatgctgacccaggtgagacctggggcccggctgggtacctctatctgaatgagacgcttctgg

SEQ ID NO: 30030 - DNA, 2300 bp, Homo sapien
aagatttgttgtattatcttctaaatttcagaaatcagtcaaatattccaaattttatgtttttttcttttacagtataattaattttgtcaaactagtgggcattcctatttcaaggatcaaagtaattgctcaaagcaaaggcgtaacaatttgtgcttaccatcccgacaaagttttatttcccctttccaacatgctatgattcattctatttcttcttagttgttcctttctatagcttcagtaggaaaaggcaaccagatttagattcctttgccttttaacctcacagcatccctcccacaaaaaggaggactacatattgtactttgttccatcataaagcatcgagatgaattatactaaccttactgtattccaggcatctccgagttctttggaatactgtttttcaaaatgatccaacacaactttgcaaatctgttttgcaagcttcccctctgattttgctttcagctatgacgataagaaaaagttgctgacacacagtgatattacaaatttactgaacgtcaacattagcaaggtctttttttaagacaagaacactttttttggataattactagttcttgaaatggaagcaataccttacatgtaccaaaactgtacattatctaattatgaaaaagcaaggtttttccaaataattattttccaaatgtgaagcaaaggttaaaacagaatctactggggctgaagaaactgtcaaaaggaacaaaattaattttaaaaagtcactgtaggggctaggcaggtggctcacacctgtaatcccagcactgtgggaggcagaggcgggaggatcacatgaggtctggagttcaagaccaggttggccaacacgggaaacccgtctctactaaaaatacaaaaattagccgagagtagtggtgggcgcctgtaaccccacctactcagggggctgaggtgggagaatcgcttgaactcaggaggtggaggttgcagtgagccgagatcgcgccactgtactccagctggctcatgctttgcagggacgaggcgagaggatcatttcccagttcaagaccagactggaaaacatatcaaggacgtgtctctacaaaaagtaaaaaaaaaaaaaaaattagccaggcgtagtggcctgctcctgtagtcctagctactagggaggctgaggctggaggatcgcttgaacccaggagttcaaggttacagtgagctatgatggagcagctgcattccagattgggtgacagagcaagaacttgtatctaaacaaaactaaaaagtcaccggggatgctgacatcaagaaaaattggtgaaaggtatttgagaactctgtactatctttgcaacgttattttaaagtgaaaagttaatttagggagaaaagtcactccaatttcatcgtgaacttccttgcaattgtttcatttattcatccaagaaacgtgtattcaatgcctactatgtaacagacactgttctaagctcccgggataccgctgtgacacagaaaacaaatctcagccctccaagagctggagggagtgggtactagaagtctgcgagctggacggaagggactcagcattacagcactcagcattatttcagggcttgacagtaaagccaaagaaacgctgatctcgcgaggggacgaacaaaggtgatgttcccccatcccagcaccctccctcgccacctcggccgcgtccagaagcgtctcattcagatagaggtacccagccgggccccaggtctcacctgggtcagcattgtcccgctgagagctttcaaacaacaggtgtacgcgaatcagtatcaaaaagcctccagggaactgaaaaaaacagtctgacttccgggattcgcgggcatccactttcattctcacgtttcctcttcaatttctcgcgagatactgatttgctcgcgctatagaattcttgtcgaagaggcttagctcccgcgggagatttcgtgcgcagttacttccggtagctggtaaaggctgatacttcccaggacgcggaggtaacgggccagggccaaagcgactttcgctacttggattggtcggcgtagctttgggcggccggaccttagaaagtcacacatctgcgcgcctgtgcggcccctgcttctgcggatgctgaggtgggaggatcgcttgggcagaagtttgaggttgcagtgacccgtgatcgcgccactgcactgcagcgtgggcgacagagcgaggctttgtctcaaaaataaataaaaagtcgcatattgtgctgaaca

SEQ ID NO: 30031 - DNA, 2300 bp, Homo sapien
tgctggcaccctcaggctttgttagatacttggatcacagtatttacaaattagtttatatagttgtaaccacacccatctcctcacttctcccattaacactaactagacggcatgtaaactggacatgcagactgtcttgctctgtattccagagagggttatatagtgtatcaggcactcaatgtcaagaacccatacagtaatccatacattaacatcatcttaccaaacagacaaatcacatttctcccacttccatgcattaaacattccttatttttatatttaaataattttgtgtgtatatgcacgtgttcaaaatatacccagccatcgacataggaaagaaatatgattaccaaataaagtgtacctttggctgagataaagcagtgctggctttaaagatttgttgtattatcttctaaatttcagaaatcagtcaaatattccaaattttatgtttttttcttttacagtataattaattttgtcaaactagtgggcattcctatttcaaggatcaaagtaattgctcaaagcaaaggcgtaacaatttgtgcttaccatcccgacaaagttttatttcccctttccaacatgctatgattcattctatttcttcttagttgttcctttctatagcttcagtaggaaaaggcaaccagatttagattcctttgccttttaacctcacagcatccctcccacaaaaaggaggactacatattgtactttgttccatcataaagcatcgagatgaattatactaaccttactgtattccaggcatctccgagttctttggaatactgtttttcaaaatgatccaacacaactttgcaaatctgttttgcaagcttcccctctgattttgctttcagctatgacgataagaaaaagttgctgacacacagtgatattacaaatttactgaacgtcaacattagcaaggtctttttttaagacaagaacactttttttggataattactagttcttgaaatggaagcaataccttacatgtaccaaaactgtacattatctaattatgaaaaagcaaggtttttccaaataattattttccaaatgtgaagcaaaggttaaaacagaatctactggggctgaagaaactgtcaaaaggaacaaaattaattttaaaaagtcactgtaggggctaggcaggtggctcacacctgtaatcccagcactgtgggaggcagaggcgggaggatcacatgaggtctggagttcaagaccaggttggccaacacgggaaacccgtctctactaaaaatacaaaaattagccgagagtagtggtgggcgcctgtaaccccacctactcagggggctgaggtgggagaatcgcttgaactcaggaggtggaggttgcagtgagccgagatcgcgccactgtactccagctggctcatgctttgcagggacgaggcgagaggatcatttcccagttcaagaccagactggaaaacatatcaaggacgtgtctctacaaaaagtaaaaaaaaaaaaaaaattagccaggcgtagtggcctgctcctgtagtcctagctactagggaggctgaggctggaggatcgcttgaacccaggagttcaaggttacagtgagctatgatggagcagctgcattccagattgggtgacagagcaagaacttgtatctaaacaaaactaaaaagtcaccggggatgctgacatcaagaaaaattggtgaaaggtatttgagaactctgtactatctttgcaacgttattttaaagtgaaaagttaatttagggagaaaagtcactccaatttcatcgtgaacttccttgcaattgtttcatttattcatccaagaaacgtgtattcaatgcctactatgtaacagacactgttctaagctcccgggataccgctgtgacacagaaaacaaatctcagccctccaagagctggagggagtgggtactagaagtctgcgagctggacggaagggactcagcattacagcactcagcattatttcagggcttgacagtaaagccaaagaaacgctgatctcgcgaggggacgaacaaaggtgatgttcccccatcccagcaccctccctcgccacctcggccgcgtccagaagcgtctcattcagatagaggtacccagccgggccccaggtctcacctgggtcagcattgtcccgctgagagctttcaaacaacaggtgtacgcgaatcagtatcaaaaagcctccagggaactgaaaaaaacagtctgacttccgggattcgcgggcatc

SEQ ID NO: 30032 - DNA, 2300 bp, Homo sapien
ctgtctggttttttttagcagttgcctgaaggggtcaggtacacaaccccaaagttggtagaagttaccagctcttgttgtggactttaaccaatgagagaaagagacaaaaagcagccagcagattgttcttcctccttcctccactaacctccagttcctgagaaggctctgtaatttcaaactgtagagttgccctgagagactgaccaaagctctaggcagcttgattacaaatcctcctgtatctatcatgctacttccatgatttacttccttttttctctcacttttgcttccttagaattgcaccctgtccataccatgaacttctgtcttacattgttttctagtgatctcaagctaagacgagggcttttagacacctatttaagttccattagtgagtcctccaaaagacacccaaaataaacatgaaaactagctgtacagatgtgctttaagatgattttctactcctcttctcaacaaaattgatgccatctcctgagtgtcttccctatagaaatatggagccctgggcctggcacggtggctcatgtctgtaatcccagcacgatgggagaccgaggtaggtaggtcacctgaggtcaggagttccagaccagcctggccaacatggcgaaaccccgtctctactaaaaatacaaaaatttaaaaatacaaaaattagccagacgtggtgacgcacacctgtaatcccacctacttgggaggctgaggcaggagaatcgcttgaacctgggagtcagaggttgcagtgagccgagatcatgccactgaacttcagcctgggcaacagagcgagactgcatctcaaaaaaaaaaaaaaaaaaaaaaaaaagaaaagaaatatggagccctcgtagtagagaaggtaagccatacacagaaacacctctcatgtgagataaataagagaagtactgagtatgtttgggaaatggagtagtccatcaagtttggtagagcacagagtatactggggaaatagtgggagattaaaatggaaacattgtcctgaggtctggctattatggaccttgatttaaggactctgcatttgaactttactcagtggatgatgggaagtcactaaaagtttttttttttactttttaacagtggaatgacaatcagaaaaaaaaaaatatgtaactgggcatgtccctgtggagacactgaaagcctgtggagttgttaaaatacatatacacatacatatacatatatgtatgtgtatatgtatgtatgtatgtatttgagcaaaggctttacaatgttttttcccttctacgttaaactgtaatgttcagttagttctctagtattgttgccttggtaacctgacagagattgtcactatgatctaggcaagattgcttatgataaagatgaccctgattggtaaactgcatgtgggctgggagaaagaataaataacccctagagacctgatagaggtgccatgctttgggtcttctgagtgcagtgattcttataactgggcatgtccctgtggagacactgaaagcctgtggagtttttaaaaggaataatggttcctgtgggacaggaagcttttaagccaggacagttcctgcgtctgccgcaatgtgagtttcatcttcttgcacctgaattaccacctgtgtttactcttaagcgttagttctttagagtgagagccatgtctgaggtattggttgtataacatatctttaggaatttataattttttataggttttacctctaataaaattaaacttggtggagcaaatgctgagagcttctgagagactgtgtaggcatgactgttgtaaatgttttatgtagtaggtatgtgcatctatatatacatacacatataccttatttctgtttttaaagcataagaaaataataatgtttacctctgagccctatttctgcataattatgatgagttaatttctttctgaaatttatttgctgaaaagtagaaatttaacagttccattgccttcatttgaaactttttaatcctttttatttaggttatcttcattgtaatgaatatgatagtctgagattgaggtggctaaggcagacgttggaatctttcatcccacagcctttgataaatgtaattaaagtgtctgaattggatggcagaaaaatgggagatgcccagcctgaaatgtttgacaaggtacttttattacattgtgacaaactgatggacgcccagtaataccactattatgttgctttgtggttgttattttccatctgttc

SEQ ID NO: 30033 - DNA, 2300 bp, Homo sapien
cagggaaggcatcagtgtagagaactcagactcacttcacaatactggcccacaggaatgtgtgatgttatctcatgtacataaatagactctaaccttgcttttgtgcaaaccaagcttggtaggcacccaggaggaccgtgggtttgtcttgatgacagggcactgcaccacactgctgctaaaccttccagccctaggaactcacctgctaccatccccttacactcccttttaggcccttgggctttttcccatccaacacctagagcctgaggcctgccaaactacctagcttcacatgactaattgcagtgactaacttcatggcttcctgcaagcaaggtccttctgtatctgtctctttctctgaccccaatatgaaaacatttctgtaaatgtctggcacctaataaacatgatggttgtggacaatgtcacaagtacacaggaagacccagtaacaagacatgcaaggtgagggcaaggggcgctgagctgctctagcatttcaaaaccaggactgtagctttccatacattcagcggggtaggagaagggatgtgcagagctgatgacttcactggctcctcagcagcatgtacattcaaattgaagatgtcttgagagccccactatacccaaatcgtgagtctggtcactcctctagcagagcttggtgcagtgacagctagaaaagctgagttccaattgagtctgttgcaccagagttcttttgaagatgctcagcaaagtaattattttcttttgagcagatgtacagcacatccatgagaaggccaagtaaaggatgctctccagcccagtcaaatgatccaatccccctactatctcagacccctctgagtttcttcctatggccgccctcactgtacagaaatagcggagcagcatcagggtgagtcatcaatggtgggcagccagaagaccatgctggaacacgcactggcaaaagtcatgaacttggggttgaactgcaaacaggtaattgggccggtgtgtttaccatccaacacagctacttttataccactctctccattccagacatggatcttgccatcctctgaaccaatcataataaactgagaatctggagtaaatgaagcctccagtgtgacagctttgctgttggcataaccctcaaacgtgtgcatcaccactcctttgaaagcatcaatgagggaaatgaagctgccgttggtggaaatgaggatgaccttgccatcgttgctgaatttaagtcctgtccactcacaagttcgattacactgcatcctaaaggtagtaaatggccctttatcaaaagaacgaaggtcgtaaagtttgaccatctcagagttgacacctgcagccaaaattaacccttctggatcaaaagaacaaactggcttcccctgtagactcatgaggccctggcagttaggagcccggagatcccagagtcgaatggtcttatcaagagacccagaaatgaaaatgtcatccacaggtgacatggacaaggccaccactcttttgctatgtccaggaaagtatctgatgtatttgttgtcatgcaaggacaagtaacgaatagtatcgtctattttgttagagctgtaaacagctgtgtttgcctcatgagtgtatctgatgaggtccacgccatatttcttactgtacagggttctctttggtttgccctcctggcagtcatatagcacgatggagtcgtcgttgctgcttgagatgaccgtctggccgttggggctgaaatcgaagcagttaatcttgtccgagttttcgcaaaacaccctggcgacgcggaagctccgcaacacgctgtcggtcagcttcatggcggcgggtggggaaggcagccgggactggcagcgggcgggctgctgaggggccaacccctggtggcggcggtgttgagccggtggctagcgagaagtcggccggcagtggggccgcctccttttcttcctcctgcttggacgactgtcttccgcctcaactgtggagcctcgccgaccgttagtcctcacagacacctcaggggcaaccgacgcagcgccacctcatcgtgtccgccatcttggggcgacggccagaagtccagggctaggagcctcagccggcggacgccaggaaacaggtagggatagatattttcattgaatatgaaacgcaggattggaagggatttttttttccctaatggaaattttaggatttttaatttttttcatgtattttctgttgaaattcatctctcttattattgctgtttt

SEQ ID NO: 30034 - DNA, 2300 bp, Homo sapien
atatttatataaattaaatataaataaatattagaagtatctttatgaaccaagatacacacacacacacacacacacacacacacacacacatacacacacacacatggacctggacctgtgccggtggtgattgtcatgaagagcttctttgatgaggagcggaatgcagagcagttgagtctatggagacatagcattcttagcatgatgctgccacgatgcatgccagtcttcaaagcttagattagggtgaaaggccagcaatgatcaataacgtgagaaaaatgtgggtcttattgttgttctcttcaaatcacaataataattgttatgggcaaaatacgctatattcctatgaggctaaataaagtagacaagaggctaccaacatggatgcagttaaaaaattattttcaatgacaattaccgttatggaacctctgtggtatttactgacataaaacaaacaaaacacaaaaggtgccagaaatttaatatagcaatagttgaagagaatatagaccattttacatcagaggaagaagtaagtctgctggagaatggaaaagttcaaaacactagtgtgctcaatattcctcatggttggcagagactggtcatttgaatgcatttgaagaaaggagcccggaaactcagaaggtatattgtaaaatgctgataaaagccagtaagtcttaccaaatggcatagcaagtggtattttcttttagccaaaatctatgaagcaatatgctagtctatctgtttatacattgtgtgaagaccaaaggtctgtgatctgggcattttcttattcttttttcattattactttagagactaggtcttgttatatttcccagattggtctcaaactgctgggttcaagtaatcctcccacctcagcctctggagtagctggaactacaggtgtgtgccaccatgccttactgaagtggataatttgaagtaccaaaggatgtagtaatcgatggttctacacattcaaaagtataatgttctattctcagttataagaacagaatgaaaaaattcaattaatgtaataatgaaatatgtatatttgattaaaaacattgttgacatgcgcagtgtatggaatatcattatgtcataagtaatgacatctagtcaattgtgataatttattttaaaagagtaaggttccaattaaatcagaaaaaatcttgctggagatgaaaaagcatccagatcatataagagatttctgtctgaaagaaacattcaaaagcaagtgtttagtgaataatttatgaataatgaaaaagctgacactgaaatctcaaaaaatcttccatttctcttgaagaatagggtgaagattcttaagagtagtgtctctgtcactcctgctgttgaaaaaatctccatgatcttcttttagaaaaaggaccttcacctaactcaatgtggtctgaagtgcctgcaaaaactttgattccaactttttttttcgtcatttaaatcttgaatgggaacacatacggaagtgaacataattgtgacttgacacttttaattttaattggaatgctagatgaaaaactaatcaaggaaatccaggaggcttctcccatttctgaagaactatctagagatgtttggaaccacagttgcttttgatctgtgccattttgagccttctttgatgaatgatgtcaaatgccttttttgtttcactccctttgaagaaccatgccattattcatcaaagcccaattcaaccctgatgttttattccaatatgtgtgccaagaagagatctggatgttggataagtgcctctctttattctaagtgtgggaggggatttaaaatatcttgaaaaagagctccacaacttttctacatttggggaagcctcagcgatgagcaattaccagtaatttttttgttatatatcctaaaacattcagtttcatagcattaatgcaatcgactgtaaggtgcaattttactcataatttaagaaaaatgccaaggaatgacagagttattttgtaaaaactctcctcccattcatgtggggatacttcatttgtttggaaagaacatatgtctttgatgtaagtcatgatagtacatctttaatgacagttttcatgatgatgcttttggctcaacccatagactaatccagcgatgaaagttacagctatcatgtttatgtcttctgcttttaatgagactcatgtgtccagaaatgctatctctgaaatattcactgggtcttaagaaacatttggaaatatttc

SEQ ID NO: 30035 - DNA, 2300 bp, Homo sapien
tatgtatctaaaatttatatgtaatatataaaaaaatttatttatatctataatttatatataaaatataaaaaatatgtattttatttatatggaaaaatatatatttatgtatattatacattatttatataaaagatatgtatttcatttatatattatatattattaatatattatatattatttatgtataaattatatatttaatttatatattaggaatatatattttatttataaaatatatttttaatttatatacaaaaagtgtatattttatttatatgtagaaatatatatattatatatatttatttatatattttatttatatatattaaatatgttttgtttatgtataaatatatatacatacattttcctgattttatttggggcacacccgggcgagagctctgcctctagaagaaggtgttggatctcttggtggtgaagtgtggcttgtgctgatggcgcaggacccagtggggcagtgggaactggatcttggagtcctggaaccgcttgacggcaggccggcgggcacctgctggctgcgatctcctccaccttcatgatctggatggattgggccagggcacggtgctgggcgcccgtgtttcggtagcactgggtgacagcgcccacgggggtcaggtcccggtattcccggtacaggttgtgggtgccgctctgggagtcatagcccagccagatgccgaagttcttcacccgcaggaaggacgtctcaaaacctgccaacagtagacaatctcccctaaagacttcatcttctttaactgatatgcaaagtaccggaagggagacttggcaacgacatgattaggcgcaaagattcgcatgcggtagatgggtggtctgtggcatttgggggcagacagacagtgacccaccaccttgtactctcctagtgtgcccaaggcctttgtggtgtcccgtctgtgctcgctgccactcgcaaaagtgaaaaatatatttttatatagatgttaaatctagtctgttaaatgtcaaaagagacttctcttttgaataaaaaaaatgaaaactgagtaatttctaaaaaaaattcaagagaacaatatgatctgattttcttacagttttctagttataaatttattctaataattcagtgtcttagccatcttttatttaattttattattattattttgagacaaaatctcgcactgtcgcccaggctggagtgcagtggctcaatctccgctcactgccacctccacctcccaggttcaggagattctcgtgccttagcctccggggtagctgggactataagcacccgccacaaacctggctaatttttatatttttagtagagatggtgtttcaccatgttgaccaggcttgtctccaactcctaatctcaagtgatctgcctgccttggcctcccgaagtgctgggattataggcgtgagccactgtgccggccagccatgtttacacagctaacataaacatgtaatacacaattctaagagtaaactgaaaaaataatttttctattctacttaatgttcatttgaaaaccaaatgactactgcataagaaattcgtattcaaaataaaagagcatatagattttacagtttatacataaggcgtcttatttatataatctcatttaagtttaccaataattaccttagtgacattattatgaaatacttaaaaaaatttagctccccatgagggagcttatgaaatttaagggtcgaaggtggatttagcagtaaactaagtgtagagtgcttagttgaacagggccctgaagcgcatacacaccgcccgtcaccctcctcaagtatacttcaaaggatatttaactaaaacccctacgcatttatatagaggaaacaagtcgtaacatggtaagtgtagtggaaagtgcacttggacgaaccagagtgtagcttaacataaagcacccaacttacacttaggagatttcaactcaacttgaccactctgagccaaacctagccctaaacccgttccaccttactatcaaataaccttaaccaaaccatttacccaaataaagtataggcgatagaaattgtaaaccggcgcaatagatatagtaccgcaagggaaagatgaaaaattataaccaagcataatacagcaaggactaacccctgtaccttttgcataatgaattaactagaaataactttgcaaagagaaccaaagctaaggcccccgaaaccagacgagctacctaagaacagctaaaagagcacacccg

SEQ ID NO: 30036 - DNA, 2300 bp, Homo sapien
gtggcaaaatgagtatcaaagtcagattttactcttaagtgccgatatataaactccacacatggtatctttttagaaatgatttgcatacatttaagttggtgtggacacaccttcaaagagaggcagaggtgtatgaattcctaatgagaatgagagtatagtcaccaatcagaacccttcctcacattctccaaatcgcttgtatttcaccatttctctccacgcagcagaatttttgacatgggacatttcttgctctcattctttctttccttccaatttactgtaaggcattaagtgaaacttcttcagctatggtgtgtggcacaaaaacatcgcagcgcaggaatgcatggaatagaagggtcctttcccttccagaactctgtaagcgtcaaacgccgacccttggctccatctcccgctcccctgacctcttgtcactgtgccatttccctcctgtgctttctgcccacttggaaaatatcgtatatcctttacaagaccgctactttctctcctctgttcacatttctccattaccatccacattttctcaaaacattccgacgggttttgaagtggggttttcaacctccctcgactgtgatagccgaagtcccttcaagaaagaaaaatgatgttggaaatactagtaacaaataaagtatcacggaaatccccacccaagcgatacggtttccttgacgcgcccttaaccaaggcgttaagtttagcctgacagcatccctccctcctttcggttcctggcctgatgagccgcctccacctgcgagcggtgcaggcatttttgttgtcgactaaccccctctagcgccgaactggcggcatccgagccgcggctgccaggccgggagaaggctgggcttggccgggctctgcagcgctccgggctccgtccctgccctgggcgcccgcctccgccgcggggcgaggtggtggagaccgcggacgccgagggtcctcccagtcagcacgccgcgttgccccggccctggggcgggggccgcggagtcccaccaagtggcccgcgcctcggcttccgggagacccgagcgcggggagggagtgggtgccgcgagggggcggctcgcgcggggagagccgtcagcccacggcgcccctgcgctgctgtggatgtggccacgcgccactcggcccttggactgctaggagagcgcggcccgacgccaccacgccgtggacgctcggggacccctgaatcccagcgtcaaggctgcgacgatgctcgtgacctccaccgcgaagtcacctccgcaaggcgacgcaaggacctcggcgatcccgggcgccgtacacccgccactttccagcctcatgtaaccccccctctgctgcttcctcccggcgctttgcttttctacaactggaagccgcgaaggcggctactgcgctgagccgctcgctctgctggtcaagtttgggcgacccgcgcggaggagggtcgggctgactgccgccgctgagctgtccccggacgggagcgcctgtccacggcactcaccccctccagcggtggaaatgtggagaagtaagtgggaggcggtgtcgggaactgactcctcttaaaacggtcggcgccgctgctctgaaatgggcggctaagtgcttgtgggactaagggcggcctcagagatgcccggaaaatcgctgccacggccagagtgcggcgcagacgcggcagagttggaggtgtccgcggtgcaggctgctgcccacgccgctcaggccaggtgctgagggctcagcccgcgcctcggccgaaccactctcagccccgttgagccacctcgtccgcccggctttcatcgcaccggccagaggaaagttcccgcggcccccacgcctcttcacagctgcagcgcctcccctgcttttggctccgcaagtgcccacttgagtcgggagaggtcctcgggccgccccaactgcccgccccacctggcagtccgtccccgcccccgtcctcgcggtgaggcgctccccgccccctcgctcccctcccccaaaccacagcccgagctcgctcttgcgcgcgcgcgctctctccggcccaagtgaatagtcctcgcgcaagcgggacactgtggtggatgcaattcccctcgcctccagccgcgaggagctccccggcgccgcaggcagcgtcctcctccgaagcagctgcacctgcaactgggcagcctggaccctcgtgccctgttcccgggacctcgcgcagggggcgccccgggacaccccctgcgggccgggtg

SEQ ID NO: 30037 - DNA, 2300 bp, Homo sapien
taagttatgctaacttttatcatcaaagttgtttttatctagcatttatgtggctgttttaatacttgacctaaactactgacatcagcaggaatttgtaaactcttctaagaatgcataaactaaatgtaatactcaattttttggttgttgtttttgtttttgtagaaacggggtctcactatattgccaaggctggtctcaaatcctggcctcaagtgattcttctgactctacctcccaaggtgctgggattacaggtgtgagccaccacacccagcctcaaattttcttataataaatatattttttcctctccattttccccctttcaagtcattttatctatcctcagtagtccaataaatatgtattctttaaatgttttgctctctgctatttatatttctgagttttttctatccgtatattgttattaccaaatttatgtgtgattttaaaattctagtaaatgatctaaaactttaagaatgaatgacaaatttaaagttgttgtttgactataatatacttttaacaaatactattaagaaatgttggaatgaaggcattttcttcagggccaagtatcaaactttaaacacttaatttttagttgaacatcattgtaaatatttatagagtggtaaagcacagaagaaaaatctgtatctcatctatctacaggtaggctacatgaagacagacgggaaagttaaaactgaataaatatcaagaatatgtattaaaagatatttcagcacaaatcttagtttctgtatagcatactgttttgtaaaatatttttggcaagtaaaatcttggacattctccacaatgttcctaagaaaacaagtatgctatactgacataatattattacatttaggttgtagaagcactatatgctagcaaaagtaatttttctcatctcccatttgaattgtcattaatttatgccaacaaacttttaattgctctaataatatttaagaatttaaaagctaagcttatggagcaattaattcattttttaattcaatcatttggacaatatatcatgagagcctacaatatgctaggcatactgtattaagtagttggaatataaaggttaaaaagcaagtaaacacaacattttttaagacttgtcacagcatctgcaagatgaccttaaggcatgagcctatcattgccctggaataaatgcaccacccattgatagttactcttaaaagaaagaaacaatgctacgttacacacctgctggatcctgtaaaacagttttacatattattttggtttatcttacaacaagcttgaccctttgatataggtataacctttccagttttcatagatgaactgactacaactaggactctattggtctcattctagcaccagtattttcaaaagatcacactttaataattaggccattttctctaacagtaaatatcactattaaaagcagttcgttatctatatatgttatctattttattaaaatcaattacgaatgtttaattccagatcaatattcctctatcatcagtgtacttctgtgccttctcctactactgttcaatatttaatgttcaggaatgcattaaatattcattttaggtgaaacaaggtacacattggtaggaatatatgaaaatagtcatgaatgcatttcaaagtgatttggggttatctgtaattttggattactgggaataatcaagagttgattgtagtaaattatagtagtagaatacttaatgatacgtccccagaaatgcagtcaaaaagtagttgtgtacatggaataactacttctacatttttcttacttatacatattttgcaattttgccacaacagtggctaatttttacctaagaaaaacattttagagcaccttacccactagcttaaaccaccaaggaacttcttaaccctttctactcacccctcaccattagaaatttcttcttgtgcattttaatgaatgcgagaaaagacaacaactctgttggttgccaacaacagaacccagctgccactactatttaatgttgtcacaatggagaatccaaggcagagtggaacttcccagcctcagaaaggcagaaaccaggaaagctaaggttgttcaacttcagtgatgtttctttgtcatgggttcagtgaagtttctcatcatgggttcatttacttaggaaaagaattatatagttattctagcttgctcttgtttctgggacagttggccagccccatcttacattactggtagattatagttagat

SEQ ID NO: 30038 - DNA, 2300 bp, Homo sapien
ctcccaaagtgctgggattacaggcgtgagacaccgggcctggcagcctttatgtttttttaagtttaatattttcaaggctaacatttttttctagattattttactgctttatttcataacatttatctctagtaataagccatctatcaactatacttatctaagataacgatttgactagctacatttttgtagaagaattatctatctgccttgttttcctgaaaagttggatgctcaatatgtccattttatttccagttttcaccaaatgttttatattaagccaaaagagatgaactcaacctagaggcagaaaatatcaacttttagcaggaaaaattgagtctgtccatgaaagttttctgaaatataacatttctgccgatcgctaagaaaaaaaaatgttatattttggccgcaagcacattagcttccatctcttacaagtaagtcacaacacccaggcacacagaaaagtgttcaacacctccctgtcaatgcattcacgattagaagttcagaagttaaagaaccaccatagttacggtttgggtcaattttgtttacacaataaaaagctcaagacaaaagaagacaggacattatttattgaacaataaatatgtgccaaacatctgtatttctgttatctttaatactcagaactaccagataagataaatactatatttttgaaggtgaggatagaagcacggagaagggtaaattgggctaagaccacacagtaagaaagaatgtatttccatactccatttttacaaggacatttatatgttgatatgcatccatagggtctttgttttgtttttgtctttcaacaagaatcactaatccagagccgcttttgttttttcgctgtaaaaatgacaattacatttggaaatttggagaagtgacaaaagataaatcaccccataatcacacgcttacaaccgtcccccctaccatattactttgaaataattccttctagtctctttttgcaccctcctagtccatttaataggccaaatgaattgacaggccaaagaacaggcagtgcagtaaacatacactagctagttgaaaagggtcgcgcggtggggggcagggggtcggaaatcctacacccatgcaaacaaaaaaaatgaagagatacaaacccctatttgaagaatgaggccattcgctgggggtgaggttagtggagttgggcagattgaaaggctagatctttaaaatgactgcatctgtaatgtgtccgttggaaaacgcagtaataaaagatgtggggaagggtatgcctaaatattttctatttgaagaccatttgtgactatgactataaaatccaagtgcaatttaagaaggtggtcaactttaagtattgactattaatacctttcctgaccacctgccgatttgattctggagactgtaatctactcacaggagattatgcctggtagaaatctcttcgggagaccacacaactaagaagcaggggtacaggcatactttattagccgaataacaccttttgactttttacaccagttctcccctctaccttcctgtattaacagttttacctctacagggactcagggtgggaggcctatcagaacccagagaagagtcggtgcgatgggcaactggggaactccggcgcacatcttgccccaggggggacagtatcgtcttgcagtcgttgccacaacgctacgctggtgcccggtaacgacactctccgcgccacacccagcgccagcctcttggatccccaggaagaccagggccgagcgacaaacacgcagcacacgcgaacgccaaacgcttcccagaaagctgtgcgcgagcctacaactcccatgatgctacgccgggaactgcccggctcctcgcaggaaataggcagctcaccctgccacctgtgcacacatttttcttcaatgtatagttcctcggcgcgcctctgaccttttcccggagctcttcaatcccagaagctatagcacaacggctgaatcgccaggacccccggggaggcgtggcttcaggaccggaagaagctcctgttgccaagggaacggtgcctgccaaggcgcctgctcagcgactgatgcacagactgctgcagaggctgccggttttcccaacttctagagacggctttgctcattaccaggcatccttcccatgtaggcatcgagaagaaggctgagggaccctcgcaccagatttccatcccggagaccgatacgagtgcgtccattcctgttgccagctcctgc

SEQ ID NO: 30039 - DNA, 2300 bp, Homo sapien
tttaatgaatgagggttctcctgtgcccattgaaactgggaatgtcaacattgttggtatttcctatcagcctaggaagtgtaaagaagaaaatgtgaaaaaccatgttgaggctgcaggcaggaagagtcctcctccttccttttgccttgaatatacatctgcaatttttgaattcaaagaagttctttctaatagtgaaaaatgccaggttcttccaggttctgaagccagtggccctcacttaactgggttggagctattgagctttgactctggaaacctctctaaggattgcagttccattttatctcaagaccctaatagagtagagttagtgtcttcaaacactaaagcaaatatgagcataatagagaagtctgattctctttccttggaagccaaaactgctaacattgtatcaaaagctgaaattgatggtcagaacaatgttcttgtggagtcacattctggaagaggaaaaactatatccttgtccaaggtatctctttcaaaagtggagcccagaaacatttctcaggataaaatgtcttcttttccattgaaaattacccatgttccagaaaagcctattttgtcagaattaacctttctagaagttgaacagggcaaacgttttcaatcaattaatcataatgagataggagagaaatgttcagatgctggccttaaagagaattgccaagctgagctttctcctgctgcctccaaatatgaagataagccagaaccagaggtagatgccttaggctctcctcctgctcttcttaaaagtaatatatcttggattttaccacctattcatgatgaaaaaatcagtaggcaaatggcgcagaattgtgaagctcacacttgtgtgtttcatcaatctttggatatttgtgggactaaaaagatttctggtcactcagaaatggcggaactcagcttaactaatatttcccctaaattccaagaaactggcagcatgaaagtaaattcaccttttctggattctgattccagtttggaaaaaaattcttctgcatctgaggactcaagcttccttaaagtaccttctgtgctgaaattggaaaagaaatcctcatcttacagaaagaaagagaacatccattttttaaatggtggtattgatagtgtgtcatcttcctctagttaccctgaagaagttagcatgatagtaaattcacataagccccaaaataatttggattctatacaagttaccaaagatctcacacatgaaggtacctctgtaactaacctgttgtaccctactacctcttatttggaatttgaaacgtctgtctcaattgggacagaagtaaccccatttcaggaacattttgggatttatactgggaagatatccattgatttcccaactgctgcccaatttgacaatctcgtggaagcagagactggagcagttgctgggcctgcagcgtcagttaacagctcaggccaacagtgttctgaagcctctgctgagcacatagaagccaggagaagagcacatgaccaacttttggacctcaaaagtagtttactcaaaaaggccgatacattgattggtgagatttttaattctgtcagggaagaactaaaattcaaacacacagtgagtacctgccaggagcatatagccatagaaggtataatgaatctgggtaccctgaaagaagacatctctgagaaaaacccatcagaagtgacactaacagaaatacaacagacagagggtttggaagagcaaggcatggaaaacatgtcagaagtcaaagagaagccctgtgtttcaccaacagttggtgagaagaatcttcttgttgatcctaatagtatgaatgtatcttgtttgttagaagataaagctagggaattagtcaatgagattatttatgtagcccaagaaaaattgagaaatgatacttttgaagatactgaggatacttgggattctgaacttcaggctaatacttcaaaaattctgaacagtgatagtgttaagccacatgatgtagttagagagttcttggtttcagaacagccagtaaatcaaagcacacaaattagtgaaaataaagtattaaatgaattcttctccctaagtaacttagctagtggcacagagtcaattaagggaggagaaattgttctctaccaaaaatccctattttctggaaatggatctggactgtctgatagtataaatttgcaggaatcagatacggttttactagctgaagacatgtcacataaacggttagatgataggg

SEQ ID NO: 30040 - DNA, 2300 bp, Homo sapien
tatagccatagaaggtataatgaatctgggtaccctgaaagaagacatctctgagaaaaacccatcagaagtgacactaacagaaatacaacagacagagggtttggaagagcaaggcatggaaaacatgtcagaagtcaaagagaagccctgtgtttcaccaacagttggtgagaagaatcttcttgttgatcctaatagtatgaatgtatcttgtttgttagaagataaagctagggaattagtcaatgagattatttatgtagcccaagaaaaattgagaaatgatacttttgaagatactgaggatacttgggattctgaacttcaggctaatacttcaaaaattctgaacagtgatagtgttaagccacatgatgtagttagagagttcttggtttcagaacagccagtaaatcaaagcacacaaattagtgaaaataaagtattaaatgaattcttctccctaagtaacttagctagtggcacagagtcaattaagggaggagaaattgttctctaccaaaaatccctattttctggaaatggatctggactgtctgatagtataaatttgcaggaatcagatacggttttactagctgaagacatgtcacataaacggttagatgatagggtaaaaacacatttatttcgcagtgaggactgtaatgagacaatggaaatagagaatgtggataataacaaaactgagacagaggacagaagaactcttgtattaaatttcaaatggcctccacttgtgaatgatgacatccatgcacctggtacatctaaaagcagtttgtctgatagccttgtatgtatatctgaaaaaaacttgccaggacacagtaaaaacacacctcttgcaatgtcagatgtagggaaagtacacaagaaggataatgaaataaatatagggaaaattgaacttataccttccatgttagaaacagggaaaacaaacaaaaaggatgctgaattgaatattctgaaatatgaggcagtccctcctatgatagaaatgggaagaatacataaaatggatgctgaattgaatgtcacgaaaactgagccaaaagctaatgtttttaaaatgggagaagtataccaaatggatgccgagagctgtattgaaaaaactgagggatcagctgtcattttaggaatggaaaaagcttataagatgaaggatactgaaggggatattggcaaaattgaggtgatacctatgatgccagaagtgaaaaatatccaccaaaaggatgctgaaggggatattgtaaagactgagatgacacctgttacagtagacatggaaaatatttaccaaacgcatgctgaaggggatattggcaagactgggacgatagccttgtcagaagtggaaaatatccaccaaaaaggtggtgaagggattagtgaaaaggctgaagtgatacccgttacattagcaatggaaaatacttaccaaaaggatgctgaaggggatattggaaaggctgaagtgatgcctgtgaggttagaaatggaaaatacttacccaaaggatactgaaagagacggtggcaaaactgaggtgatgccccttgcattagaggtagtaaatacttaccaaaaaaatgccaaaggttttaccgggaacactgaagggtctgtgttgaaaatggaagctacttaccgaaagactgctgaagaggtcattaagaatactgaaatagtaccgtgtgtgttaaaagtgaaggaagcacacgagacagcacctgcccccttagaaatggaaaaagcatgcaagagagatgttaaagagactattggagcaactgtgtccacaccctctgtgatagaaatggaaaaaatatccccagaagatcgtggtgagaatattgggaaacacaaagtgttacccgcagtggtagacattgagaaaatacatggaacaggactagaattgaccactaaacaaggggaggccatgcttcctgcatttgaaagtaaaacaccacaagagtatgctgaagggagtgttgaagaaacaaaggaagagcctacagaaataaaggaaggcttgatagcacatgaaaatagacttcctacatatttcaggggatatgaatcccctacattaagtaaggattatgagggctacccagccccagcaatgccagattttcaacctggggataccacagtaagactagacaaaagaatgtctcttactgcaatatatgacaagaggagagagacagattatagtgacaaaggatataatttagcttttgtttctcaagatgaac

SEQ ID NO: 30041 - DNA, 2300 bp, Homo sapien
gtttggtaactctgaaatctgaactcaatttggtaactctaagcattgcttaatggaacgaatctttaaaaaacaaagcagaaacattgagacaataatttttccataaaatttatgattttcatgtcattaacagctttttagaaaaactttttaaaaaaaaaaagggtgaggagaaacaatatttcctttatgttttctttgtgaagaaattcaactcaataatgagaacagtgtaactgtatgtccaggacattgagaagactggactgtgtgactctagttgatttcaaagccaaattatttttttttttcaggactgcagcattccagaaatagagcttttcccacaatctgacccagcctgttgtcctgtctacatacagagagcagtccccaatttggaagaactgaatatctccaaatctgtgtccttcactgtgaagtcaggagtgtacgtatcagttcctttttattatagtgattgatggccaccaatttcatatttcaatagatgacatacatttttctaaagtttctagctaatgtttatactctcagtcacccaagaaagactgcaggggttaaaagattctttggatctaattagagctttgatatatgactcacaggagcaggtatagaattctgagatgtagttcttgatatatggatctattgtcttttcatccaacaaattctgtgattgagaaataaaagcatgtccctggcctaaaattttggagcctgaactatttctagagtgtctaagttctgatagtcactgactgcctctgtggtatcaggcacatatggcttttttgtttatgactcctctgttcctgaaaggcagatggtgttactctcatattatatatgagtgatttgtcccaggctactagccggtaagcatggatttgatactaggcctctctggttctagaggtatctgttaggactatgggtctaagttcagtcttagttcattcccagattgacttgactccaaaccctgtggatatctggctcaacatgaaaccctctgctccctcactgtttttgtttactttgatgatggttggtatacaattctggggacactgtaggacaacatttttgtctcccccacatgtgaattagaacttgtgggcaggctggccatgtgtggtggctcacgcctgtaatcccaacactttgggaggccaaggtgggtggatcacctgaggtcaggagttcgagaccagcctgaccaacatggagaaaccccatctctactaaaaaaatacaaaaaaattagctgggcatggtggcgcattcctgtaatcccagtaacttgggaggctgaggcaggagaatcgcttgaacccagaaggcaggggttgtggtgagctgagatagcaccattgcactccagcctgggcaacaagagcaaaactctgtctcaagaaaaaacaacaaaaacaaaaacaaaaaacaactttggggtaggccagtaattggctgtgtccatgaggaatgtctgtaattatcaagcttagctggaagatgggtcttttgggaatccaattgcaaatactgttccttaggcagccaatagaactgatattgattctgaaaacgtggctcaaaatgtaaaacaccttgtggaatccctacctctgattgttccagtttaaaaaagaatggaatatagtgaaattgtttttgattttctaattatttcccacttgaattaaaggtgccacgtgttttaggtatcagaaaaataaaagtaatgcctaatgattggaaaatgtatcagacttattataggacagatagcttattataggatggataatgtgtgaatgtaaataacatggtaactattatcgttatataatgtctggctctcactttgagtgtgttttactagtgtaattctgtgatggaggattttgtttttttattttggtagccctttttacttacagaaccagactaaagcagtactattatactttaactaactatctatttttatatagttggcttgcctacccagatattaattttaagggacaagctacagttctggaggaagaccatgggctctttgagatttctacagcagaaatgaaatcattacatccgcttcaaatggtaagcaaatttaaaaagaagcattccttttcccaagtacccatgaatccaaaattaaataaccatgatgtttgctcatgcatctcaatctcaagtgaatatgtgtactactgaattggcaaactattgtactgtagtgccttcagtatttacagtat

SEQ ID NO: 30042 - DNA, 2300 bp, Homo sapien
ctccagctgcgtgctgagagaaccactgctctcttcaaagctgtcagacagggacatttaagtctgcagaggttactgctgtctttttgtttgtctgtgccctgcccccagaggtggagcctacagaggcaggcaggcctccttgagctgtggtgggctccacccagttcgagcttcctggctgctttgtttacctaatcaagcctgggcaatggcgggcacccctcccccagcctggctgccgccttgcagtttgttctcagactgctgtgctagcaatcagcgagactctgtgggcgtaggaccctccgagccaggtgcaggatataatctcgtggtgtaccgttttttaagcccgccggaaaagtgcagtattagggtgggagtgaaccgattttccaggtgctgtccgtcacccctttctttgactcagaaagggaactccctgaccccttgcgcttcccaagtgaggcaatgcctctccctgcttcggttcgcgcacggtgcacgcacccatgacctgggcccactgtctggcactccctagtgaggtgaacccggtacctcagatggaaatgcagaaatcaccgtcttctgcgtcactcacgctgggagctgtagaccggagctgttcctattcggccatcttggctcctcccccttcttttatttttttaaagatatttctatgcaggagaaatgtctctgcattttttggaggttaaaagtgatttgctttttagcctcacattttatacatctttaagttaaaaaacctaagtatgtcttggtttggacttcatttctttgctatcctctatatctgctaggactacagcagaaacttgctggatcacatctccttaaggcaagaagtcccttgatgttttaatcctccaaatacagtgtggtttcacagtaggaagtggtgttgtgcaagccacagatgatatggggaagtagttttctcacctccctgattttgactgatctttgataacagatcaagtaaggtcagagcagaatgagataaccaagaaacaattctaagtagaggcctttgggaagacgagggaggtgaacattagctgctcagaaaagccttatcctcgatgacagcatgagcagatggtttgttgtgatgttctgtgccctagtgcaggcctgtcagtgcagggtggacctgtgggccatgttgttccaagtctccagtgtgttatgaaatttttacgggctctttaatttttttcattcctattgtagattcaaggctactagagttgcagattattatatatctggtctaaagggaattatagttgagatttcatggatttttcttgacaaaattgactaaagtagacatgtagttgtatataactgtaagctgcacatttaaggtattcttatcagaaaaccgaagcctgtaagctgaaatacataacacagatatctttctttcttcaccagaaatcttccactaatcccgtcattattatctcctctgccatctgcttctgtgccctcctgggcactcttagtgcttgcttaagggcatgtgctcgtgctctcctcttcttatattaactgtggatcaggaagagctagggagagaagcagcataccatgtagcctcatactaatctaagcctctttcaggtttagcactaaattgcttcttattttatacatctagtctcaacatagggcataatgattttttgagagaataaaggaccacatgttagtggagggaggactctgatgtactcttctaggtagaattgatttctaggcctctcttcccacaatttggtggaagagaggcaagaaaatggtaaacaaacagtgacattccattcctgaatacatgtaagaaagcaagtttaaggagcatatcattatccctaacatgaattcattgataatagataaaacatgagtctgatattttgctgcattttataaattcatgaaattaaaggtttttatttgctcgtgatcatctaagaccattttttttctatttaactgttgtgttgttgttcttgtagctcaaagcattcagcaaaccagggttccaaggtgaatgtatagattttacagaagaaacttctgatttgacttcactcatgccatgttcttttaaagttcttcgaggttggtaagtatgcttacttagtggtttctgctgttatttaataactaatacttttaaatttacagagatatattttttgcatgcacagtgaatccttaaaatttatcttcaacaggcattttacctgctaactggtcta

SEQ ID NO: 30043 - DNA, 2300 bp, Homo sapien
agagggagactataaatccagcctcagaatgaaaggaaggaatgagtttataaagtgtagaagacaaaaattaattcaagatggattaaagacttaaatgttagacctaaaaccataaaaaccctagaagaaaacctaagcaataccattcaggacataggcatgggcaaggacttcatgactaaaacaccaaaagcaatggcaacaaaagccaaaattgacaaatgggatctaattaaactaaagagcttctgcacagcaaaagaaactaccatcagagtgagcaggcaacctacagaatgggagaaaatttttgcaatctacctatctgacaaagggctaatatccagaatctacaaagaactcaaacaaattacaggaaaaaatcaaacaaccccatcaaaaagtgggcaaaggatatgaacagacacttctcaaaagaagacatttatgcagccaatagacaaatgaaaaaatgctcatcatcactggccatcagagaaatgcaaatcaaaaccacagtgagataccatctcacaccagttagaatgacgatcattaaaaagtcaggaaacaacaggtgctggagaggatgtggagaaataggaacacttttacactgttggtgggactgtaaactagttcagccattgtggaagacagtgtggcgattcctcaaggatctagaactagaaataccatttgacccagcaatctcattactgggtatatacccaaaggattataaatcatgctgctataaagacacatgcacacatatgtttattgtggcactattcacaatagcaaagacttggaaccaacccgaatgtccatcaatgatagacgggattaagaaaatgtggcacatatataccatggaatactatgcagccataaaaaaggatgagttcatgtcctttgtagggacatggatgaagctggaaaccatcattctaagcaaactgtcacaaggacagagaaccaaacaccacatgttctcactcataggtgggaattgaacaatgagaacacttggacacagggcagggaacatcacacaccaggacctgtcatggggttgggggagtcaggagggatagcattaggaggaatacctaatgtaaatgacaagttaatgggtgcagcacaccaccatgacacatgtatacatatgtaacaaacctgcatgttgtgcacatgtaccttagaacttaaagtataataataataaaaaaaagtgtagaagaatttggttactattaaactttttagctgaacctatatatatagttaatggtattaactattatgcacattttgaaaatgcaggccaacaaaaacttacagtaaacatcacacttcccagtgagatatctgaaacagcgctctttaaattcaggcagcaggcaaaggtctccctattaccactactattcggtattctgaagttctatctaataaaaaaaaatctaaaaaataaaataagattaaaacaaaaaaggagaaaacaaaactggcaagagcatctatggtgtaaatgataaattattagggctaaagcacatttttaaaagttgcagagtataagataaatagcaattaaaccatagaaattaagggtacttataaataaatctaacacaagggaataagtttttttcctaggaattttataaaaactcttgaaggaagtaaacattgagagatacaatcttttataggtaaaaggactcaatattgtaaagatatggtcttccccaaattaatattgtttcaggcaaaacacagtgttctctccttttagggggtagaggtggggagtaaaacatggcaagcttatcctatgattaatttggaaaagctattgggtcaaaaatcgccaagataatttttaagaacaacatgtagggtcacttatcctaccaagtatatattgctttatacagcagtaataattagtgggaatcagtacaaggagagacaaatgggacagaggaatagggtagcatggaaactgacctatatagtaatggaatttggaagataacagcattccaatggagctatgatgaactgttaaataaatggtgttgagacaattgacccattccatggaaaaagatagttagaatcctactttactccaaacacaaaaataagttccagatggattaataacaagctaaatgtgaaaagcaaactttacaacttagaagaaaatataggaatctaccctgatgatactgcagtaggatggatttcttcaaacagaaaaagcacaaatgaataagaaaaag

SEQ ID NO: 30044 - DNA, 2300 bp, Homo sapien
gggcatgctttcctcctgatttctttatatataaccgattataccagcatgtcccaagccatgacttttcacatttttcctcacttactgattccatttgtttgccttaactagcatgtctgttttatcactgtgatattaatagtcttcctggccatcctttactcctaaccttccccctaacccctgttttaggtctgggtctatttttctctgacctcatatattgcaccagtactgatgccgttacttccattctctctgttcttcacttatactgttgtcagacagattgcctgaaggccattaaaaaatacatatacacaatgccaacgtgtaataattaccaacttaaaattaataataccaatttaaaataaatattcccatggttcaaaagtcaaaatataccaaaaggcacttagtgaaaaactttgcttccacttgtgcacttgtgccctttatcttctcttacacagtcttcccaacaggcagccatggttaccagttttttttattttttagaaaaattttaatgtgtgtacaagcgcatacatatgtatgtgcacagaaattttccttctctgcaaatggtagtgtatgaaatacgtttttcataccatcctttgtgtttatttctaaacaatatatcttggtgatctttcataaagagctccccattcttttttacagctgtatatgattcttctgtgtatgaaccataatttatgtaaccagtcctctcctgatgggcgtttaaatcattccacacccttcactgttccaaacactgctgcaaagaaaaactatttcataattcatccttctcttatgcaagtataagcaggtcccttgtgagggtcactgtgagagcttgttattttctgcctgttcatttattgttctttgaccctccactgcccctgctgctagtgctttgcttcttatctaccgagttgcagttgcttcagcccactcatagtccttagttcagaagcttcaagaactttccactgggaatagatctgtctctgtcctgtcagtgtgggaggagaagcaagcagtgcaatgcaccataacaaactgtgggagcacttgccgctgtttcctgttgggctgatttgccgttcccccaacatgtcccatgtgtttctcttgtcttgctttgcacagaatgttttccctctgttcaccatcttctttccagatccactgcatcctttgagactgagctcacaagccaccacatccatgaagcttgattcctgctcccttctgctaaaaataatctagctttctactgaggactctgacacagcatatctttttctgcactggattacattacaatatctgtacagttttaatttaactatttgttagtaattccccagacacaaggatagatggtgccttgttttatcatccccccaaaagtctcttaacatggtgtcttgcatacattaatgaatgaaaaagcaatactgagtctattcttgtctgacatgatgggttgaagaaatacttttaatgcagaaatcaccaccattcttgtgcatttcagctttttttaaattaaaaatgcctttattcttcctcctaggaatatttttaagagcttaccaccacagagtcttacattcctagtgactgctcctgtgacctcctagaaattagggtgccattccattccatatttattctgttgccagctaaaagcattggcaggactaattatggtccatattacagtaccacaagaccttaatctgtgatttggaatcatgggtctctttattatggctgtttttattatgagattgattgcttttctgataacttgaattttagtttacaaaaaagtgaacaaaaattattaataaaatctaatctttccagtgcagttttgactatagcaaccttagagagtaaaacagtaaactccatgcatttaagaatacaatggattcagggtaccctgtgttcagactgggatgtcactgagatatggccactcctatggtgacgctttctttttctgctaataggtttttgaagaaccctccatcagcctttttgctctggagcattgtgagggaagagagttacatctagaagaggctgtgaactctgttctgaacaaggacctacacttctacacccagtctgtgtgggtaaaaagtggactgtaagtatgggaaaaaggcttggtctggttcagttactgttttaagacagagttgcagagttgcaaaccaagtccactgtgtagtagtacgcattcaagtggtcttgaggaa

SEQ ID NO: 30045 - DNA, 2300 bp, Homo sapien
ttgtgaaatgttgccaacctgcgaagcttgttagagactcagtgcccagggcttttactgggggcttttcacttaggccacccctgcctggcacataccaacgtttccagactcccagaggaaagcaggtgttggtataaactgtaatgattgtacattttaggcatggtgagccactcctatcagttaatggtggtggaaactctcccaaaatcttaagttctcagacatcggccacaagctgcactttcaaaggatagcagtcaggcctgctatggaacgtcttctgcataagcagtaccccttcccgaatccatttttctatctctttgtatttctccatcacttgagagttccatgtactagcaatgctgtgccttcctgaagccttaattctttcctggagaattcaagctggtctgtttcacttaaaggaaacattttcagaaaatgtgtcttactgaccacatatcctaaacactaaagtttattttttttttctaagcttcaagctttacccctctcctgtagtatcagtttgtgttagtcttccaccatgtcctgtgtttccttatcaaaagcacctggtcttttgaaggaatggagctgtttagagggttttatattttgacatttcctttcttaatttgttcagtttacatctgggtttcaatctaaagtttcttttataagttgcaacacgtcacacagtatgcaacacatcgttccaggatgcttacttcccaggccagaacattaattccacttagtctacagtgtagctgaaatactgcttagttataatgacaaaagaacagaaaacagtattcttgcaattctgataactcaccaaagtaggaaactataccatttataaataacaagtctttcagaaattttggtttttataagtacagtggttcttaaccttgtcaggagatagggacttccttaagaatctgttgaaagtgatggagtcccttcccagagggaaaggactttaagatagaattttgcagtctcaggaaatttaaataatttgaattacagttcttggaaacagatgagggaaacctaccctctaagtatcaatagttgtggtttggaggcagttctgaaggagctttgcaaggcttggctgtgtggcttcgactactcagcagtgtcagcagcagaagcatcacctgggagcctgttagaaatgcagaacctcaggcttcaccttggagctagtggatcatatcctgcattttattgagatgctaaggtgatctgtgtgcacattaaagttggagaagtgctgtgttaggggctaatgatattggtattatttaaaatcttcagttaaaaagttatagttttttcaaggctttagatataactacttttagccttcacttttcagcctttaggggctttatttctttaaacgaaggggagtttctgataaaagtggccgttttcaggaataagctcagagttggaagtgagcaggttcaggtggttagtggagacaggagaaggcagtggcctgctccagccaccaggagacaccgcgggtccagggcgcattgattgacctgcgcaacagttggggtggtgctgcggtgaggagcacctggcagtgggcggctgttagtttttctctagtcaaatgtttgtaactcagagtacatctaattagatgtgggccctgatgctgatgggagccaaatccaagatatttgactttgctgtgtcagtggccacaggctaaacctgtgagtaggaactgctgagacagttgaataggtttatttgggataattatactgcctaataaataataccatgacatagtgcttgtgtaaaagaaaaacacgttcttctttagatgaatatgtcatctgagtggtggttgagcttgaatcatatcttagaagaaatggcattggcttaaggctgtctcctatcctgggggaagtagctttgacctatgaagagttctcacgaaggtgtaatggtcattcagttgtgtgtgcgcgcgatccactaacaccaatgctggcactccttgtaaacctaaccatgtgtgttttgttcttttggtaggtttgcatttccttactgctttgtcttgaagacagaacgatgccaaagaaagcaaagcctacagggagtgggaaggaagaggggccggctccctgtaagcagatgaagttagaagcagctggggggccttcagctttaaactttgacagtcccagtagtctctttgaaagtttaatctcgcccatcaagacagagacttttttcaagga

SEQ ID NO: 30046 - DNA, 2300 bp, Homo sapien
ccatgttggccagggtggtcttgaactcctgacctcgggtgatccaccggcgtcagcctcccaaagtcctgggattataggcgtgagctaccgcacctggccccttctccttttcttcacaggaatgatgggcactgtttaggtctgaaaatggaactatcatgacttttttgcttgctatgctaagaaatcggaattataatgaaaaaaatcagagagaacatactgatatactaattttgcattagaggaactcctacacaagatgtatgatttccccctgcaaagctgacttccatatgtacttttgttctgttagacatcctgcggccattttatatgctgagaaaatggtattttgtgttgacattataacttttttctacaaccgtactgcttttccaagtggtggacgtgtgagaatttacctttatctgaatcccgggaacagcaatattattctatattatcttgagtagatgtcttgcagtcaaaataaagagcgaagtacattaccaatatcatatcaactagagatttttgctgttgactattcttttttaccctgtaagggctaaatttgatgttaccctcgagtttttccaactggaacctgccaggaaacttactagttatacgagtattagtaaaacgtgaaaaagaccaacagttgactgactggtttggctctaatcttgtttctgcatcttcctagctgtgtgatcttgtgcaagttagttaacctctcctgactcagtttcctcaactgtaaaatggaggtaattgcaaggttgtagtgaggatgaagtgaggagtatttgaaacacctagcgtggtgccttatagccaggaagaactcaattcaagacttgctattattgttagttttagacaaatactagacaagggtgtactttgttcccatttgttcatgtgccacttgatccttagaagcagccactggtctcagtcaccttgacggaacgaaatgtcgacttcctctgggtcctctggctgtctacagagcaaagaaaggcacaggcccgccactgatttccctgctccctcatttgtgcctcctgactggaaccaaatgttccaaagcagggagtgttaggctgaaaggactcagataactgcatttcttctgtttctatagccatagtcgcaacgaatttccagtatcttttaaaactaggattgactctctctcccggagcgagatgatataaatgacactcggcttgtacaaatcagcattgtgtagccacacagcccataagaaagccatgggagaacccggaccaccaactccctaaacttgcaccgctggtattcctcttcaggcctgcttctctattcataaaaggaacggagttgcaccaaaacgctctctcaaatcctctcctgccgccccaagttaaaagaaaaaaaaggagagccgggtgggtggctcacacctataatccagcactttgggaggccgaggcaggaggatcgcttgagcccgggaggtaaaggttgcagtgagccaagatcgctaccactgcactccagcctgggcgagagtgagaccttgtctcacataccataaaaaaaaaaaaaaaaaaaaaaaaaaaaaaaaaaagaggaaaaaaaaggccatttatttccttccatatggactaaagaaacgcccgggcgtgaacgcggaacaccgccgggtagccaggcctccgggctgccaccacttgcgggccggcgtggcggggcggggcgggggctggagcacggcccggagcgtgcccacgctgccccgcctccagccgctgcgccgcaacgcagtgggctcgcggccgcgagcaacaggccgtgccgggtgagtggggcgctctcgtgggcatcccagcgccggggcaggccgggtagtgcccgatcccgcggggcgcgcgctgctgctttaggcacccgggctcgggtgcgggtctgggagacctgtcggtcggcgagaagcctcggtggccggcgctgtggttgcgggacctgggacgcgctcccaggcgtcccacctccccggagactggggcagggtgggtggggcccggatctaggggtagggtcgcggaagccttggttacagagagtcgcacacgtggcctgctaatggtcgcgacaccggtgacgagcgcacggaaagtttggaggcttagcaaggagggtggtgccggcctccgcccggtggtggcagaactgcctgtgcgagcacggcttccacgtgggctgcgccgccgggcgtcatgtcgggcctaagagacacgctc

SEQ ID NO: 30047 - DNA, 2300 bp, Homo sapien
ctccctcccccttcctccctccctccccgccccttccttctttccttcctttagacggaatttcgctcttgtcacccaagcacaaactaactttccttctctttttctttttcttttccgaaacagagttttgctcttgttgcccaagctggagtgcagtggtgcaatctcagctcactgcaaccccgcctccctggttcaaccaattctcctgcctcagcctcctgagtagctgggattacaggcaggcaccaccatgcttgagtaatttttttgtatttttgttagagacgggggtttcaccatgttggccagggtggtcttgaactcctgacctcgggtgatccaccggcgtcagcctcccaaagtcctgggattataggcgtgagctaccgcacctggccccttctccttttcttcacaggaatgatgggcactgtttaggtctgaaaatggaactatcatgacttttttgcttgctatgctaagaaatcggaattataatgaaaaaaatcagagagaacatactgatatactaattttgcattagaggaactcctacacaagatgtatgatttccccctgcaaagctgacttccatatgtacttttgttctgttagacatcctgcggccattttatatgctgagaaaatggtattttgtgttgacattataacttttttctacaaccgtactgcttttccaagtggtggacgtgtgagaatttacctttatctgaatcccgggaacagcaatattattctatattatcttgagtagatgtcttgcagtcaaaataaagagcgaagtacattaccaatatcatatcaactagagatttttgctgttgactattcttttttaccctgtaagggctaaatttgatgttaccctcgagtttttccaactggaacctgccaggaaacttactagttatacgagtattagtaaaacgtgaaaaagaccaacagttgactgactggtttggctctaatcttgtttctgcatcttcctagctgtgtgatcttgtgcaagttagttaacctctcctgactcagtttcctcaactgtaaaatggaggtaattgcaaggttgtagtgaggatgaagtgaggagtatttgaaacacctagcgtggtgccttatagccaggaagaactcaattcaagacttgctattattgttagttttagacaaatactagacaagggtgtactttgttcccatttgttcatgtgccacttgatccttagaagcagccactggtctcagtcaccttgacggaacgaaatgtcgacttcctctgggtcctctggctgtctacagagcaaagaaaggcacaggcccgccactgatttccctgctccctcatttgtgcctcctgactggaaccaaatgttccaaagcagggagtgttaggctgaaaggactcagataactgcatttcttctgtttctatagccatagtcgcaacgaatttccagtatcttttaaaactaggattgactctctctcccggagcgagatgatataaatgacactcggcttgtacaaatcagcattgtgtagccacacagcccataagaaagccatgggagaacccggaccaccaactccctaaacttgcaccgctggtattcctcttcaggcctgcttctctattcataaaaggaacggagttgcaccaaaacgctctctcaaatcctctcctgccgccccaagttaaaagaaaaaaaaggagagccgggtgggtggctcacacctataatccagcactttgggaggccgaggcaggaggatcgcttgagcccgggaggtaaaggttgcagtgagccaagatcgctaccactgcactccagcctgggcgagagtgagaccttgtctcacataccataaaaaaaaaaaaaaaaaaaaaaaaaaaaaaaaaaagaggaaaaaaaaggccatttatttccttccatatggactaaagaaacgcccgggcgtgaacgcggaacaccgccgggtagccaggcctccgggctgccaccacttgcgggccggcgtggcggggcggggcgggggctggagcacggcccggagcgtgcccacgctgccccgcctccagccgctgcgccgcaacgcagtgggctcgcggccgcgagcaacaggccgtgccgggtgagtggggcgctctcgtgggcatcccagcgccggggcaggccgggtagtgcccgatcccgcggggcgcgcgctgctgctttaggcacccgggctcgggtgcgggtctgggagacctgtcggtcggcgagaagcctcgg

SEQ ID NO: 30048 - DNA, 2300 bp, Homo sapien
ccttgcagagcttacattctagccggataagacagattatgaacaataaacataatgtaaattatataaaacatgctaagcaggatgaaaggtagattggtaacacaggttgtaggaggaaagaaagaatacggtatttttaaaaagagtggtcagggtatacttcattcaatagatgacattttagcatacatttgaatttgttaagggagttagccatatagatatccagatgaacaatatgtcaggcaagggtgacaaccagtgcaaaggccctggggtaagagtgtgacccctaacagagtaataaaatgtataatgtttcccaaactcatttagtacataacaatttttcacaaaatgccttcagtgtagccaagaaatactttgggaaatgttagtgtagatgttgcttactaagtgaagaggggacgaggtaatagatagtgctagggccgaggggttggtgccctggatctcgtaagagcactgaggtggaatgtactgaaacaaactttgaccacagtgcggtcttccaacaaccaaagtgacagtagcttaagatgggcaacttttcctacatttcttccattggctcttcaaagaaggcttactggctccgaaatacctgaagaaaatgcttcaacgtttctaaacattacagaaattaaaattacaatactgattgaattacttaacatttaaaagtctgataataccaatgttaaaaaatattttaagaaataagaactctcattcactgctagtggggaagtaaattggtacaagcactttgatgagcaatatgattgtgcttagtaaatttgaaggtgtgaaaattatttgtcctagccattttacttttaggtatttatcctaaagaaacacttacacatgtgtacaagaaaatatttataagaatttattgcaggattgtttataatagaaaaataagaaacaatgcccatcaacaaaaatacgaataaatgcaatgttatgcatccatactgaagtgccatatagcagttaaaatgaattaactagaggcacatttatcaacataataaatccctaagcattaagttgaaagaaaaagtagcttttagtagtaaaagtagaatatgacaccacttatataaagttttaaaacatgcagaagtttgtacattatttatagatacatacatatacaataatagtataactgcatatgattataaacactaaatcgagcctaagaagagaagcaaggatttattacatcattctgtatatttgtaatcttttatattaaaatatattttaaagagaaaagacatgcttaagaaacataggagaaggttttaatgcatgggctaaaagaagccataacccaaaccaaaagaaataagtatgattaagcaattacacaaaatagaaggtgtcaaggacacaaatcaatttgaggaaatttaagaatttctctcacaacactatatttctgggaagaaaatggctttcttcctaagtcctagtaaaaaggtcaaccgttgctgtgttgctcaccttgtgctattccagttgaagaagattaatttcaatgacatgaccatttattggtgctttgcatatgtgaagtagaaatattttcttaaatattttctctaagtatgcaaagcacctttaggagagtgtgtggctataatttaacagtgacagtgtgtgctttgcacactgaccaggattaagttcatttttattaactgggttgcttgctattaaataaaccttaaattaaaccacttttgttatcaatgaaataaaccatcatcttaaaatatgattatttaccttaaaaaaaataattttattttgtattcatgctaaggcagtctgtatggcatttggggaggaaaagattctttctggattaaaaggagccataagataatggaaaaggtcttcaaacgtgtaattaagattaaattaatcatctttttttctcaataagcatattattttgctgagtcactaagtatatttaaatgatattgcattggattaagaggattaatgcttaacctcacttctttgtttgcttaggactgccgctgagggtttactgagtatggattgagcatcacactaaaaaccttccccggaaaaagggaccaaaggatgtaaactgaaaattttaaaaatctgctttgttttcctcaaattgctgaagatccaggtagatatttgcctgtaagtgctgtgagtcaatttaatctgctaaaacaaagtgcagcattgaagacaatgtctttctttttccc

SEQ ID NO: 30049 - DNA, 2300 bp, Homo sapien
gttatgagaatttcagtttttcattcctttctcttctggcaaaagaccctagtggcacaactgggtcatttatgtgctcaaagcatatttaataaacaacatttttctatgcttggaaaaagaaaccttcaaaaagaatgaatatgccatgaatggctacctgtattattgacattgctgtgctactgtatgtatttttgtttagaaagcacaacgtgtttaaaggatatccacaatttccttcaatatatgggtaaggaagaaataacttctctaatttttattataatttatagaaatgttgataatgccatttaattcattaaaattttagattgggtaacaagttgtcataatagaaagtcagaaactggatgactctgactggactatttttatattttagttttatgactctaatatggataaagagttataagactgaatttttcctttaatattttgctattttgttaatcttattatgatgagtttatataaattagggcattaaacaactaaaacttggtttaaagattcagataataatgattcttagaattatttcttggaattattctgatataaatacccattcctctgaatcaaccacattctccaattaaaacttttaaggtgagtcacttacatattaactcctgtatccttacactcatgtttgacaataatttgagagctcacactgtaaattttgttgatgtgaataaaggttgcattaagtaaagtcctggtattttggctttggctgccttgaaaccaatatcttttgtccctctctccatattccaaatgtaggatcagtgtatttaattggccatcctagatcatgtcccttcactttagatgtaagaaaaatgggaaaatgagtttctagttcttttggcagtatgttacctctgacagccactatgatttcgatggcaaaaaaggagatcacaccttggccatttacaggacatatgtccaccttgttacctccttaatataacttgctcaagttgattttcttgccattccttttggttctgttttacactccaaggatgcatcatctttaactatgcctttgactgcctttgactaccacaatgaatccaagcaatcatttctattgagctctaataggctcatattactgattggaacacatctagttgtccagatgatgctcactccaaaaacttgtcagcacacctgagttctcaatgtttaatatccatcttcccagtcaccaagggactcctctctccttcactgaccacttactgcctacaaaatatgtcacagaatactagagactctacattctgaattctttagaatctatttctttgtcttactgtctctttcaatgtcatatcacaccaagaccatacatttaacatgcatttgaatcccccggagggtattttcaaaatgcagatccccagacctaattccttaaataacttctacattaaaacctcataacatatttttcataaaaactcactcagataatttttatgtgtaatgtgatttgggattgcctgggccttactaacaagtttctaattaatatccctgagtacagtttcttcttcttgcagcatattttctacactatcaaaaactaaattaaaaaaaattaggatgtaatttcccatcttaaaatttttggcacatgcttattgtatgaagaataaagtttaagatacttcacatggcatttattttatttatttttaattcagaccgtacaaaaatctttcctgttgacattgtatcatatgccagtcaaacaatttttctactgcactcaatagtgtccatataaatgttgtgcatacagagaatgcctcttgttttacctaaatctgctaattactgcacagtttcaaaccaaaatatatcattttttcatgtctttattgcaacaaatagagattcatcagctataggactgatcaaaaaattgagagggttctgatcattttaggttttccttcagcacctcttccccaatttcaactgataatgccattgcaaatgttccctttcatttgttgcattttattttagagggcatgctgtgaggacatggaagaggaaaatgcaacattgctgacagagtttgttctcacaggatttttatatcaaccacagtggaaaatacccctgttcctggcattcttggtaatatatctcatcaccatcatggggaatcttggtctgattgctgtcatctggaaagaccctcaccttcatatcccaatgtacttactccttgggaatttagc

SEQ ID NO: 30050 - DNA, 2300 bp, Homo sapien
tgtcattatgatgttagctggttattttgctcgttagttgatgcggtttcttcctagcctcgatggtctttacattttggcatgtttttgcagtggctgttaccagttgttcctttccatgtttagtgcttccttcaggagctcttttagggcaggcctggtggtgacaaaatctctcagcatttgcttgtctgtaaagtattttatttctccttcacttatgaagcttagtttgtctggatatgaaattctgtgttgaaaattcttttctttcagaatgttgaatattggctcccactctcttctggattgtagagtttctgccaagagatccgctgttagtctgatgggcttccctttgtgggtaacccaacctttctctctggctgcccttaacattttttccttcatttcaacttgggcaaatctgacaattatgtgtcttggagttgctcttctcgaggagtatcattgtggcattctctatatttcctgaatctgagtgttggcccaccttgctagattggggaagttctcctagataatatcctgcagagtgttttccaacttggttccattctccccgtcactttcaggtacaccaatcagtcatagttttggtcttttcacatagtccatatttcttggaggctttgttcatttctttttattcttttttctctaaacttcccttctcacttcatttcattcatttcatcttccatcactaataccctttcttccagttgatcacatcagctcctgaggcttctgcattcttcacatagttctcgagccttggctttcagctccatcagctcctttaaggacttctctgcattggttattctaggtatccattcgtctaattttttttcaaagtttttaacttctttgccattggtttgaatttcctcctgtagctcagagtagtttgatcatctgaagacttcttctctcaacttgtcaaagtcattctccgtccagctttgttccattgctggtgaggagctgcattcctctggaagaggagaggtgttctgctttttagagtttccagtttttctgctctgttttttccccatctttgtggttttatctacttttggtctttgatgatggtgatgtacagatggatttttggtgtggatgtcctttctgtttgttagttttccttctaacagacaggaccctcagctgcaggtctgttggagtttgctagaggtccactccagaccctgtttgcctgggtatcagcagcggtggctgcagaacagcagtgtctgtagaacagcggatcttggtgaaccgcaagtgctgctgcctgatcgctcctctggaagttttgtctcagaggagtacccagcagtgtgaggtgtcagtctgcccctactggagggtgcctcccagttaggctgctcaggggtcagggacccacttgaggaggcagtctgcctgttctcagatctccagctgcgtgctgggagaaccactactctcttcaaagctgtcagacagagacatttaagcctgcagaggttactgctgtctttctatttgtctgtgccctgcccccagaggtggagcctacagaggcaggaagacctccttgagctgtggtgggctccacccagttggagcttcctggctgctttgtttacctaatcaagcctgggcaatggcaggcgcccctccttcagcctcgctgccaccttgcagtttgatctcagactgctgtgctagcaattagcgagactctgtgggcataggaccgtctgagcccgctgcgggatataatctcctggtgtgccgttttttaagcccattggaaaagtgcagtattagggtgggagtgacccgattttccagatgccctctgtcacccctttctttgactaggaaagggaactccctgaccccttgcacttccagagtgaggcaaagcctcgccctgctttggctcgcacacggtgcactgcacccactgtcctgaacccactgtctggcactccttagtgagatgaacctggtacctcagatggaaatgcagaaatcacccgtcttctgcgtcagtcacgctgggagctgtagactggagctgttcctattcggccatcttggctccacctccctgatttatgttatcttttattggtacttgattactttaaaaaaaactgagttttctcaatgttaaaaaagctacaatttttcttttacactaacatacatttttctatttgcctttgaaatctttttccactgtgatgttgtttcatagtgacatatgactatgttta

SEQ ID NO: 30051 - DNA, 2300 bp, Homo sapien
aaattaccttgggcagtatggccattttcacgatattgattcttcctacccatgggcatggaatgttcttccatttgtttgtgtcctcttttatttccttgagcagtggtttgtagttctccttgaagaggtccttcacatcccttgtaagttggattcctaggtattttattctctttgaagcaattgtgaatgggagttcactcatgatttggctctctgtttgtctgttgttggtgtataagaatgcttgtgatttttttacattgattttgtatcctgagactttgctgaagttgcttatcagcttaaggagattttgggctgagacgatggggttttctagataaacaatcatgtcgtctgcaaacagggacaatttgacttcctcttttcctaattgaataccctttatttccttctcctgcctgattgccctggccagaacttccaacactatgttgaataggagcggtgagagagggcatccctatcttgtgccagttttcaaagggaatgcttccagtttttaacctttttcttgaatttttgatagcatttaaatttcatgcacacatgaataattcttaattgtatgcataaattgtattataaataacctggatggtttctagtataggcattttttctcatttcccctaatctctctgtctcctccccacttccgtccacattccttttcctccccaccccagaggggtaaaaataccttaaaaatagcctgcttccaaagcatgttatgtttaagtgtacactccagcagtattggagatagttaattactaagaatatacaactgaaaataggcatttaaattttttattgtgatagaaaatacataaaatttatcatcttagccatatttaagagtgtagttcaatagaattaaatacatttgcaatgttgtattaatacagccatcaccactactcatccagaactttatcttcccaaactgaaactctgtaaccattaagaaatagctccctgtgcccacctcccactaacaaccaccactctatattctgtctttataaatttgactactctaggtacctgtaaatggaataacagaatctttgtccttttttgactggcttacttcaattagcattatgtctccaaggttgatccatgttgtaacatgtcagaatttcttccctttttagggttgaataatgttccattatatgtatataccaccatttatttattcatcatccttggacatttggtttgcttccaccttttgactattatgaataatgctgctattaacattggcatataaaaatactcttttaaacaacattgttaatcagtacatatatattcattgaaattttggggaatgttgatactaattgctgacatttaaattatgaatcagctttacttaacccatatagagaagtgttgttctctggatctttctgtcaagacctcaaaacccatctttgtgaagataatctgatgtatttcttcctcaaaatgtgctggaaatattcacaatagcagagacatggaatcaacctaaatgcccatcaacaattgactggataaagaaaatgtggtacatacacagcatggaatactatgcagccataagaaagaatgagatcatgtcctttgtagcaacatggacagagctggaggccattatcctaagcaaactaatgaaggaacagaaaaccaggtattgcatgttctcacttatgagtgagagctaaacactgagtacacatgtacagaaagaatggaacgacagacagtggggcctacttgacagtggagggtggaaggacagagagactgaaaaactactattaggtactattaaaatggtttaaaaatgattttaaaaggtactgaaaatatgtttcatcactagccaaagaggtaattcctttatggaaattcattctccccatgaatggggcatgcaccaaagtccaggcaacatgaggaaacattgtggaagatgctctccttcctttaagccaaagagacctaaataactgtggcatattataaattagtgccttctttctccacaattttttttcagacaagtcaggaatggctgaagaaaatcataccatgaaaaatgagtttatcctcacaggatttacagatcaccctgagctgaagactctgctgtttgtggtgttctttgccatctatctgatcaccgtggtggggaatattagtttggtggcactgatatttacacaccgtcggcttcacacaccaatgtacatctttctgggaaatctggc
